United States Patent Application Publication US 2007/0054278 A1 - sequence listing, part 36

SEQ ID NO: 94315 - DNA, 505854 bp, Homo sapiens
  misc_feature (1)...(505854): n = A,T,C or G
tttcttaaaatgttagatacatgcttatcatatgacctggccatcctactattaggtattttcccaagaaaagtaaaagcatacacaaatgtttctagtagttttgtttgtaatagccaaaaattgaaaacaacctaaattaaggtaaatgaataaacaaattatggtatatccatataatgggatgcaaatcaggctgggcgtggtggctcatgcctgtaatcccagcactttgggaggccaaggcgggtggatcatgaggtcaagagttcgagatcagcctgactaacatggtgaaaccccatctctactaaaaatacaaaaattagctaagcgtggtggcacgcgcctgtaatgccagctactcaggaggctgaggcaggagaatcacttgaacccaggaggcagaggttgcagtgagccaagatcatgccactgcactccagcctgggcagtagaacaagactctgtctcaaaaaaaaaaaaaaaaaaaaaaggaatgcaaatcaacaataaaaagaaatgaacagttgatacatgcaaaaacaggaattgatctcaatgctgatcaaaggaagcaaaaaaaaaaagagtacataccataggattgcatttgtataaaattacaaaaaatacagactatagatacagtgcaaatcagaggtgcctgagattagggggaaggagaagtatgggcaagacaaagggctaaaaaagattatgaaaagggcttgatgcagtggctcatgcctgtaatcccagcagtttgggaggccgaggtgggtggatcacttgaagtcaggagtttgaaaccagtctggccaacatggtgaaaccccgtgtatactaaaaatacaaaaattaaccgggtgtggtggcatgtggctgtaatcccagctacttgtgggactgaggccccttcgcttgaacccaggaggcagatgtggcagtgacctgagatcacgccactgcactctgcctgggtgacagagcaaggctccatctcaaaaaaaaaaaaaaaaaaaggcatgaggaatgttttggtagttggttatgtttattatattgattggaatgatggtttcaaggtgatggtatacatgtcataatttgtcaaattccacaccttaagtatctcccatttattaaatgtcaattataccttcaaaagctttttaaaaagaaagggtggaaaggactatattaactatttattaaaaccttactataaatagtagaacactatcaaaaaataataattgtatatacggagaagagtaaaatacagtctttcaatcttggatacttttaaattacactccaaaatgctgtgctaggatgcattaggcaagaaataatgtgtcttctcattttctcagtatctaccatacagatatttacacagatctgtttgaggatattaggtaccttcatttcctttgatttgtaaaatacggtgagatttctaatgagaaactttgcagcatcattatttttttgagagtataaaaactttcctttgttcagtaaattattaggatatgggatcaaaagctcaataaagaatgagtagctccactgtctcaccaatagtccaagattccttcacttcttcccttcctcattcctattgcaaatcaccacaaatccctaattgatactaccttcttagtaatctgccaaatgtatccacttccttccacctcccttccctttcttccagtaaacgaactgttgtgatggtcagtttagccaattaacaatttttctggttgccaatcgaaatcctccagtgaactacacccagcaaaatgatccaatgatggtttttccgtaatgtttctaatgatggatcccgtgcaaaggaaacgtttcactttaaaacctgatgtgcttactatctctgcttgtttctgttctatgagctctctggcaaattggggatacacaagtggcctgtctttactaaacgcagtggcaattgctaaatatcaagcaatatacggggtatagaggtggaaagtaaaaaataaaagcctctctttttcactgaagtctgaagaccttatttttaactgtctctggagtacctaagtctgtccttttagaaattcagcttccttgatggaaagatttctacaccaaattggggctgatgtgtcagcaagacattcattcatatttcacactaagtgcctgccataagttattgcagtatcctcataaaaacagagaggattgcaccattaaggctctttctatgtggtgaatatacatttatagcctataacataatcaattttaaattagatttctctcagagaaaatttttctgggcaaggatctctctttctctctctctctctctctttctccctctccctctctctgcagagagaagcacactgctagcacaaagcccctgaaaataactctttacagtcacctcccaatcaataaggagctttatttgctgcatgtcacaccctctgttcattgtattcacaaagctgagctggcacaaaagaggccgcacaaaggccagcctcaactctgaagggccctgtgcaggacatcagagccctgggctggctccaactctgctgttaactcagtgtgtggccatgccccttttgggcttctgtgtcctctgcttttaaatgaggccattggaccaagtgatctccaagggctgaccagattcagaagttgtctattccatgagcctagagataagatacatgcatgccatctgcgggctgtgcttccaaccattcagtaggtgagactcagggcccttttgagctgtggaggagaaaagcatgagcaccttccaagatgtttcgccactggatctgcatcagcctcctggtagggaatgttgcttgtggacaccattaccatagccaatgaggtgtcatttaacactggggtttagggaagctctcaaggtctgtcatttaagagaaacaaattttcctttctatgttggtataattctcccaaccatcccactttagcaatcaaatacacttccccaaagagcattcatttaatatagacagatatcttgccaaaccattgccatgacaggtagcctggtggtaaaagggaatctggtataagaattggatttggccccttggtgtcctaggtctgcaactgaagtaactgaaggtctgcaactgttgtaagttcttttccctcatagggccctacttcctaatctgtgaaatggtaagcatgagctaggtattacttaaagtgtctttcagcacaaatattctaaccagagatttaaaaattggtggcaccaagacaatattcagcctgcagatatgatgtttgccctatgctgtgtgagccatgctgtgtgagtcttctaatttgaacttactgataacattaaaaaatttggagttatttgaacatttggattattcacataataatccagatttctggcctcttctgaaaaatatcagccaatctggtcacactgggctgaaatttttcatggcaacatttagctggagctgaatagctgctgaccttcaggcaaagcctgaatcctccagttccttcattcctgccacttttgagatgatcacagactgagatcaagtgtcaaatcactgaatatctgacacctggacagcttgtctcatttacatcctaatccatccaggcatttgtgttttcagcggctgcttagcacttttaggaaagaaatggcatggtccaaactttctttgcatcactaattccctcatttggcaataatattggtgggagacagaaattgggtccagtggaagcctgccttggacaaaaacactgacaatatcttggctgcctggaaccctcacagtaatcaaccaactctcatcaacgagcttatgcctctgggcaaccctatctatgagtaaacatcaggaactggcattggtatgtgaattggtcacattattcctagtgaattcaccaagtcagtaacttccatgatttgggtttttcagatgtgaaataaattaatttcacacataagccaggttcctcctagagctaaaattctctgaagtagtacaaatatctagacataggctcatatttaaatatgcctaggtttgtatgtatgcatgtatgtgtttcagagttgcatatgtctgcttgctttaaagtacatgtttagtgaaaatagaaacagcatctacatccagaatcataactattgatataggaactgtgccaggacaaaaactggggagaaatctcatctatagctaatgttccctaagacagatgtgtctcagatctcaacagcagaattgactcagtgtagagagggtcactgacaactcacaaggtagggtaagaacctgtcaaagaatgtctgatgctggaatccaaggccagaacagaaagtataagcaaggatcagcactgtgggtgtgtctgtctatgcactaataaatgctgctaaaggccttccttctccccttctaggtgctaattttattaggaagttttagccctgtgtcatctcaaaggagacattgatactttactacttgatatctgaaactgtattccagctcagccttccaaatgagattcttgctgtgaagccttactgggctaaagggcccaaactgtcaaatgggtatccaacctctacacactgggaatactgcaagtcagacaggcttgattgaaatctcaacctagccatgcgctaggtgtgtccttgagggagttaccaaaaattcctgagtctcagtttcctcccctgtaaagtggggatgataataatgccctccccatgatttatgtaagaatggagttactctaagtcaagtgcttaccacagtgcctgaaattttctcagccaatgttcttcttttttttttttagtatgaaacactttagaatcaatctttactactactaatatccattattaagtttcttgactgtgctaatcatattcaacatccacaactctgagagatgggtaccattattattgccatttaagatgaggaaactgtctcattatgcttagaaacttgtcccaagtcagagcccaactataaaccctgcctaattgcaaagtctctacttttaatgatgactctatactacttccatcagataacccgtcaacaacactgagaagagcatatgagaggcaatgctcctctcgtgtggctaagcagatgaaggtttccgtataggaattcaataaaaatctatggctgacaatgaaaatgactactcagatccctgtgcatttttaaaggtcaatttgtttttgaaactttgtggtttttttcctactgaatttaatcattcttaaattcataccatctcccaaaatttgattctgcaatattctcttgaattttgaaacctagttgaattgaaggggaatgttcatgctgttgagaagaaaactggcacccctgctatccagaagtgttctgtaaaggactcttttgaatatgtaaaggaattagaatatctcttaatatatgtattgatatattcattagtattggctacatatatttgtagaaaccaggagtcactattacccagaacatttagccccatcaaatgtccaactggatctgaaacaaaaataaccttggaacaaaataggccacatttgtcagaaactgactcccaaactctgtgtgagccaccccgccccatccccagccttgttttttttttgtttttccctactctgcagtcagcctgactttggcaagcagtcaagaagtgaacaagagagatggaagtgctctgggtatctgaccccttactggccgctcaaccatgcaagctgtgaagcccagtttaaaaaaaaaatgttgcctttcttttcctctcaccccttaacgaactgcctcattctcttccccaccatcacagaaggaaaacaatcaaaagcattagtattcccgtgaaaagggccagtcacacaggggatgactgcaagtccttcgtaaccactccaggacgctgccagggcctgagaagggacaaactccaattgctccagttcaaactggtcctggcctggtcaaacggaggagacagagcagtgattcacagcaggacgtggtacttgcagactgaccgtcctctcaggactcactagggtctcttctctgacgagatgatacctggtgtgcaagtctccttttagaaatgcatagattctgctatatatttcttttcttgttggtctcttaagaacaactgggagctcttacctaacctgaagtgtctccttgtgttgttttcaggaattgggacactcacccaggacacactatggtgcttcagccaagtgaaaggcactatcgagattggaaccacagaaggtaggagaaatccccatgcccttttccttgcctccttgggagtttgtgctgatttcaaaattaaaaactttcatctttactttcatgaatctaagtccccacacaccccaaaattgcattctaggctagaaatggatttaataacttmtttctctcctgttttttttttctgttgaaatttattttattcctaccaatgagcggcactgaaatgaactttcagtaaagtagatttgcagagacagaggctaaactaggcaagccttgtttcaggatgatctgtcagcgctgtagaattctgagtccagacattttaagactttcagccataattctctccctttcattctatgtggaggaccattggcaatacatgaagtgcagagggagactgaagaagtcaagtctagtcatatgacttacgagaacattgaatcccaatcttagcatataattgcctttctggttctcaggagactttcctattccagggccctttacctgggataatgcattagttttcctcctcctgaagaactttttaattttctttattttcttcttttataagcctgggcttggagacctccatgactctccctaagggtgtctgcgttacaaaacactggatgataggcaattggaaggaactagaatagcacttctgggtattttaaatcacggtttagctcttctagcagaatgcagtagggcttgcctgaaacagattttgctgctttgatggtaggtttagattccagatgtggtataacacaggtctaaaactagttttaaagaatgatgaagtgaacagttgacaggattgaacactatactcaaactaacatgcataaatgcatgtgaacttcaggtcattctgcagcacttcaattctgagtaaaaagtaattcaagcaaagattaatctgaggaatttgaaagaggcagtttatttaaaatcttgctataattcctttgtagagaatctaatagtgggtgaccaaaaaccaaatactctatgtttacaaagtgggagaaaacacactaaaattaataaataaatccatataaaattatatttaaaagaaattgataygattgcacatatttataaggtacagtgtgatgttttgatatgtgtatattgtgtaatgatatcaaaccaagatgattagcatatccattacctcatatatttatcatttatttgtggtgagaagattcaaaatcctctctcctagctgttttgagagataccatatgatattgttaaccatagtcaccctactgtgctatagaacaaaacttattcctcagatctatgactttatacttattgactaatctctttccatcttcctaccaccctcccaggcctctggtaaccactattcactattctctacttctatgagatcaacttttttaggttcctgatatgactgagaacatgtggtatttgtctgtctgtgcctggcttatttcactattaagtgaactatgttaataatgcctttcaggtttatccatgttgccacatgacaggattttattcttttttatggctgagtaatattccattgcacatgtatatatatatatatatatatatatgtatatatataaaatgtgtgtgtgtttgtgtgtatattatatatattatatatcccattttatatcacatattatatatatatatatatcactgtatgtatctattcatctgtttatgaacacttaggttgagttcataatttgcctattgtgactagagctgcaataaacatgggagagcagatttctcttctatgtactgattttattatttaaatatagaatcagtagtgggattactgaatctaaaattatatttgtatataaactcatctatttttgagatgaattgtcaaatagagccttacaaaagatccttctaaagcccctatgaagacagatagaaaattatcaatcccattttatgtcacctaaaagaagatttttgagtgtcttctacatgacagcactgtgctagacattagaaatttttttaaaaaagaaagaaaaaaatgacctactctctaaccttatggatcttaagaaaatgaagctcaagtgaatgccttgttttaaatcttggccatgattcaaaatcatttgaactttttaaacaatagagactctgaggtctccaagagctactaagttagagtttcaagggtcagggtgatacaattttttttttttttttttttgagacggagtctcgctctgccacccaggctggagtgcagtggcatgatctcggctcactgcaagctctgcctcctgggttcacgccattctcctgcctcagcctcccaagtagctgagactacaggcacccaccaaatatgcccagcttatttttttttaatttttatttctttttgtatttttagtagagatggggtttcaccgtgttagccaggatggtctcgaactcctgacctcgtgatccgcctgccttggcctcccaaagtgctgggattacaggcgtgagccaccgcgcctggccaatacaatgtgttttaatgagtttacccagttaattctgatgttgtggactggctttgggcaccacaagtctagatgacttgttccaagtaatccattattctcttactctgcacttaaatcttgtcgttgtgactggcttcccatcaattatgagaattctagtgtctgctctaactataggtcttaccagttgcagrtttattatttgcttaagacaaattaataagataatacagatacagcattggcgtcagtgctcaatactttgtaagtactcgatatttgtaagctattaatataaatattataattagaccctcattctaaattagtgttcaccaaaaccttatgacaggtaagaatttttattcctacattacttatgaggatattgaagtcaagcaaacaaacaaaaaatattaagtacattgccaaaggcactatagcttataaatgggtgagacagttttcaaacccagtctttgggactccaaagcccctgctctttaaacattgttttgaaaatagagactctgacttagtagtctagaatgagggcctggaatgtgcattttacacatatgcccttagacgatcattatgaatacacgtgaactgaagataggttgaaatgtttgtgttgcataatacaaaagtagcctgcttgaactgactgtcaattgggtcagagtcaggatcaaaatgacaatccctattttgtttggaaagtgcactttaaaatagtgaatacaggcagaaactttttaaaaagaagaattaggttggtcacaaacacacagccactggcatggaggttccctggccaacatatcttagatgtcatttaacctccactagcactgcctcaatggaagttgagtatttgttgagtgaattaataaatgactttcacttgctactagttaaaaatctggttgaaaggaaagtgaaggggtttaattggcataatctaccctaattttctatacgctcaaagtcaataaaaattattcagctttcccttccatgttacttattcctattaatggctttttctatttcagttctatcacttactagccagttaccttggcaagttaatgtctccatgcttcagttttcctcaggtgtggaatggggataatcgtatagttacccattatggctataagggctaggggtgtgggtgtgkgtgtgtgtgtgtgtgtgtgtgtgtgtgtgtgtgtatacacacatacatatatgtataacrtatatgtatatattatatttatgcatacatatgtgtatattgtacatatataatatataatatacaatattatacatatataataatatacaatatacaatattatacatataatacatatacaatatacaatattacatattatatattatacatatataatacatatgtatgtaatatatatgtattrtatatatatatcaggccattaccaatagattgttataagatgttcaaattgcatcttggtgcaagatacttatgtgcatcttgggtatcaagtagcagactagaatttcttcacatgtcaaattattctataggactttaaatgaatgatactgtgagttcaacaataagcatttagtgagtgcttactatatccagggtactgtctcagaaagtgagagggttgtaaagataaatcaaatatagtccaagctctcaagaaatgcaccactgaagaggagacagagcatggcccagaagagtaaagcatcacatcaaatagaacacaaggtaaaatgagctacagataaaagtgcttaggctaaagactacaatgctcggactaccaaagaggtaggaatatcacacaaaatttggtggagcaaaatagacttgtgggaagaaaccattttaagacaaaccttaaataatttttwaaaacataatgtttattcttttatttttctgattacttaaacaatatattctcagtgtagaaaagtttaaatttaaccaataaaaatcagaaaataaatgtcattcataaacctacaacccacagatcagcactgttaaaagtttatatttttctaacctcttgattatgcatatatgatcattaattgattcactcaagaaacaagtactgtgtgtcaaatactgtgcaaggaattggttagtttacaccagacaatatcaattttttttttaccaaaatggagtcataatggaaatactattttgtaaattgatgtttttacttaacaatatataggatcatctttcatacaataagaggtacatataccctagtttatttacctagattttcaatatttataacattgttatgaacacctaatagtaaaatctttacatttatccaggaaacgcagtgtgatatagtgattaagagcatatgttgcacagttaaaaatacctggttcaaatttagcttcactacttatgggaatggagtaagttacctcaaatttttcatgattctatttcctgatatgtaaaattgggataataaagctattgaagaattcttatgataatataattagaaatatattttaaacaacataacacatagacattattcactaatcatgattagctactgtgattatatccctgggacacattctcaaaaatagtattccttgggctttataggaagtctgatgagagacaatgtggctttattagagtggagaaggtgcagatgaagagataacaggctccaggcatgttttggaggcaataggctagattttaggggagaagtaaactaaggaattaagatagttttcaggttttagctttgaacaattgggtggttggtggacaccgttactaacactgggaaacctgaaaaagaaagatatttggggagaaaaatcatgagcttcattttgaacacaattaataggaagtagctatgaggtacaaaggtataaacatcaagaaggaagttgtatgtatatatatgagtcatatatatgtcttagagagacaatctcagagatagagatagaacctgaggaggcctcagcatgcagatggtatttggcaccaatgaactgaatgagatcacataacttatgcagatcatgtggacatgcagtcaacaaacaatttgttgatgacctaaacttacactgttatgctggtggttaggatgccatctaaacattcttgacttagttgagttattgcaagacacttacacatttaaaagttctgatttaccrtgtgcaatgcttgtatttgatttgcttagcaggcatatttcatataacatatgatttcattgcatgaaattttacattatttcctcattagaagtactttatatggtaaaaatttcccactcgatatcagataacttcttgagacttggtgtctgattttgtacaagggaaaaagaattatctggtgcagtttctgtttttatcccagctacagcatataaccattttctttctgatactgcaattctagggtgctttgtttgttcctcactctgcagttctttgatgtctgtcaacataggtcacttcatcttattcatgggaaataattgtggcatttattctgttttgctacatgggcatcacattttttccttccctccctctgaaaagatcactcatgtagagggaaggatgaggtactctatcgattctgctttctaatgagagaaaaacatcaatttgactgtcgatgtgaggtgtatttcatataccctaaagtaaaagccaacaactgtgacttccttgcaaagaggaatcctctaactataacatttgcagtaatgtttccttttgcatggatgtttaagaaattcgagattataagaatgatttttcagcttcccttcagtgattgtgactctttgctgtcaccagaaaaaaaataaataaataaaaaccaactgggttgtctcaaagcagtaaaaagacttgtagccttcacctcattttatagaaagatgtcagtgattgacaaatacgctttcttagatgtttagatgtttagttacaataattataacttcaccccacagatcttagcctaaatgatagaaaatggagccctacttgccttgctcttcccgctcctgaatacagggtgaagggctggcaatgaaaaraattcccatttcaggcaraaggaatcctgtctttttggacagaagctttctaaatcaacaactcaagaggatttttaattaggcaccaatttgtaatcagataatctctcactttaaacttggttcagttacccacttagtgaccttaggcaggatactgaataattttccaaccttattgtgcatatgaatcccctgggaatggtgttaaaatgtatattactagattctacctctagagattctgattcactaggtctgggatggagtcaaaggacctgtgtatttcacaagcattccaaataattctttttttttttttttgagacagagcctcactatgtcgcccaggctggagtgcagtggcgcgatcttggctcactgcaacctccatctcccaggttcaagcagttctcctgcctcagcctcctaagtagctgggattacaggtgcctgccaccacccctggctactttttgtatttttagtaaagatggggtttcaccatattggcccagctggtctcaaactcttgaccttgtgatctgcctgcctcggcctcccaaagtgctattacaggcgggagccaccacgccccgcccatcccaaataattctaatagtttgatccaagagacacattgagaaattctattctttctttccttacatcagagggcaattctaagagcagagaagatagaaaatctgaaggtgttttgagtgcatttaaaggaaaccagaatgccaataaatgtgagatactgtgcagccaagttctctgcctcgggcactgaagggagtgaaaaccttccctctgtgtgtgaaaaagaagtggagatctcttctctgcacctagtaggctacagggggatttcctatgcaacttcactttgcatggcgctccaatctgccagaagaaaaattggagtgattatgaacaagttgtgcaagatgaaagcattttttctcagctgtgatggagaatgtcttgatatgaggaggcttgctgtactctgcaggtgagttggtgagaagtgagctctggaggaagggaagcgggttctttgcataacattgaaggcaaacatcctgttctctttgtaagcattaggtaattaaatatttcctagccaagaaggagaaaaaaactccatggctatttatttcaccctttccctaatgccaatcactttaaatgtgtttaattaacaaatatttatggagcacctagtatgtgccaggcactgggctggacgatgaggccagtcatggacaaaaccctgttgctcccctccattaagcactgtacactttcctgaggacatcaccacatggtttttaatgacaatccagtgtgattgtggaaagtgctagaaaaagagtaagtcacccaacccacactaggaacagagcagggaaggcttgctagagtaagactggctagattggaagccaatatgagacctaaagtagaaacaggaattagctaggacttctgggtacacagacccacattttattcatggttcaattattctcttgtgctatttgctcaggttccctgggtgattgccagcttgggaggatgaaaggatatgttaataagatctttgaaagtgctgcacaatacctggtcagggtagagtaataataatgataattccatttaatcaggttttacgagatcagactccttaataactgctttcaacacgttatctcattccacctttgctgcaacactaagatatgaggcaggtgccagcttaagcccattttacggtggaggaaattgagactcagaaagtttaacaacatatccatttacacaccagtctgacytcagagttgttattctcagctactgtgattgagtaatcttggaaagtaacctgacaccaagcaggggcttaataaatatttattgactgaaaatagccttcagtaactaataaatgtcaactaaccaaaaaacatcaatactaccactaatacaacaataatggatatttttagagaataaaaatgttcattcaaaacaattcattacagatacacaggacttttctacttttaacatatatgggtcatatacatcttataacccataggacataactagaatcagtcttataatcccacattgcagacaaaaagttagtttagatattatagatagtagacytaattttcttcatagatatgaggagattaaggcagctagagataagttttaaattgtccaatgtcttatagagaccagaaagcaaagttttgaatcctacaccagaaatttttttactgctcatcttcccctggatgcactgactgtgagtttaagacatggttgactgtcttgaaaatgcagggcataggacaccaaggcaactcaagggaaatccatcatgctttcaagatgctttcagctccaacagaaaactgctatcaaaatatctggaacagtaaaagaatgatctcttctgcaaatatctactgagcacctactatgtgcttggcattctaggcactggagattcaatagtggaggggctagacaatagacgtaataaacaagtggaatataaaatatgaggctatcaatgtaagaaaataaaccaatatggggttcagggatatggtgttctcttttaaataggatggtcaagacttcatgcaaaagatgacatttgagcaacgatttgaagaaggcaaaaaaaaaatatcgtcttgtgaatatctggggaggagagttccagatagagggaacagccagtacaattgccctgaggcaagggcttatctggtatgtttaaggactggacttgtggccagtgtgtctgaagttgagtaggcaaaggaggaagttgtgaaagatggagacagatgatggcagacagatgcaagatggggaccttataaaccattataaatagctggactcctgcctgaatgaaatagagagccactagttgaaaaacgctctttctagcagcagctcaattaagggaccactgtcagaagcaggaatcggttgaaaggttattgcaataatccagtttttcacataataagtcatgaggcagggagcccccagagctgataaattccctaggtgaagcacagcatagaggactcagatcctctccatctccctgccttgctgtccttggaatgtcagcttggtcccaagacaactgctacaattctgggcgtcatactcacataaaccaacaatgtcaagcgaaaggacattctgattttttttttttaaataaaggaaacttttccatcagatatccctagaaaatttcttttgatgtcccctttgccacagtctaagtcagatgcccacttcattttatttttttcaagacggagtctcgctctgtcgccaggctggagtgcagtggcataatctcggaccactgcaatctccacttcacagcagatgcccacttctaaaccatccattggcaaggagaatgggattagcctaactagctttatacaaatgggcttgcatctgagtttggtataggatcatcatgcctgagtggaggatgccacaacaaaatctcggctttgcagcaaggaatgaggatgtgattcaaggtagtccgacaatagtatcagctacaggaaaaaaaagacagataaggcttaaccagttctattgctaccactgtgccaagggtggtgggtcattggccttgttcttggtaaaacatttggctcaggcaaatccagacaccaagcttctctagacggatttgtcttgaagctggggcccagggtgtgtgagaagagcatttgcctttttgtaaatgttgctcattaagcaggctcagcatcatcctacttactgcctatgctattagttaatggaatttaaaagccaakaataaataattaagcacrtggacattgtggggtggttcctggttttttgctcaaggtttcaagtaaggattacgcctttttcttagtatatttatttttagtctatyatatagagctttaaaaaagagtgtataaataactttataccaatttggttgcaggtaagaatattgaattttattcatccatttattcagtaaatatatatgggcagtaggtgttgaaaacacagaagccctcaaaatagccacggtctgtggtattaatggagctcacattctagtgcagaggtggacaatggaaaatgcaagcttacaaaaacacaagacattttctgatgatgacatatgctataaagaatataaaatgggcctggtgtggtggctcacacctgtaatcccagcactttgggaggccgaggcaggcagatcacgaggtcaggagtttgagaccagcctgactaacatggtgaaactctgtctctactaaaaatacaaaaattagccaggtatggtggcaggcgtctgtaatcccagctactcaggaggctgaggcaagagaattgcttgaacctggtaggcggaggttgcagtgagccaagattgtgtcactgtactccagcctgggaggcagagcaagactccatctcaaaaaaaaaaaaaaaaaaaaaaacagtataaaatgtgttcatgtgggagtggctaaatgagggaatggggaatgctacattattagatggcttttctgtgaggcttttctgaagaggtgacatttaagctaagacccaaataatgagtagaaaccatgttcaaaaaatccatgggaacagtgtttagacacaggagacaacaagtgtgaaggccctggacagaagcaatccaggcatggccagaaggaaggccaggatgcctggattggtcagtaagggaagagtttatgttgaagttgtggagggaagcagaggcaggttcaggtgtgagcttgcaagccatggtaaataattgtgttttattctgggtacaatgggaagctttcaggagtctaaggatggaagtactctgatgttttaggacctaaatcctagggcatttcacctcagtggagaattttcagtaacgtaatcttccttatacttgtattgtgaaaattaaacctcacctctaaactcaactctttttgttttgttttcgcttctgacgtagagctcttcatacctcacctctcatagtaaaatgctgtctgtggtctgaagttcactgtgctatctttgcccaggatcaccactggaatttgtaaatgttacagttttgttcagcgcccaaaagcaattttcaaggcattgttgagatcacttaaatttggcagcctttagacctgaccatgtcctttcagcttatagttaaaggaacataagatctgttgttttttcattttattttttactgtgggtgatatttccataattgtatyagctgtttcttaagggtcattatcatctattgtttcatgagtgatttttctgattacgatttaaagcaacctttcccaaaattatggcacagtcgtttgtccatgtgtgcttctcactctacaccattaatcaaatataccaggtaattttatgttggcaggtctataccaatgatattcaagcagtaatgatttccaaatattgatattaagtgcctattttccaaggaaaactgatggcaattttttacagcttattattcacacatggttcagaatgtatattccttttctttcttcagtcaatgattcatgtaaagcgcagcttctcatcaggtgtacctgagagaatatttttctaaaaagtatcttacagcatgccaaagatgtcttttaaaaatattgctatttaatagcagtttaaaccaaattcatgaaactaaaacagaaaaaataaataacaaactttattttaaaaacaactcagatattactgtttaaaaacttacattttttttcacataaagtaatactctttgtgtttctaacagaaacttgagggcattagaaagactttaccatagttaagagaatgacctatgaacagatggcctgggtttgaatcccaatgaaacgactttctgtgtcactttgaatagactgcataactttattttgatttgatttagcttcactttactcctctgtaaaatgggaaagtagtagtttctccttcataggcttgtcaggaggatgaaataaaataatcgacacaaagcacggcgcttgacacagagtgaatgctaagtaaatgttagctgtgatactaatgaaaacagataacaagaaaataaaaatgactcatcattctaccacccggatcattatttttttaatatttaatatttgctaagtttagtaaactctctctaaatgagcttaaaatggccatcagatccatgtgtttactaaaaagattatttacacctgggtgcacacaaagattatatttcatctttgggaagagcaataaacacctgtagagggttctaggctccagttctacagacacgatgtcagagcaagtggaagaaaattacagacagctagttgtctctacatcatcaacaaacatgaacaattaattaggacttcttacacctaatccaagtattatttacccacatgatgttaatgaacaaataggtaactgtgcgattaaacacttagattcatagcatattggaatttgagggaatttcctttgaaggaaactgggagatcttttttagaagatctgcccacttatagacagagaaagtggggtacagaaaggaaaacagacagaatgaagttatgtggaagtttcctcttccactttaccacttaatgtttccaccactcaggttcccctgtggcattaagggattagagtctctctctgatatcccttctggtggaaaaacaaagggaatattacttggcctggaaaaagaaagaaagcctgtcatttgtgacaacactgatgaatctagaggacatgatgttaagtgaagcaagacaggcacagaaaggcaaataccagatgatctcacatctgtggaatctaaaaaagtcaagcacatagaaccagagagtagactgataattactaggggttggggtaagaggaggttgaggatacaaatgatacaaaatttcagataggaggaataaattcaagagatgtactgtacaacatggtaactgtagtcaataacaaggtattgtatactggaaaattgctgagtagatttttagtgttcttataagtaaataataagtatgtaagataatgtgtatgttaattaacttagccattcaaaatgtgtacatatttttaaacaccatgttgtacaccgtaaatgtagacaactttttctcaattaaaaataaaaacctcctgaccgtctagcagatgttagcattttctacctctattttatcaatcagctgttttctttaacctaggtggtgattaaatgcacaaatattaaaggaggaaagacagtagcccaccaagggccttggtgtggtcttttggccaacacccaggctaatcacatcagcagagtggttcaggccatgtatttggctcttgatgaagcctggcttccctggtcttctctaaagccttcctcagaaactgctgacatttcccaacttctcatgggcaagggaggcttgatgatacaaaaaaaaatcatgattagaaatggctttctagcagtccaagaaaggcattaagacaggggccatatctttcttatttgtctaatacggtgcctgacacttattgaaaagttgataaacttaaaattgaagaaaaattatggtcagcgctgagcacatccaacattccaggtgctaggctcttggtgtgtcaaacactttctaaggtctcacttcttagcagaggctgcatgacaccatagtgaagagcacaggttccagaaagtctcacccaggtttgcattccagcaaatctgctatatgagtatggcatttaatgtatctgtgcctcagtttcttcatctgtaacatagggataataattgaagctacatccagggctcttgtgaggattaaattagctaatacatgtaaagaatttacaatgcagcatggaatacagtcagcattcaataaatgcttgctctgtcattattaatgttagcactaacttactcactccatgggccctctgaaggagatattccaatacctagattttggcagaggaaattgagatttgaagagtttaaatgattgaatggttcctccaaaactatcattagtcaccagaaaacctatgatttaaacccagaaagtaaacattcaagggaatcaataatggttctatgtggtagttaagagagcaggcttaacaacctgactcgggagtcagtctgttgggtttgattccagcccgaatcaggaacctgttattaccaggtgtgggtccttgatcaggttattctgagcctgggggtcctgagaataatacatcctatctcacagggatgttacaagatttaaaggagataatgcttgttggcatttagctcacggacccgcacccagcaggcaccccataaactctttcatttttgtcaatagtagcaatggctgtagtaaactccagtttcttcctccgaaagccctcccaaacacccaagaatcattcttggctctgccttcctaacttccttcaacactcatactcatgcactctatcactaagtcatatgtcattttccctcttttctctaaataggtcagtatctccaatccctcaacctcgctccaaccccattgccactatcttagtttggacaccatcttctcttctctggatattggagcagcctctttggcttactccccctctccttattgtcttgaccacctccagtctattcttcacactgtatccagagtagcatctccagtgtgtacatatgtcactcgcctcccaaaaagcttcattaggtttcattttcttaggatacccccagcctcactcaccattctcctcacgtactctctgctccatgtgtcctctaatgccatatcccctcacctccagcactacacacatactgtctcctttgccagaaatattttcactctctctttttctggcaacccccattcatcattcaaatctcagtkttggtttcattttcccaagtaagcctttcttaaccctgaactctgagctttgtggcccttgtagaaggtcctgaatgttctccatcatacacttaccaaatgcattataattttcttgctccttgtatgttttctctactagtccatactctgcatgaagacaggattatatctaacatgtctgctacaactacttgctgatatacaactacaagttgtgtaagcattcctagtgcccagcaccatgcctggtgtatgctaatgcttagcaaatacatattgaataaatgcatgattaagtaaatgaaagaatactagctttccaatcagcaagaaaaaccaagaagacaggatactccaagaaaattcattctactgcccaaactggtatttcttactgctaagttcaactccttgtcagtgtacttggtttatggaatgccttatagtttaaatgatttatcctggaatagagctgctatttttcaatgtgctggtatcagtggatgcctaaagagctaggtaagaccaaatggcaacaaccttatatagttaagttttcaaaacacatttacaaatattgtttcatatgctagattgttttgatttgtatactagacctgtgggagaatgaggtgaggaaactaaggtataaagaattacacacagatcttagttcttctttattctaatcaaaatattatttaccctcgttatgctgcctaatatgcaattaatgtgtccattatcacagcccaggtctctgaggccgtattgctgtaaagcagtgattctcaatatagggtgtgggagggtaattttgcacccccggggatattcactgatgtcagaaaacattttggattgtcctgactgggggatgggaagtgtgctactggcctctattgggtagagcacagtgacactactaaacatcctcaaacagacccatctcccccacacaagcacacaacaattaccttgtccaaaatatcaatagggctgaggttgagaaaccctgccataaagcaaagctcatagactgaaacagcaaaggggaaggtaattgtgtaaatctctccagatgtaatccagatgtagaggaactgatgagtacataccctgtttaaaggcatgaagtttgaattagaaaatacaatactctgcaggccaaacagaactctcatgcaggctgctgtgagcagtgtgacacgcccaggggaaggtcctcgctgaatgagcaaatctggccccttactgtaagaacaacaggtacaacattttctcctctgctacctcctaaaagatttactattatggcctctcagaatcaagaggaaaactgagttaaaagtgttttcttgaaaagamgttaaaaccacttactcaaatgcctattctgtatctctaagtgttagcctacaggtcagaaaactaagatcttgccacctggattcatgtgctgcgttcctttcaaatcctctaacattctcatctgtccaagaagaaatatgctgcctaatcctggggaaggctctaaggccaaaatagatatcagagtcacagcaatccttttaaaatattgtttcatatcagaatattggttccttttcataatattcatgatttaattaaaatgcagagatgtctgggaaggaggcagataggacagtttttttctgcagaacaggaagcacattctggatttactttggaatgctttctttttatgaaggctttgaggcattatatacactgaataattggaacattttttatccagcttggacaagaaatattaaagtccactatttccaaatgagagctaataagtgcatagcccaaatacagcaactgaaatctgctttatatatttaaaatatgttttataattccattaacttataataaataggagaaagagtgaattttagctgttttagtaaaactgttactgttaacctcttaccagaaggctcttcccacttatatcttcacacgtgcaaattcttcttctccttcatagcctatctcagatgctaccacctccaggaagttttcttggattctgtcccaatgttccatttaggtgtgagagttttctactatgcatctcttttggcccttctgtaatatttatatatttattacttaatttagtctttcttttctatctcccttcccttcccttcccttcctttcccttctcttctcttcccttcccttctcttccttccttttctccttcctctcttcccccttcccttcttcccccctccctccctccctccctccctccctccctccctccctcccttttacattctatgcccatacatgcatctaatctcacagtccttggcaccatgtcctaggaatagcaaactttcaacacatattggatctctggaggcattgataggtaggtgtgtggattttgctagatttcttctacatgattacggtagtcattggcaaactctttctttcaaataggtcagaagtaaatttgcccagccctaatcaaatacccacaagttccaaataagcagatacaaaatcttagtgtcagtcttggtgccgtgtcctrtactagacagtaggggagataatgttcagaccaggcaactcagagagcacggtggcatgggacagcctgagggaaggaataagcggaaagcctgtactggaatgttacctcctccacttgcttgcagttgactttatttaatgtctctgtgtaaacttcctcatctataaacagataaaataatgatatgtattttaggtttttcaggaggattcaatgagatattctaggtgtagcacttagcagagtaactggaacctactcagttgaatgaatcctcagatgaatgaagaactcagatgaatatagatttggtggttgctcttattactactaccgtcatgcatcacttgatgatggggaaacattctgagaagagtaatattaggcaattttgtcattgtgcaaacatcctagagtgcacttacacaaacctagatggtacagcctattgctcctaggctacaaggctgtacagtcctgaatgtcatggtcctgagtactctgggcagttgtaacacaatgataagcatttgtgtatccaaacatatctaaacatagaaaaggtccaggaaaaatayggtattataatcttacgggracaccttcatatttgcagtccacagttgactgaaatgtcattatggcacatgactgtattatcatcatctattaaaatcaaatcatgtttccatggctcagaaccaaaaaacaaacaaacaaacaaacaaaaatcctgttgcctacctgctctgacttctctttataaattaagagattttatttgtctactctttctaggtactatgagagttactatataaaatttggtgcaaaacatgcttggctttattgtgcttttccttctttcgttctttttaatgagagccaaaatcttctgttgtgaggcactgggctttttttcttcccctgctgcatggtagcagctgctctaaatggagccgacccccatcttcaaagtcctcttcagtcttatctgtagcttcccacctctctcttgctttartmacatgccaagagagctggctgaatcatcagtccagactgccaatcagaaatatgaatcaagtcactcctgactgctctgctaggtctaagggatgcaatgagcgagaaagacaacataccctgtgtccctgtagagcttatattaaagcagtgaaacaaatgttaaataaattatttttaaaatctgtaggtagttagttaaattagaagaggaaatctcggtgaggataaattgcaggctacagtggggtaaatgagagggccaaacccattccttggccattaatttgtctttmattttcagctcaaatgtcacctcctccaagaagccttccctgaccatcaagcaaagcagtcactctctaatccatgtcccactttatttccttcattctacttttcaccacctaaaataaccttgttcatgtaatgtttgtttattacctacctctttctttgagaatataaactcaaagagctaaaccttaatatattatttactgctgtatcctcaacacctagaagagtgcctggcatttaatagctgctaaaaaagattatattgtatgaatgaatgggtaaatgaactaaccacaaagaggatcctctttctttcaggtcagaatttaacaagttgtgaatttcacacactggctagtgggtgtaggaagtgtgatggaaattgtcagaattttctttattcagttcaactcaattcagctcaattcaatccagcatgtacttatcaaactcctcttatgcttcaggcagcaaactttgatctcagaattcagcataaaaaaagtccaatttttaccttcttgcaacttagggtctggccagggtgtcagatactaaacagcaattatcaaagaattctaagcactttattggattacctcatttgatcctcacagcagctcaggagctgtatatgttgggaatggttattatacccgaagaagagaggagtaggttttcatttttttgttttgttttgtttttttgttgtttcttttttttaagacagactctcacttactttgtcaccaaggctggagtgctgtggtgtgaacgtggatcacggcagcctcaacctcccaggctcaagtgatcctcctgcttcagccccccaagtggcagggactatgggtgggtaccaccacacctggataattttctgtatattttttagaggtgggtattcaccctattgcccaggctggtctcaaactcctgagttcaagtgatctgcccactgcagcctcccagaatgctaggattagacgggtgagccaccacacctggctgagagtaggtattttatctgtcatgtttactattgattccttggcaccatgcacagtgcctggcctaagtaagtattcaataaatatgctcaataatgaacgagtattttaaaagaggaacatggtatgtgggagtctgtaagagggggatttgatccagtctgaggcatcaagaaacctctccctggagatatggcactttatttaagattagaagaatgagtaggaatttgctttgctttgacttaaaagtaaaaacctgggcaggctcatcctgattaatattaaataagctaatttttttttcctgggatttagtttctttcatagcaaaatgaaaaactgtgaggatgaaacttcccccaaaagaggttgtaaaaacatacaaagagagaattatcagggtaacttttctgtaagacgtgggcttcagtgaggtaggcaacaggactggaaccagtgaaaacaggcagttaggagactccaagtctattggccccaaggcaggggctctagctggacttggcagggcagaaatggttgcttctgctctcccaggaggtcagtctaaagaaaagcttagagcagcctagttcagagcacagcactcaagaaactcccaattaattgcttgtttgccactgtcagaacctgacatgcggaaatcatctggagaaatttcttgtcactggactctgctctgccacactcaaggggccttctcacatggcacctaaatgggtcacctttatctttcctttctctgaggctgctggtttccctttcagagacctctttctgctcttgagctctccctccagaaacctctgccattgctttagatcctcccttctccttataatgacaccattcctctcctggtgaccctgctcttatctgtgatgacactaggtatatccgagactaatgccacttacagagttaatgactgctaactcttcatttgctatgcctcccagtaagataattgccttttaacaggaggtgtttcttttcattttttataaataatgcctaatgcaaaagcatggatctgtaacattgactttttggggctttataatcccaaagaatcttttcgtatcctcttcctgctgtcatagcccatatgtggctttattaaaacagttcattagtctttcttttttctggaatatgcacttctttagagcaggggtggtatctcatatcctatgttgccatcactcagcctgatatatcgtcagggtggcaataaattgttggatacatgatttaggacaagcgtatttggaaaactttccgttacccaaacttgtcaagccagagcatgaaattaaacatcttactccagaggttctcaaactttaaaggaagaatcacttcttatccccagggaatctggatccattggcttgaggactgtgaaatctgcattcttcattagctcatcaggtgattccagtgtggaaatatgagatctcctgtggataaattattatattccctcagcctgttttctcttctataaaatgggattgctgagagaatcaaagagacaagaagcacactgaaacagttcaaatggtgcagtgcaaactacctgcagcagattcactgtccaaagaaatttcaaatttgttctctctgcctcttgcccattctgcatgtgggtagataggtgcctaggccttacactaaatcaatcattttagatttcaattgaaaacatattttcaattgaggtcaagagatattggctggtttggagaggcctatttgggacttgagttctagtcccattgtttattttgcttctaatggagaagacacattttgtttgttctgttttgtatttattgagttctttgaagatagctatggccagcatcctcagtgagtatttttttcactcaggaagtaattactgagtgcctactattgacttagaaagtattcgctaagtgcctaccatttatttaagactgaaatacacaattaaagttgaagcatgtctatctataaattccataatgcctttgtttgaatgatatattccagctttatgataggctcaaatccacttcatttgtgctgtaaaggaccttcacgtccacataaaaagtataaaatatcttccagaagctttacccatatatattgatttatccattcatcgattcacttactcacctaatatttactatctactttgtgcaggcactaggtgaggcagtagggatataaagatgaattagacgttgatctccctctcaagagtttgtactttcattatttagataagataggtaagtaaataaagtaatatgctgtaattaagggctgatactactgttatagacaatagtaattaaaattaggaagcacttacaatgtgctagacactgagctaagccctttatatgaactatcctatcatatcctcaacagtgtcgtttaagactctattattatccttgttaggcctgtaatgaggctaaaatatgttaagtaagttgcccaagatcacacagcaagtcaatgtcaaaggcaggattaaaccctggctgtctaactgcagcctcactcctcttaagcacatctcctcttcagctactcttaggttggtgtatggcatagaagctcagagaaggctaacagcagcaacattggtagtttatcacgtgcctgcaatgtgccagatctctatgcctattgtctcacttctttcaagaatacatgaggaaaaccttgttattcttcccattttatagaaggagaaactgaggtttgcagtgttaaaatttgttcatttctacctggccattaagtgaatgcactgggatacaaactgtcagggtcaggttgaacccaaagcccacactccttctactccctcactgctggccagaggttagatatgaagtatctcttagggagacactcctgcatatagtcttctgtcactagtttgaaattacccacaaaaacaaaccagaccacttaggcactgtttaaacagcaccttacttaggatggccctaccttgccaagtccctgggtctaaggaggtaatatgattattgcagaactaaatggcccgacactgccagcagtttgtcaccatgccatagtagtccaagggccagagaagtggcatactggtgggggaatggattgacatgaccatggtctgtcctggcactctaatgactttgttttttccctcctggggagaccagcacatttctccaatgctgagttaaatatttttgtaaggaagagagcccataaaggcttaaaaattattccatcagattttcaaggcacacttttattttatttttaaaaatctttctcagggaaatgttggttttcttttatrgacatttaaatcatttccttgtgcctctgaatgcagcatgaaggacatttgactctttctcttcattatatacaatagtgtctttgacagaacttataaaccccaaactgaagccctgtgctttcttgccttccagtgataaggtttccaaagtcattattatttcatggaccaaaaccaaaccaattccccatcccaaattacttatatcttgtggtkggtcatgtccttaaataatatcagtctatctgtctctgtctctgcctctgtctctctttttctctctctctctcatttgaaatctcagtgagagttttggtaaagttgtgtaatccttgtatcaacttagtttttccatgttttttaatgccatcagggttcacagattgatgaagggtcagttcctttgggtttagtctctattcttgcgttgtggctttctatttggagagtgaataactcagaactaagttattgcttcactgttaaggctggcaggggaagaaagaggcagtagtggagcacagaatctatctgtgttagccctctgtcaccgactactcaatccagcttttggcttcacctaaatgataaatggtcctattgtttgggctttagtattttaaaaaatagaactaaatctagattaagcaaggacagagacccatttcattgcactgtactttaatattcctgagatccatggcattacgggtggctccttttaacagccatctctctccagggcagaacactatgctgtctttgtttcatctgatctttcagctaaataagagatggtcacttatcctcactactcccatatcctgctggatttctcttgcgaaaagagaaactcaccacacgggaaaaggtagaggtttcaggcagagcatttcagcgtgtgtttacaggcaggactgacttactcagcaaatcctgytcagaggagcttcagccaatgaagaggctatatcccggcttgcttgggggcttctgagtttgagctgcatgcagaaatgtaaggcagtgcttcctggcgctgatggcaaaatgggacccatctccagttattcctcgggcaccccagctttgcaaatctgggaaagaacctacataaacatattggtgatgtagccagcttaaaaggccgagagaatccttatggattcaggagactgtttttttatttagatttttattttttatttggaagatgaaatgcttctctcgttacctgccttacatcttcagacctccgaacaccatcctttcttccagctgccacacagaaggtacagaccagagagggagagtgtctgggtgggtgggaaaagtgggctggtgtctgacttcccacgggttctgctgatgctgctttctgtagctactaggtgactgtcattcctggcaaaagcttgtatccaacagacttagatctgcttctgaaatcagtctgtcttgtacaaggaaagggaagtgttttctgaagaacagaataatgttgcagaggtaatctcaaagctgacacagctaattagaaaataactcagaaatattttgccaattttccttgtttcatttaacatgcaaacaagtcattggaaccagtgtcaagaaaacaaaaatcagtaggtgctgccacatacatctgtccgagctctctgttttgtcactgtctgtttgataacttggtgcatgcccaagaaagcaattagcaaartagaattagcttagtacatcactgtggagtgttgattgttggattggttcacttggagtctgtacttgggttacagagcagtaagaacacagctgactttcagcacttacatgaaatgtggtttctgggggtcctaagttaatgctttaaagagagggtaggctgagccttctacaccttccccatttcctgtttttttctggggaccttctctgctgccttctaacctagcatgctatgcatacgtgtatgtgtgccttgtaaacattctggcaattccctttcaactaagcactgcagaattccacatttctatagtcagaagctggttgtataccttctatatgtgatgtgcctgtgttttagatctgacatatcctagaaaaagaacaatttcaagaaaagcaactggctggacatttttcaggcttaaggattgtcctactagtggcatttgattgaaaagggttgaggatgctgaggtgttgtgactccaactcatgtctagccacactctcttggaactgagctggcgaccagcctgttctgaaaacccactcttgttttcatcctccaggtagaatcctgagactgggggctgtgtgtttataatgaaggaagcttgtattatatcataaggtaattttttatccrtaccttcagggaagggagtagacatttgggatcacccttgaattgagactgagggtggtatttttcatagacattgatatctcatngacttttttttacagttggacatttccctttaaaaatttattggtggcaaaaggaaatggtccactgagaaatcttttcttcctcgtggagaaaaacttagtaagtccttatccatattgaggggakgagaggaatgaaaraatggcatggactaaaatctccaggagaacttttcaaatactaaagatctaaagccatagagaaactgcctagatgacttttgtatttctgattggtcctcctgtcctctcctgcctgcttagactttgaaaatttaaacacttggtctactcagttgctgtcttgtgtattaattaaacgaaacattctatatcatatagaaaaaaacctgctacaacaagaacttttaaagttgtttgtgaaaattaaatttcactgatttatttcattaaaatggaaacctcattttgcttatgtcaaaacaatttctgcttcacccactatcaccagatttcagggtgggagggtggaaaggcatgtatttaaatttgttgtaaacctaataaagacaatgggtaaggaaaatggcatttgccaaacattaacatcgtggaggaggctctgggacatagtggaaaagacatgggttatgtaccaaggtaccaagaaagcagtgccaggtcacttgattgctctatgcccagttttatctrtaacaaggatgttgagatgaactgttaccactgaataaagttctttgtaatgctccacacatgataggtgccgtctgtttttgagtcccatgccccacgtgttttcttagatattgaagtttgctttatttttcacattaccttaagcaatgagtggtttcctcaaacacatcactttgccaccagaaactggttacacttacttaaagtttgtctggggaaaaaagtgatcagtatacatctgaggttgtgtgtgkgtgtgtgtgtgtgtgtgtgtgtgtgtttatattgttggcaatcgtgtcaccctgtagtctgtgctagaaaaaaaatatggctgtgaacttcacattttattaatttgaaaaagtgcagaatgaatagtgtgtgaatatctctgtgaaagtcaaataaatacraatagcccaaacaatctccttaagagaaactctagaactaatttaagagcttcaacaatttctgggcttcttaggggatagaaccatcctaattagaaaacttggcttgtcttcccaacttctccttgtcattgtttttgtttgtttgttttgttttgtttgctttttttgtgtgcgcgtgtgttttttttttttaatgcaggaaggccataggttttgaatcttagctctgttacatgtcaaatgagagatattgagaacttatttaacctctctgaggcttagtttcctcatttaaaaatataggtaacaatactccacaggatagttgcaaaaaaatacattcaaaatgacatagcagggtgataataataatagtaataaccagcgttcacttgtatttagtgtatcaaaggcattatctaagcacattatatatagtaacacatttgtatatagggtaaatcaacaatatgtggttcacaactattggttcctttttcttcccctccctcactctgagccctcacgcctgctttttcatacattagaggagatttggttctccatgtagcagtcagaataatttttaaaaatatgattatcttaccaccccacactctaaaacacaaacactcacatttaaaacctctctatggtttccatggcaagcggggcctgcatattctgagccccgcccgactctcctgcctgaggtcaaacatactccatcttgcctggtccccagacacacaggccttctttggttcctcaaaattctcccttccaccatagacttttgggctgcttttcttttccttctgccccattgccttgttaattccaaccttcaactctcagctcaagctcagaagccatcctgatgctcagctgatcacagcttttaaagaactgggtttcttacttcaaagcacttaccctaatttgtcattatgagcaaaccaatgtgactgttttgttagtctctgtctccctgctgtactggaagcaggacccacatgtaactgttgtacctccagaaccagaacaataccaggcacattataggtgcttagtaaatttttgttgaatgaaagatgacaaataccaaggctgttgtatggataaatttccaaaaccatatgtgaaaaatattctgaaaagcattcactcctacatgcatgaaaattgttttcatcattgtggcttggggagctttctgtaaccatactttaaggaactagttttattataatgttctttaacttgaaataagaagatacaaacagaagccagggcaaccaaatagtgcagatccataatcagggttttgcaaagaggattggactgtctttccttctctgtggacctcattaaggaagcacataactccttccccttggtaggggaggattcatctacaaaagtggtatcagaattggagaaacaaaattccaatcatagctgtaaagaagccattcaagctgggtgtggtggtgggcccctgtagtcccagctacttgggaggctgaggcaggagaattgcttgaacccgggaggcagaggttgcagtgagccgagatcacactactgcactccagcctgggcgatagaatgagactccatctcaaaaaaaaaaaaaaaaaaaaaaaaaaaggaagcaaaacagaaatgagagagtcagtgaagtataaggaaccttgcctggtactttctggtggacctaatttggcaccaggcactggagggcctgttattgttatctaagaaatcagtagggacgctttcttttcctaaagggacaagggyactgtgacttgccacgtgcttcttcctttcccgaaattgtctttatctcatttccatgctgctattctctacccatgcttgaaaactcagcttgagtcaagtctttctaggaagatgtcttcaacaactccaaaaatgaagttgttattatgagtcacacaaaccacaaggagactggaaagaagaaataagaagcagcttcagcaccatgaaccctgtggaccactggctgtgtgctaagggctgtgcctgtcccatctcattcactcctcacaacagtcttattaaacgccattgtctccatgttatagatgaggaaactgactcagacgcaacctattcagaaccacagctagtgaagtggtagagccaagactcaagtccaaactctctgaatccgaaattggtactcttaatctttatatcacactgcacatttccttctgagtatgagaacagcctttggattacattgaaacagtctatttacatgtctgtctcctgagtggccagaagctacttgggcacaggaattctgccctactcatcttcagtcttggcatcccggtttagtgcagagcttgactctgagtagatgctcaagaaatccttcttaaatgaaggactcaatgggagggtggggagagtgaataaacaaactgacccatattctatcaacaatgctccttcaagaggaggacatatcttaaagcaagtatcttccagtgacacccggaagcatgtttgctggaaatctacacacacacacacagagggaaaaataacatcatatttttctaattctttgttatattataaataataataatacaagaataagtaaaacataggatgcatactatttgctaggcacaatttcaccgtgtgtatatcaatgtaggtatggatgcgtgtgtgtgtgtgtgtgtgtttatccctaacaattctataaggtcaacactgttatcctcattttatccatgagaaaaccgagtcacagacaagttaagtagtctaagttcacacagctgttaaatgcaagggctaggattagaacccatgcagtctagttccagggtacatgctaagaatgggttcattactactatattttgtacctttttcatatttatggattcttatttttcatgtgtttgaaattctcttctcagtccctttcacatatttagaaccaacccactcttcacagcccacgtcaaatgcacctccacccacagctttccctgactactcattttctcatccatcattctcatcttataaatgcacacctacatttaaagtcttttccaagtgcacacrgcatttgtctgtaacatggaaatagtaatgctcaactcaaggagttattgtgagaattaaggaagacaaaaacctkacattgtttgatattgctttatgtctgaaacatattttttgaattttatgtacaatrcatgaattatccctgctttcatctaaggccaagcctccactttaagctgggtcatctcccctctctcttactcaagcacatcactcctgcacttgttcctactttgtcagcaccaaggtttttctctctacaggatcacgttttgcagtccacacacatgctataaatcatctcattttaaacactgatctcatgagcctgtatcttccttcacccgctgccccatcacctgctcctcttttcagaaaaatgccttgaaagtgtcatccacactcactgtcaccacctctcctctgatttgcactttctatcatgccaccaaaattgctcttgtgagagtcaacaatgaccaccacattgcagagtccagtcatgcctttgcaggcctcttcccactgcagccctcagcaacactgacagatgattgctccatccttcctgaagggatttcttgtcttggcctcaaaacccactctttctctctgtttccctctcccttgcagtctcagactccctgctgcttccttatcatcttcctaaactgtaaatattgaagcccaggaatcagtcttctccttaacatatacttgctcgtaagtgatctcatccactcctatgggcttatatatcattgatttaatttctatatccaactccaatctctcacctaaaatgcagacttgtacatccaacttcctagccaacctttccaatcagatgcatagtagagatctcaaaacagacctgttgatttccctcctaaaaaaaaagccctgtttgtgcagtattcttctccagcctaggaaataagagggaactctgttctcctagagactcgacaaaaacattggagccatcctcaatttccttctttctctcatatcattcttacaattctatggtacatcctttgggcttcacctcctaaaaatatcaggaatccaattgcgtcttatcacatccatcattcaaatgtttcttcaccagagaatcctttcctggccttcctatgtaaaatatctcacacacacacacacacacacacacatgctcattccctttctctcaagatcgatttctctctctctctgcctctcctctcacccccagctagttttaccctatttatttttccttcacagcccttatttttacctgacctgttatacwtccatttacttgttttttgcctgtcctttcccactatagaatataagtgacatgaaagcaaaggctttctctgttttatacatttctatatctccagtaggcagaacagtttctcccacatattaagcatataataaatatttgtggattgaaagcacgaatgtatgagtgaatgtttatattaagtcttagtaataaagtaggggaaatgggtttcaaaactagacaaacctgagttccaatctcagcactcgtaattacctgctggatgaccttccattactcaactggtgtatttccttctctaatgaaaatatatcaaagtattgttatgagagtgaaaaaaagtgttgtaaaacacctagcataatgcctgtgaatattcaatgaatggggcatcatattcttctttcatatttcccactgcattcaccacagcaataactaaggatagtccattaaatgttttgcttacctacaaagctagcatttattgtaggctcattacttaccaggccctgtgctaagtacttcacagttactatctctcaaaaatattatgagataagtactattcrttttccccattttcattttttacaggtgagcagataagacacagaaaggctgagtaacctattgaaaaccacccagccaaaatgtgatagatcagggtatgcacccatactgcctgactccagagtccaggctctttgctgccctacaagactgcctacaacatttcaggcattgttcttagcacatgggtaattaaaagataaaaaacactcatctrttctttaaggtatacagtctagcaggagggaaaaatgcatacgcacacaactctaacagtaggttttaaccctggctatgcgtgagaatcaccttggcaaatacacagggctatctctaccacagccctattgaattaaatcccctggaactgggccccaggaatctcagtttctagcttccccaagtgaatcttatgtacagtcagaggtaagaactcaacaatggccaggatagagaaatatactacaagggaagggctctgggagaaaatctctctaaaatgacagtagatctgcagctgaaaagaggttacttttggtgaaggcttctgatatctggcagaaaagtggctgccatgggaagaatcaaggtcactgtcatccacctaagtgttcagtgaaactatgttgagcacttatttgcttcaaggtagctgtgaatttgctttaagagtttatattcaggtattggctaaaacatctacctaatacacagaaagtcattttatttcctggcctttaattttatcatctataaaaagggggggaaattttgcatatatcagacaattgctttggtgagtaaatgtgatcattcataccaagtatatagtgtattacccagtgcaaattaagagcttaataaaaattagctattattaatactctttatattagtagaggcctcagaaatcaattcttggcctgtgtacattttggggggtggagtttaagaaatttttttaaaattgacaaataattatacatattcatggggtatgtagtgaagttttgatacctaccatgaacagtgaccagattagggtaattagcatattcatcatctcaaacacttatcctctctttgtgttagaaatgtttaatattctcctcccagatatttgtaactaagacattattgttaactatagtcatcatacagtggtatagaacactggaacttatccctcctatccagctgtaattttgtgtcctttaacaaatctctccctatccctctctatgcttgtgtgttttgatacaacatggtgataggaagaaccctgggcctgcagttcagggtcatctagattccagtcctcttcacatgtgatgtcccttgagaaattggctaatcctgctatgcctcagagtcaaatgacaatataatgaaacttggtggtgttggtgtcagattaagtgatatgtgctttgggaagtatgtccccatcttaaatcttcccatattaaatcagaagctgggagtggtaacccatttgcaggagtttctagtataatccataaggaacttagcagagggaggacgcagactsaagtttaataaaaaccaactgagcaccaggcattctccctgtgttatcacaggaggatgattatcctaagtctgcatggtattatccacattttacaggtaaaaatagtgagggaggattagtgatatgaaatatttagttgaaaatgccggctcctgttttcattctttgactctttcaacctacatcaccttgactactgtttgcctgtaacatacactgatcagtgctcttttgatttgtgtttctggatctattttttgtctttggttcttgtgccccaaggcaattccttcattttcactcaattttataaaactaatagaaaaatcaccagcagtgaaatcattgccatcattagagggactggctcattagttttctgagtcattgtttcctcactggcagattgagctgagagaaaagatgggctgagagggccaaggcctttatcttcacaagtgtctgcaaaagcacagttagtagaaaaagcaaacaggaggcaaagaaatgtatgacttcgaagatatgtatgaaagcctgctctggatcttattgttgatacacgagaatgtcactttttgggaaattttgggagcaaattcagtattctgtcaactgccttgtaagagcaattattcatttatttattcatttattcaaaaaatacaaacacacacataaagaacatctctattatgtgtcagatatcagctgggtgatgggttcacaggtagtaaaaatggatatggttcctgctcttatggaaggcaaataaattaatctaagaaattaatgtaaactgtgacaaatgcagcagtggagaggatatgacattaggacaagatctaacgaggctttattatgcacacgaagatcaggagagcttccctaaagaagtgttacttgagctgagatccgaaggatgagtcaaacttaactaggaagcatgagaaagaggatattttaggcaaaggagagtacatttgcaaggcccagtccccagagggtcatggtgaaagcaagattctgagggaaagccaatgtagctggagcacagagaccaagatggggtacagtggagatgaagctatcaagtgatgtgaccctgtacgtctctgtaacataaattacaaagtttcatcttaacccagagagcaactgtaaattatcgaggggtgtacatttaaaaatatatatatatcatatttgcggcatgaaaagatttttgggactgctgtgaggagaatacattagaagagctaagagcagattagcactcagtcatgcatcgcttaatgatggaaatatgttctgagaaatgcatgttaggcactttcatcactggggaaacacagtctgtgcttacacaaacctagatcatagagcctactacatacccaggctatatggtatagccttttgctcctaggctacaaacctgtacagcatgttacagtcctgaattctgtgggcaattgtaacacaatggtaagtatttccagacttaaacatatctaaacatagaaaagattcagtaaaaatacaatttgaaaatcttatggaatcaccatcgtatatgtggttgattattgaccaaaatgtcattatgcagtacatgaatgtattttaaggggtgggacacacaaaacagagataagtggtcactagaaacagtccttactgttacattatgtagagttgtaaatggctctaggcatgccctcaaattcctgaatgtctatctgtgactgtatctgaatagaactgctttataaacatggacacctgtttattgtcttgacatccagacaaagaattttttattctcaataagcagtggcagaaacacattctgttctgtttggaatagcagtaaacattccaggcataggagtgaatttgctcttccaggcagaccacttgcaaaagcatgatgtttggaagaaaaggaaaggcagacttaggacagaaccactaagaatgttttcatatcatgtttattcagcaagatatagctgctgtgtcaaagcctccatctagaattgtgcatatgctctgctgcatatattcctatagaaacagcaaggcagccctctcaggggagttgaccaacagtcagtcttacaagccaaggttaggatgccatgtctaccttaattaataatcctttcatcgtcctacaacccagatgacaggatgcttaagcatgtgagtcagaaccccaaatgtaaaatcctgcagaagcttaaaaaataaaaaaagcatgatactggctgttatgaatttgtgagttcaagccctgtctaaaggcaacacaattcactttttaaacaaaaaagaaagaaagaaaatatattatgcaaggaaaacagagctgccccagtcytgtagcacacctattcccatcccattagaaagaattataaaatttctatgcaagagaagacttctgaattcatctatgccagcccttcacaggtgccctgaaccccctcacaacattcctgaccagatagcaacagagagattgctccctctcaaacctggccattctacttctggacaatgccaagtatgcctaagtctttaaattgcactgaaatctatttcttagaactactaaataagaaacctgaggccctttccacatgaaaactcaacatgagaatgaggagggttttcatactctgtacagcctaaagatttcaaattccttcaagcagggccctgtgacttcagggtggtaataagcatttaggtggctagccctattctaatgttttaatgtattagctcacttagtgctaattacagtctagttaagggaaagcatttattgtccccattttacagatgcagacaccaaagcccagaaagataagtaagttgcccaaagtcacatagttagcaagcaggagaggtgggatttggacccaggtaggctggctccacacctctgttctcccgcttctgagatgkagggaaaacacaggctttactgttacagtcctgcatttgaataaaagctccaacatgtcccctggccaactgactgcccctaagtaagcctctgtttctttatctgtaaggtgatggtcataaagcttacttcagtattgctgtgagattaaataaaataatgcatgcaaagaagcagcacagtgccttgcacatactgagcatgcagcaaagtctgaggaagtaaataggtgaataattaaataaagacctcctggtcctaccctcctgtattagtttgctaaggctgccatatcaaaatgcccgagtctgggtggcttaaacaacagtagtttattttctcacagttctggaggctgaaagtatcagatccaggtcccagcaggctggtttctcctagggyctctctccttggcttgctgacgaccgtcttctcaactgagtcctcacgtggtcttttctctgcgtttctcttcttgcaaaaacaccaccagtcctgctagattaaggtcccacccctaataacctcatttaaccataattacctccttaatggccctattattaaatgcagccacattgggggttggggcttcaaactatgactttgcagggggacacaatttagtccatagcacctccctcccaaagctttcttattctttgccccaattctcaagcaaaagacctattttaggttgtcttcaggagttcagccaggaacagggagttacagcataaataaggacaaaagactaagaacaggtgtataatatattatcactgcaaatcattgttccacaatccagactgtatagtattctgcagcctagaaataacgcaaacaagctacaaggtattagcccctgatctcctctaactcctcttcactcacctcactccagccacactggactcattgctgttcttcaaacagaccacgtacatcccctctccagggcctttctacttgtggctccctccgtctggaatgctcttccctcagccacatggttcttttccttacttcttttgtctttgcacaatcatcctacatacaaaccttcctgcctactttgtctgaaaagcacacctcccatcactcacccttcatctcactgcctagattttcttactacttgacatattatgtatttgtttatcatttctttctcttgctagactgctggctccgtgagaacagggactttgtgtttttgctcattattttacctggcatatagtagtgaatgataaatctttgttggatgaatgaataatcatcatggttagtagcagcaaaaggctaaaagtttttgtctacctttttctaggacagtagtttccaaatgttagctaccataaataagaattatctacagtatttggcttaaaatgaagatttgtactcagtaaccaaaaatctgggtagtcctatggcatttttaattaggagatctcaaagcaatcccccaccctgttgttgtacctgagcgagttatagaaaacgccacacttggaaacgaattgagtccgcttgtttagccggcagccaagagacggctaatgctcaaagttctctcggccctgaagaaggggctagattttcttttatactttggtttagaaaggggaggggggggtctagttaaaacaattttacagaagtaaagtaggcaaaaagttaaaaggataaatggttacaggaaagtaaacagttccaggtgcaggggctttaagactattacaaggtgatagacgtggggatttgggcgttatcaatcggacgaattcctgggaactgcggatatagctcgccacagtatcttatcagttaattgcattcttggatgtgctgggagtcagcttgcacaagttaaatccttgaggaaggggctgccagtgaaagagccaagatggagtctgtctggctctcttagctaagggagggtcaattcaggtggaagcaaggctaggtgattaaaggaaagggagagtctaaaaatagcgttagtaaaaacaaggttgggcattacactgtcatcaacaaagctttgtcactgaggtgttagacaccatgaagctatggtagaaaagggttaaacaaatgaataaaaagcaaataataaaaataaagaaaatgaagatctggggacttacagcccccctaaagctctgaatcagtagatcctgagctaagcccaagaatcaccgtcttcaggaagtaccccagtgccttctaaggaaaaaactctaagtgtaatacttcaagaaactttgtcctaggatgacaaagttaaaaaaaaaatggcaccactgaactttgcgtagtctcctccctccttccatgtctagttcagggtatggaaactctggacttagcaccagggaacaatgatggtggagaaaaggggattagatttgctgtttataatgcccaattctctaagtctcagttggagagagcatagctgcagaatgctgaaggaagggtcttacaggtgaactcagaagcaaaggaacaatgtcaattttctcccttgcctgtgaacagagctattttctagatggctgctacagcctgtgaggagaggagggcacccactggcccttggcagtcctcatcgagtcagacagccagagttggaagtgacatggaagccctttttagatcctgcccaccatcttgcagagcggttaacccaaaacccttgggtgagcttcccaaaaccacacagagaattagtgtaaactaccaggactgaaccagcctgtggactccagagtggtsttttggcctctgtacttacatgcaaagtggtttgactgtttctgacattcctgggaataccttagaacaatgtgctgacctgagtagtaactctgtgaagaggggaaaacacctcaaggatacactataaagaatcgactacctttcacttggcaggcttgtgtcttgataagccctcaggagagaaccagcctcaaggtatttttaaatggctgagggaggtatgtgtaatggcactattattttacagttttttttttttttttaaggaaactcatcttttcttgaaattggccctatttacacacagaatgagctgaaaagacttcgctgttattaaaccttcaagaatgttctcgtaagtgctaccttcctcacacggagtacctaacaaggtcattcagggccagggtatatgttacatgtttgctcacactgagcccctgaagcatcactaagtaaagggccaagcctgagtattttgagctcagggcgggggatttgggacagtcatttattatgaactggttctcctacaatttctccagtccaatctcaagcatgaccctatgccagcttgcatttgtccctgtctaactgacctgggctaagctttctgtacctgctgggaacagcctcctccaaattcactttatttgcagtatttctagtcttctgtttggaaattgttttaaactttgattcagataaattagagctgagatgataaatggaagtgatcctataggtgaggcagtggccaaagctctcattacaattctctgttgatcctcagatatgctagggtatcatacaaaattatttatttgaataattatttatttgaaacaacattatcaggtcatagcatagacctcaccaaactgattagagtttgaggcttccagtgatacccaatgttcatttaaaaacccacttgcccagcaagacctgattttatggcatggaagaagaaaggcatcttcactccatgaattttagctttttataagtgaggctctcaaagcttgccacttaacagggtcaacaaatgaaataagatacgtaaaacatctaaaacagtgcctggggcttagaagggactcaataaatgtttcattctgctcttccacttgcctttgtctacagaggaaatttagtgttgggccatttgttggtccctttattaagtattacttgagcacctactatgtgttcagcatgcttctagacactgagtacacagcactgtaaaggacagatggatctctgctctcatcttacattctggtgggaggaaatggttgattaatcatggcaagcattagatccaaattaaggtgggaactaaaaataagacatgaacaagcagattcagataaaattgaaatgatgaacttgcatatacttaactgcagaagttgccttcaaattggtcctcctgcaagtagccttcatagatggtctccgtggtaggtttctgagcagttgtggctaatttgggtgcttactggtaagtatttctcaggccccagttgcagatctctcttttcccatcttgtactctaattctgcacagaatgtgggcagatgcatgatcctgcacagaagtagagccccccgggatctatctgggtcttcagacccaagggacagcattcatttcttcagtgtttttgaagcctctgtgatgtacaggcagagatcaggctctggaccaattacaatgaatactgccacccacctcatggcacttgcatattagtaggggaaaatagccatggggaacatcagtaacttttaacatagtgataagggctgggaacataaaaacagggtaaatcattacagtgactgaggggtgatgggctaccaggaattgggcagacagrgaaggcatctctgaagaggtgcatttgagctgaggcttgactgatgggaaagggtcagcaatgcgaagagcccagtggggagcattccaggcagagggacctgcaagcacagaggactggacaaaggctggaataaattcaatgtagtattcaaggaatagaaaggtctttgtggaatactgtatcttttcatggtgggggttgcagttgtgtttaaaaaaaatcaataatctcaaatacttaagccctcctacttcattatrctttttaaagaagcagtgtatcttagcagttagaaaacttggattctggaggcagtttacttaatcctacaaggggataatttggccctagatcagaccacctgggttcaatcctggatttttctacctactagctaagtgacgttgagcaacttacagaatcttactgtgccttgtttgccataaaaagaagataataataatcctattgcacagaaatcatttgatgataaactgggataatgaacataaagttttgaccagcatagggaaagtatccaaaatatgttggctattataattcgttccttgtttcctctagaagtttattttcttgatcattgttgccatccttttatcgcaccagccactcattgaacagaattctaaacataaagtagaaaatagtttcccaagaactttataatttgggtgcagttgaaatctttgaaaaattatcaatgtaatttaataaaggaagtgtttaaagtaatttaataatgtcacttaaaattctcattaaattgattctaggccctggagaattcaatccccaggggacactatatagtattcctccatcaaactcgttctcctttccctgatttttcatagcttttatcacccattcatgttacgcatttacttattttgttgcttaacttataagaatgtaagctctatgagaacaaggatttggcctgcttgttcaatgagccatccccagttccctctgatagtgttcaaataatagagctcaataacttcttgtttactgaatttatgtctctataaacccctaaaaactataccaggaagtgggtttgctaatgggtcaaagaaccttggttctaaaagtatcccataacacaatctgagtgccagcttctccgtgacccaggagggcaatgattcgccaacaggaactgatctaataaatacaaaacattatataactttattactcattccctcaacaaacatttattaggtcttgactttatgccaggcagaatattagatgctggtaaacaagggtaaataaaacagagtccctggagagtacagtcttgtagttaatcactctaattcttataaaaattaatattatctgttcttatgaatctgaagactagaacctagagaataaataaagccttctggcaatgtgcctgtgagtgggcagtcaggaaatgctgctcccagtctgactcatccctcctcacaccactcttagggtattggtggttttcagtactattctgtgccattctacagatggcgtagatacatatcccatgatacacaaaagtttcttgctcactcaacacatacttgtacacacacatacaccccaatgtaaaattctcaaaatgaatgttagcacaaaaatgaatgttaggaaacaaataacctgaatacataaatgtatttatgtatatattgatacatatatatatttataattacatacctatatatacatatacatatatgtacatacacacacacacacacccctttgtctgtctcagagattcaaggataagttcccatcctacttttttttgcctaacaatttactcacatgtagctatgtttttcttgcatcataatgccagaagtcactctgtctttagccctttctgatttgaatactggttacctaaataagcctgtggtatagactctttcagacaattggttccacagcccctgttgctgtgatttaactatcttaggcaaaaataatttttttttccctgaagctactgtagtttccttcaagagctgtatgctggagtggttaaactctcgttagactgcctgggttccctgtgctctactgtatgctaacgtgggcaaagttacttcacctctctggcatacagtttgctcatctaaaaacttgagtcataataagactgtataggattaacgtggaattaaatgagctaattcatggaggggttagcaaaatttctgacacatttcaatagcttaatagaatttgttgattttctttttcatacttcctctccattgcaaccatcactggctaatctagacacaaattaagccattactaaatttcacaaaaagtctttctaatgctatgggtcaatggattttaagggcagggttaatcctccaaatgcgtaaaataattgcatttaatcaaaaccacaatgaaataccatctcacagtcagaatggctattattaaaaagtcaaaaacacaagagattctggtgaggttgtggagaacaaggaatgcttttaccctattggtgggaaggtaaactagttcaaccattgtggaagacagtgtggcaattcctcaaagtcttagaagcagaactaccatttgactcagcaatcccattactgggtatatacccaaatgaatataaattgttctattataaagatatatgcatgtatatgttcattacagaattattcacaatagcaaagacatggagtcaacctaagtgcccatcgatgatagactggataaagaaaatgtggtacatagacaccatggaatactgtgcagccataaaaaggaatgagatcatgtccttttcagggacatggatggagctggaggccattatccttggcaaactagcacaggaacagaaaaccaaatactgcatgttatgtcttataagtgggagctcaatgatgagaacacaatgacacattgggggaacaacacacactggggtctgttggaaggtggagggtgggaggatggagagcatcaggaagaaaatagctaatggattctgggcttagttcctgggtgatgggatgatgtgtgcagcaaaccaccatggtacacgtttacctatgtaacaaacctgcacatcctgcacatgtatccctgaacttaaaataaaagatggaaattttaaaaaataatcactgtactttatacacaaaatagtaatacagaacactaaaattctaagaaaatccattgagaaaaagcaacatttattacaacactttgtgaagtgatttagcatgattatatttttatagtaccaaacaaccaggtagaaaattaaaattttaatcaattatctagacatccaaactgttttttttcccttcagttttcattaaaacatttgcagttatattaagacagactcttggtctttgaggttgtttatcttcctaagatttttcttaactatttttctctttccattctctcctatttcaaactaaactccttggcagatgtaaatractttctactttgcatgtaattttgtttcttggataacagaataaatakgtcaagctaagccccaagattaaatggtcaagcaaagtcagtctttctgattttcctgaacccaaagccttgagagtctacttattagtgggttgttctaacagaagacaaaggaattcagagagaatgacctgactttggtttgtccctctgatatggtttggctgtgtgtccccacccaaatctcatgtcaaattgtaacccccacatgttgaagaagggaactcgggggaggtgattggatcatgggggaggccttcccccttgctgttctcgtgatagagttctcatgagatctaatggttgaaaagtgtggcaccttctcccctcactctctctctttctctcctgctaccatgtaagatgtgccttgcttccccttcgccttctgccatgattgtaagtttcctgagacctccccagccatgcagaactgtgagtcaattaaacttttctttataatttacccagtctcaggcagttatttatacaatagctgtgtgagaacgaactaatgcaccttccttctgggaatgatgttaaatgagctgagttcagagattgctaccaaagttttatctggctgtcatgatatgaagtgttctctctcccttcctcttcctccccccaccccacacctccctccttctaccaccatcactgattaccaaaagggttgttttaaaaaagtttcagtyatcagttatccaaagtctatcttatcattacctggttcctaaagttcacttgagaaagtaaaatgaaatactggttagctttgtggtcttgagaaactaatggaaacattccaaaactcatacatcttatctataaagtacactttataataggatctaatttagagggttgatgtaataaataaatgagataatctagcacattgacaggaataaaagatcaattgaacatatacaatcattattattacaagaaatatgtaatagttctataagaagagacagggtatagggaaaaaattacggattttaaactttacttatttccctttaagtaaagaaaaaataaacatggactcattccaaagaaatgacatttagaagagcagtggcatgagagcttgagagtatattcctttcattgtcattcactgcgatattccacagataagtaataaggacctactatgggtcattattttattatgggtcactattattttagatgctgggaaaatggtaatgaataaaacagacaataaaaggaaaaatattctagaaaataacttgagttagctataaaaaatgtgaagaagataatacaggatagtgtgataatgaaagattgagtggccattaaatatggtggtccaggaagctaaagatttgaaggacatgaggtcatcagccatacaaaaaccaggggagaggatcttctagacagagggaaaagcaagtaaaagggaccttaagcaataatgagcttactatgttagcataaaagaaagcagagcagtgtggctagagcttagtttgcaaggggaagaatgatgaagccagagtcagtatggaaggtaggcgctaggccatatatggccttaaacaccatagtaagaaacttagctttattttcagtgtaataggaaacctttgcagtttaaagtaggtcaaggacttaattttttttgttatttttaaggtatttggttgctgtgtggagataaatgatagggaaataagagtaggaggcaagaataccaataagaggctatcacggtggacaagaaaggacagaggcttggattaatgcaacagcagagaagatgtaaagaaatgaatagatattggatcaattattttggaggcagagttgataggattgctagtaaattggataagtttaagtatggtgtcaatgagggaaatatgagtggcatccctgtgatgaaggcttgacttgctatgtaggcttatagatagcaaagaatgaggatgaatcattacctcccaacccaccatctgtctccatcccaaaccccctaaaaccttcccaaccccattccagtcagaagtcatctaagcaaaaagaagtacaatctagctatgagtatcttctcgggttcattccacaaatagtcattcatatctgttactatgttctagactaagttatgagtactggtcatacagtagcaagcaagatagacacacctctgttccaatgcaacttatgttctaatgggagaagttagtaagattaactttgagttgtgtatcatccctccatggagtgacatcaaataggccatgagttttgggaagagaacagaatgagaggtatagatggtagttaaagccatgcacatgggtggttattaagagaaaaagtagaaattgaaaatagaaggaggcccaggaccaaacatttattggcctgacttcctggtcagtaatcttctctactgttatagtacagcagcttttaggtccactgattgcattcttaatttgagtatttaatatttattttattaacctaaggttttcatttgtcactatagcatggtctcataattttcaaaaaatcagaaaacagtagatgttggcgtggatgcagtgaacagggaacacttctacactgctggtgggaatgtaaactagtacagccactatggaaaacaataaggagagtttggaaattctttaaagaactaaaagtagaactaccatttgatccagaaatcccacaactgggtatctacccagaggaaaagaagtcattattcgaaaaagatacttgcacacgcacgtttatagcagcacaatttacaatagcaaaattgtggaaccaatccaaatgcccatcaataaacaagtggataaagaaactgtggtatatatacataagatggaatactacacagccataaataagaatgaattaacagcatttgcagtgatctggatgagaatggagactatattctaagtgaagtaactcaagaatggaacaccaaacatctgtgttttcactgatatgtgagagctaagctatgaggatgcaaaggcataagaatgatacagtggactttggggactcgggggaaagagggagaggggggtgagagctaaaatactataaatatggtgcagagtgtactgcttgggtgataggtgaaccaaaatctcacaaatcaccactaaagaacttattcatgtaaccaaacgagatagacacacctctgttccagtgccattcttacaggagtaaggtggtatcacattgcggtcttgatttgcatttctctgatcattagtgatgttgagcattttttcatatatttgttggccatttgtgtatcttcttttgagaattgtctattcatgtccttagcccactttttgatgggattgtttgtttttttcttactgatttgtttgagttcgttgtagattctggatattagtcctttgtcagatgtatagattgtgaagattttctcccagtctataggttgtctgtttactctgctgactgttccttttgctgtacaaaaagctctttagtttaattaggtcccagctatttatctttgtttttattgcatttgctttgagttcttggtcattaaatccttgcctaagccaatgtctagagggttctttccaatgttatcttctagaatttttatagtttcaggtcttcagtttagcttgttaatccatcttgagtcgatttttgaataaggtgagagttgagaatccagtttcattatcctacatgtggctaggcaattatcccagcaccatttgtggaaaagagtgtcctttccccactttatgtttttgtttgctttgtggaagatcagttgactgtaagtatttgagtttatttctggttctttattcttttccattggtctatgtgcctaagtataaaggatagaaaataagaaaaaagcctaaagatacaagggacatagtaacatattttttattgaggtctaagaagtatgacagagaggtaatgagcaatatcaatatttgaggagataccagctgagatttttctaaaatttatgaaaaccattgaactacagatttaagaactgttattaactccagtcaagataaattaaaaaaaaaaagcaatgcctagacacatcatagtagaactgctaaaaagaaaaccaaaatcttaaaaatagagagaaacacatactactatgaaaacaaaaacagttggacagctgaattttaaatgaaattatggaaccccaaagacaatagtcacagctttaaaatgctgaaaggagccaactgccactcttgaatgctctatctaataaaataacccttaagataaaagcaaaataaagattttttttttttgaggtggagtctcgctgttgcccaggctggagtgccatggcgtgatctcagctcactgcaagctccgcctcccgggttcacgccattctcctgcctcagcctcccgagtggctgggactacaggggcccgccaccatgcccagctaattttttgcattttttagtagagacggggttttaccgtgttagtcaggatggtctcgatctcctgacctcgtgatccgcccgccttggcctctcaaagtgctgggattacaggcgtgagccaccgcgcacggccataaagatgtttttaaacgagtaaaatatgagataatttattgcaaggagagacatgcatttaaaatacagaagtgagtgaaccataatgaaaagtgttgtatgttgatagaaaaatgaacagaaataataacgtcatgtaaagtttaaaacaggggacaaaaataacacaaataacagaaggaagggattaagggagttaaagttattaagctctcttagactttcggggaagtagtaagatagctaatataaattagactttaataattaatagatgtatgttgcaatttctggtgcaatcaatattttttaaatggtaaaataattcatcagttacaagctaatagagggaaatttcagaagttaaaaatacattcctagcccaaaataaaacaaataaacctatggtagttacattaattgtaaatggactaaaaagctaaaggctagttctagaactgaatttttaaaaattatattatcaataagcatgaaaaaaaatctctcagcaagcttcatgtagaagggaactttttaatgggatattttcatagaaaatatgaaagtacttataggcaaactattagaatcaacaggtgattttgcaaggtgtttagatacctaattaacatgtaaaatgaacttatatcttcacatgataataaaaaacatttaaaatgatttggggggttatatcatttataagagcaacataacatcaactacttaggaataaatctaagtacagagggtcaaaacatcaataccaaaaaactttattagcagaaagtaaggaagacaagtgactggaggaatatatcatgttcacagatggaaagactcaatattgtaaagttgtttattctttcctaggtgatatacagcaacakgcaattctaataaaaatttcaggattgtttttgtggaaactgaaaagctaattcttaatttatatagaaatgtaaagcacaaaaagccagccaacacaattggaagaatagtagaggaattttccacttatattagtcagctggggctgccataacagaatatcagagactgggtagcttcaacaatagagattgattttcttaaagttccagaggctagattaaggtgctggcgggatgggtttctggtgaagcctctcttcttggcttgcagacagcttccttcttgctctgacctcacatggcctttcctttatgcgtgcccactcttggtgtcttttccttttcttataagtataccagtcctattgcatcaggacctcacttttataaccttatttaaccttatttacctccttaaagaccctttatccaaatattgtcacattgggaggttagggttttaatatataaatttgcaggggggcacagttcagtctagaacaccayctattaagatatcttataaagcatcaataattaagatattgggtattggatacaggacaaacaaacaaatcaatggaatataataaagtccagaaacacatttatatggattgccaatcttttgaaaagatggcattgcagagcaatggagaaaatgtggtcttttcaataaatggtgtggagaaaatttgaaattatttggggagaaataatcttggtccctaccacaggcacataaagcaatttcagatgaaatgtttaaaatgtgtaaaataaaacactaaactttctagactataacataagataaaatattgacaaccttaggtaggttaaaacgtttaaaatgacataaaaggtgataataatcatagaaggaaatattgataaattagactacattaaagttaaatttttctattcatcaaaaaaaggagttaaaagactaaaaaggcaagacacagtgtagaaaaataggttagcaaagcaggtgactaccaacagacttaacatcagattataaggaactacaaataagaaagactctgacagctcaatagaacaataggcaagagacttgacaggcatttcaaaaaagagaataagtacttgaaaatgtaatcaattctattatcaggaaatgcacattaaagccacaatggaataccacgacatactgatcagaatggctagaattaaaaggactaaaaatatcaatggttgttaaggatattgtgatactaaaaatctcatatgctaccagtgcgagtataaattattacaaccactttggaaaatgggtaaatccactaaaactgcacatacccatacagtaaatccaactgttctactaagtatatatccaagagaaacacatacatatattcaccaaaagacatgtataagaatgttcatagcagtactgttcatgataaccctaaatgaaaacaactcaaagtccataaaaaatagaatgaccaagtaaattgtgagatatttatacaaaggacagcttacaagaatgaaaatatactgtattgcttcatttatacacatttcaaaaacaaaatatcggaagttacgatggtgtttgctttgggataaaatggggaatgactgaggtaggaatccaaaggtgttttttgagtattcattctatttcttgatctaggtggtggtaaaatgggtgaaaaaaatcagcattcagtgccctttctgtatacctgttactcttcaatttaaaaagcatagtgcagtaatcaggggctaaattattattagccttggtcctgcaggatcaagaagggagaagaggttactgaatccgaaaaatgagaagtcctattgagttctttgtttctagaggagccaaggtcttctgttaagaggtaaagccaactgaagaccttgcagaaaatagtatgtgtgtgtaaatatctcccaccttccctcttatctcctcttgggaattcctataggctaaacccaaccagcagtcagagagcatggaaagctgttgataaagtcaacttcaagggtctcatctgcctgaagtacagacaraagccacaaagtccgtgacagcagagttgcctcttgttaaaaagatgtcctggaagccccaaccacggacttctcttatctctcatcgcccaaaagagacacttaagcaccaataattgaaagtgaagttgagaaaatgtatttttaaatgaactttgttgggacataatttatatgcaataaaatgcacccattttaaagagtataattcaaggagttttaacacatatatactcccattgatcatcaccacagtgaagatacagaacatttcaatcatcccaaaaagattacttagtgaccatttagagtgaatctccttagccatccacactaaattttttttttttttttttttgagaccgagtctcgctttgttgccaggctggaggggtgcagtggcgcgatgttggctcactgcaacctctgactccctggttcaagcgattctcctgcctcagcctccaaagtagctgggattgcaggcacatgccaccactcccagctaatttttgtatttttagtagagacgaggtgtcaccatgttggccaggatggtctcgatctcctgacctcatgatccgccggcctctgcctcacaaagtgctgggattagaggtgtgaaccaccgcgcccggcccactaatttttaattgaggtgaaatccatacaacataaaattaaccattttcagatgaacaatgcagtggtatttagtacatttgcaatgttgtataaccacactgacttgatcattatatgttggcttatccttgtagaacttgatataaatggatttgtattgtatgcgttcctttttgtctgacttattccagcaaaatgttcttgtgattcatccatgttattgcatgtcagtagttccttcattttatcactgcatagtattctattgtgtgaatataccaaaatttttttattcttttacttgatgatagatatttgtgtggtttccagtttctattatgaaaaaagctaccgggaactgtgttttagaaagctttttgagaacacatgctttgattgcctctgagtaaatactaggagtagaactgctgggtcatgtggttagtgcatatttagtattataagaaatttccaaactattttccaaagtagttacactctcaccagcagtgtatgagagttccagttgctccacataatggccaacatttgcaattgccactctttttgagaattctagtgagtgtgtagtagtatcttctcatggttttaatttttgtttccctggtggctaaagatattgaacatttattcatgtgcttattggtcatttgtatatttttgagaaatatttatttaaatagttatctatttaaaatgactttttaaatttgttgaggtatagttggcctacagtaaattgtacataataaaatgcacaagtacataagttttgacatatatagagagatatatacacatgaaactatcactaattaagagaatgaaaatatctattaccctcaaaaagtttcttgtgcctctttgtaatccatccctttccctagccctctttctgccactgtagattagtttgcattttctagaattttatatatataaactcatagagtatgtatttttcctggcttctttaactcagcatcattgttttgagattcatcaatgttactgtgtgtagcaatagttcgatctttttattgctgagaagtgtcccattgtatggatataccgtactttatctgttgatggatatttggattgtttccagtttggggctattattatataaataaacttgctatgaacattcatggacaattctttatatggagatctatcctttttccctctggagtaggtacttaggtgtagaatggtttgatcatacgataggggaacattttaagaaactgtcaaattgttttctacagtgattgtgccattttacattctcaccagcaatgtatgaaagttccagttcctcagcattctcactaccatttggtagagaaagtctttttatttttattcattctactaagagtatagtggtattttactgcagtttgaatttatatttccataatgactaaggaagcagggtatctttttatgttcttatttgcttacttctaaatgctaacattttgtcatggattaccatatctgtttccagttttagtttcctctgtgtcttctttggtgaaatgtctgttcaaatattttgcccatctttcaattggattgtttgctttcttataattgagttttgagagtcctttatatattctagatccaagtccttttatcaggtatgtgatttacaaatattttctcatggcctatggtttatcttttcattctcttcacggtatcttttacatagcagaagtttttaattttgatgaagttcagtttattaatgtcttttttatagatcatgctttggtgtcatatctaagaaatctttgcttaacttaaggttataaagattttctcctatttcggggttttttttttatttgtaatgtcttcgcgtgactttagcgttggggtaatgcttgcctcctataacatgttagggattgtttctttcttctccattttttgagcgagtttacataagattggtatttctttcttaaatatttgaaggaatttattattgcaaccatttggatccacattttggggatgattttttattattaaaaatgtgattcctctagtagattataggaattttcagattctttacatatcagttttgttaaattgtatcttagaaattgtctatttcctctgaactggaaaattcattagcataaaatggttgataatacccacttattttcttcttaaagtctgtaagacctataatgagatcccttctgtcatttctgatatcgtcaattttttttctctttctctttttccttcattagtccaactagaggttaatcaattttattgtttttttcaaagggcctattcgtggttccattttttattctggctcttatctttatttccttccttttcttcactttggtttgctcagttcttctttttccgtattcttatggtggtagaagcttagatcattgattttaaaacttatattttctaacataagcatttaaagctataaattttcttctaagtgtgcctttatctgcaagtaataaattttgatgcactgttttgtcatcattgcttagttgaaatattgttgaatttctcttctgacatttttgagccactgggttatttagaaatgtgctgtttaatttttaatgttggaggacattccagctctatttttgttattaatttctaatttaatcttttgtggccagagagtgttctctgtgtgattttagttcttttaaattctctgagcctcactttgtagcccagtatatgatctcttggtgaatattccacatatactttttaaaaatgtgtatttttttaggtgttgtgtgttgtgtttttcaatgtcaaataagtgaaattggataataatgtgtttgcatcttctgcgtaattactgatattcattctacttgttctatcaattactgagagaggaatgttgaaattaccaaatattattgtggatttgtctatttctccttttgcttcagttagttttttatttacatttttgaagctgttttatagggccaatctgcatttaatatattaatgtctttctgatgtactgacccttttatcagtgtattagcgttctccagagaaacagaaccagtaggtgatagatagatagatagatagatagatagatagatagatagatagatagaggaggggatttattatgagaattggctcacgcaattatggaggctgagaagtcccatgatatgctatctgcaatttggagaataaagaaagccagtagtgtaactcagtctgggcccaaaggccaagaatgatgggagccaatgatggaactccgagccccaggtgcaggacctgagaactggaggggcctgtggggcattggtgtaaattctgcagatgaagacgcaagaacctggagttttgatgcctgggggcaaaagatggatgtcccatctccaggaaagagcaaatttgtccttcctctactttttttttttctgtctgggccctcaatggattggaagatgccagcccacattggtgagggtcatcttctttactcagtctactgattccaatgctaatctcttctagaaacacccttgcagacacactcagaaataatgtttcaccagctatctgtgtatcccttaacccactcaaactgacacataaaattacctatcagttagtatgaattgtcccattttggccctggcaatatagcttagcctgccatctgctttatatgatactaagatatccctcttatgattattgtttacatcataggtctttttctgtccttttactttttacctatgttttatatttaaagtgtatatttttaggcagtatttagttgggtcttgcatttttatccaatctgtcaatctacgctttttaattggtgagctcattccatttttaaatttaccatcttgctattttctctatttatccatctgctttttgttccttgcttcttctttttctgacttcattcatattaattatttttggcatactatctcctctactgaattccttgctatacctctttgttttggttttcgttttagtggttgctctaggatttataatacacttgtcgcagcatattattccacttacgtataatgtaagaaccttacaacagcatgtctttccctttctgattgttattatttctacacatgatatatgtatacatatgtgtctaaatataatatatgtacatatggcataatacaattcattgttattcttttttaaaaaaattaaaaatgagaaaattatcttttatatttactgacatctttatcatttctaatttttgtcattcctttattcctcattctttagatatgaattcacatctaaaatcttatgcatgacaatgaattcactcaactttttttcttttttgaaaagttctttatgttgccttcatttttgagggatataagaatattttcactggttctatctagactgggttttgtttttccttttttcaacactctagattctcccattatcttatggtttgctctgtttatgatgcgacgtcaatggtaattcttaatgtgtattcctgtatgtaatggacttttttcccctatttttaagatttttatctttgtaattggttttcagcaattttattatgatgttccttagaaaaattttctttgtatttatcctaagcaaattttattgaatttcttagttctatggctttattttcttattaaatttggattttttttttggatggagccttgctctgtcaccaggctggagtgcagtggcatgatcttggctcattgcaacctccacttcctacgttcaagcgattcccctgcctcagcctcccgaatggctgggactaaggtgcatgctaccacacccaacaattttttttyttttattttagcagagacagggcttcattatgttgaccaggatggtctcaatctcctgacctcgtaatccacccacctcgacctcccacaagtgctgggattacaggagagtgtcaccgcgcctggccagaaaattttagctatgatttctataaatattttttctgcccacgctttactctctttctagaactccaattgcagtatgttcaatgacttgatagtttcctacacaacacttatgttctgttcatttatcttttagccactttttaatgttttagtttgaataattttataccccatcttcaattttattgtttttttaacttattttgtgtttgagttgtgttgaagctcatccagtaaatttcatctcaaacactgtattttttaactccggaagttcctttaggtatttttttcatagatttcatttctcccctcaatatttttatgttttatttgttgtcattgaacataatcttaatagattttttaagtccttgactaaagatatcatccatcatccttatcatttttagagtttgcttctattgactgattttaatcttaatcatagcttctttgcatatctagaaatttttatatgatgctgaatattgttaatgttatgttgttgagtatctagatgtctcccattaaaaaatattgggcttcattctgatagcagttaatttattcattaataatcatgctccttttaaggcctgtttgcaaggtttgcttgaatgaatctagattagctatcaccctgtggctattttagccctgctgctaaggtatagcctttcttgggtctcccttcaacatctcacatggaagctctctcagtttggggtggttctcatagttgattaatttatacctccccagtattttaggctcactgatagtcactctttgccaagcctgtggagtctcacactgcacatgtgcatcttagtattcaaccaaagactcaataggacttctattgcagatttctcaaactctttctccactctcacctctccagtatctgcctccaaattatggctgcatgaaactgcctgaaatcatctctgtctcctcagctaagtaagactgtcatgttttccttgggtgcccctttcttaccccagggttcatcaaaggccttcaaactgaaagagcaattaagtctgtttgttttccttttctaggtggttacagttctgtgttgttcattgtttgatattcaaaaatagggatgtctttcctacattttgtacaacaacagttttctagttgtttgcagtggaagagctagtctggtaccagttaccccaccatgatcagaaacaaaagtcaaaaaagtattgtttcaactccacttctgttaacatacactaccaattctgtgtgtcaaagaagctcacaagtttttcagtgactataagaattaatgacaatatagcatatagaatatcataayagacctggaaaatttagttatacagttctcgaactaaaatactttcctaagcccttggtattcatggaatttgcttggtttgatgtggaaaatgttttcatttttcagttaagaatataaatgcctgaacttcaagaatgtgattaatattgactgggctcatcagtactgttctcattagaagttaaaacaagtatagtaataccagattcttatcatctgagctctgagatccttgcagtattgaatataccttctctgtcaatctctatcaaaaccctataagcagaaagatacagtcaagcaacttttcaagcactgttgatttattttcactttttgttttctttctccacccctcctggtctcctcctcttgctaaagtctattgtgaccacttttttgttcatcttctttaatgcaacccccaaatcttttatgatagtatagtactatcactattttttaatgcatatattcactcaatacatatttataaatcacatatgaatttctaggtggttttgtagacctagggatgaagtcaacatgtttcctaccccagtgaaagtcagtggtctgataggatgaaaattatttattaaataatcatataaatatatcattacaaaatatgtgggctttaaataaatggtacaaggaactctgagggtacattaatggagtgtcagttttgattctccaggatcaaataccaagagggaattgaatgtgtcacaggatttattagaaggaatgactatggagaaaaaaagagagagaaaatctgagtggggaaagctatagaaagtgatgcaactctaacatctttataaggagagggtggacgaagaaagattgggtagaaagagcatcagagttgaatgcagctctgagaacatctaggccaggttaatagggaggcccagagcaaagactgccttctagagaaatcctctgttgataaggaatggccagatctagtacccatgctatactcagtcatccctcacagcatgttttccttgaaacgagatctgagcggtgtattcccatagctctcatacagaagaatcagatctagcctcggaggctgagaaaggcttctctaggaaatattttaaatcatctttaagtgatggctttaacatctcttacatgctacaatgaaaagagtaggtattcaggtcacataggagaatatttcttagactagttgttaagacaagagccaccttgctatatttttggtagtagatcccagatgcaaagcactctgtgcttttaacatatcctctttcaaagtaatagatagactttttaaaaaaaaacaaaacaaaacaaaaaacaaagtaaaactatttggccagcattagatctcacttcaccaggttttgtagctcaatcctttcattcaggtcattgtgaaatctaaaatcttcctttcctcccaccttcatgttggtggtggatattgtatacatacattccactccaaacatatttttggtactaataaattgcaaggatgawcttattaactttcttctgttttggttgataaaacagttccaagtaacaatttattctgaatcttttctattttaatttgcttttcttgacctcagcagatcacagttgtatcttcaaacagctactgttttgagtaactttgttgaacagcagttatttaaatatttatggtcaatctgttccaaaacaatattgaaatcaacagtgcacagtttaagaaatacataaaaatcaatggggcaaatttatgtaccagaagatctacatttctaactaagtgccagattttccatttataatttttgcaaatgaaacacttcgggtagtcataaatactgacctctctgaacattcctttgtgaattatgatcttgcagtaataaacagagagcagtatttgatttgtaggctgaactatacaaagcaagaactcagtgctaatgcttttgatcattctaattcattttaactggccaagagggagttttttaaaataataaccaccatcatcttctgttctgagtttgcctgatgtctgtctttacatgtttttaccacagtagctttacctagygttgggtctggcaccaggaggacatcactaaatatttgttttaaaagctggtagtccaaagccagcatggagcactgcctaattcagtccataacccttgttctcctgcaaggggtcccatgacaaatgaaactaacacaacaccaactctgttccagtcctctccaggtcccaaataatttagttaactaagctgggtttctcatcgttacatcaacatttactatattttctagaatctagatacataacatttcctattcagaaaggaccttagaaataatagaatccagtgatgacaaatatatttgattttctaagctcaataaggaaaagtgtttttaaaaaatatatataaaaaatgagatcttttaaagagaggtgaaggcatgaatactggatattgacccttccaaatcgagtccaactatccctcctgacagatggccatcaacctcatcttgaatacttccaagacaggaaaatactgcctttcatggtggctatgtcatgactggatgatagaaagttgtttccagtggaaatctgtgcttctgcaatttctacacttttatttaggttctgcctttcgaagtcatacaaaataaatttactctttctattccatataatagtactttatatatttgacaagttttctgaggtcccctttctttttattagcttccagcctcttagcatttttgacattcctatctatgatgcttaacgcttctaagtgtgtgtgtgtgtgtgtgtgtgtgtgtgtgtgtscgcatgcatgtgtgtgtcgtagactataattcatctgggcctggaagatttcctacatgcaaaactacatggtcctgtctttatcatcttctaacttatcttgagccttaattgctgcttaaagacattgctttacctttccagcttgaagatccttaattttgttaggatagacaagcaacaggaatgttggaagcttttctttcactgtcatttgtttacatgacatcatcttttccaagtggcaggcttaaccctgtcttgttttccttctcactctaaacctaatttacaatgccttttgccaaagctaagaaacacttttttgcttgtatcttactttacactgcagctgcatttgataccattgatcaatccctctttcctgaaattttctaccctcttagcttcaacaaatttattttcatttgatttttctcttctctttctctttgcattcctaatatgcttcctctgtaggctcctcctcctctgctttaaatgctgtgttcaccagaattctgttctctamgtaaacttcatccttgagttagtttacacactcccatggtttgaaccactctgttttctaatgataacaaatgttatctccagctcgaatctctccctcccctaaggttaagatgctaagcacagacgttccagtgtgactgaaactgaactgtcatctccctcccacatgcccagcctgtgttctgctctttctcttcaaagatgtcctatgattagcatcactgtctgcacaatcatccaaatagaaacccaggttcctccctccaaacccattcataaagcaatcaccaaatcctgctgattctattgcccacagtttttgactccatcgcctcttgtattatcctacttctctggcttgggcattccatttctttagcttggagtttttcaatagccctgatgtgcatttttgtttgtttgcctttattcttgtattcctcagatctagcctccaccctgcagccagagcaatctatccaaaacttaaatctgaccatgttctttcccatttaaaatacttcatgtttctcctttacctgcaaaatggagctctagagcatgacatgtaggatattctgtaacttggccaacaactttctctccaactttgcattttcctactccttgctctggaatagaagctgtgatcatgcctaaatgcttatgaaatccagcatatatcatgctattttggatttcaagtcttcttgccttttattatgacatgttttctgcctggatagaatgcccattctcttgccttcttttgactagttttcactcatctctagtagtttagctcagctgccatcttctctagaaaatattttcccaacacagaaggattgaatatactgcctttgtgttcccatagcaccctagacttgcttctattttcctcactacatatattgattccacaatgtatctgtatatgtgactgtstcctccytatgttttctcagacttattttagaaaagcttaggtggatattttttaactacaagtcctttttatatacaaggaaataaaataagaaaacctaatgttagtaagcttcaaattctatgctaacaacgtcttagaagtaaaacaaagtcataaaggaatagagttacttgttagaagatgattgtcccccccaaaactgctatcatctttttttttttgagacagagtcttactgtgtcacctaggmaggagtgcagtggtgcagtcatagcttactataaccgcgaagtcctgggttcacacaattctcctacctcctgagtagctaggactacagatgcataccatcatgcccacccagctaacttctaaaaaaattttgtagagatggatcttgccatgtttcccaggctggtctcgaactcctgggaccaagcaatgtacctgccttggcctctgtgctgggccaactttttagcaagtatttttgttttaacttaggggacaaagtgatggtcttggttctcaaattctcttaacacatatttactgagtatctatgtgtgtgtagagacaaattaagacatttattatgtttttaagaaacttacaatgtaacaggaaataatatactcgtatttcaaggaagagatgatggtgatgatactgaaaatagatatcatttattgagaaaataagggatttccattatctcaaataatctcataatcatactgcaagtaaactattagcattcttatattaagaatgtatattacattattttatattatattatattaagaatatattaactatattagcattcttattttacattaagagaataaagattcaagagttaagaaacatgctcacggtcacactgtgaaggcatgcaaatttatgcttaaccatagctatgctctctgcaatactgtgttgtgttatgagagtcagccaaccgtaagactcagagaaggcagagacagatggtttcctgctggaggaatcagagaaggctccatgaaggagatggcttttgatttaggcattgaaatatgagtaaaacttggaccttcagattggcaaatatagatatggaggtgggaaagtgtacagcacgcacaaagcaaagcaagggagatcagtttgaatggagcaaaagaatattgatgaagaaaattcaaatgtcagtagaaggttcatgtaggaggttcacattgttccaactaagcaaggtgaacttccttttacagtcatataaattcaatgagaattttaaaacagggcaatgatatgagacgaatgtggtctataaaattggggaaaggagggtctggaagtggttcagtcattcatctgatgaacatttattaagcaccttctctgtgtcaggcactgttttatgtactaggaaacatcggtgaacaaaaacaacaaaaatccctgccctcttggagttcttctagttggaagacaattaacaaattacctgctatatacaggttaagtatcccttatccaaaatccttggaacaasaagtgtttgggatttgggatttttttttaatttgggaatatttgcaaatacataatgagatatcttggggataggacccagtctatgaaattcatttttttttattttttaatttttattttttattatacttttaagttttagggtacatgtgcacattgtgcaggttagttacatatgtatacatgtgccatgctggtgcactgcacccactaactcgtcatctagcattaggtatatctcccaatgatatccctcccccctccccctaccccacaacagtccccagtgtgatattccccttcctgtgtccatgtgttctcattgttcaattcccacctatragtgagaatatgcggtgtttggttttttgttcttgcgatagtttactgagaatgatgttttccaatttcatccatgtccctgcaaaggacatgaactcatcattttttatggctgcatagtattccatggtgtatatgtgccacattttcttaatccagtctatcattgttggacatttgtgttggttccaagtctttgctattgtgaaaaatgccacaataaacatacgtgtgcatgtgtctttatagcagcatgatttatagtcatttgggtatatacccagtaatgggatggctgggtcaaatggtatttccagttctagatccctgaggaaacgccacactgacttccacaatggttgaactagtttacagtcccaccaacagtgtaaaagtgttcctatttctccacatcctctccagcacctgttttttcctgactttctaatgattgccattctaactggtgtgagatggtatctcattgtggttttgatttgcatttctctgatggccagtgatgatgagcattttttcatgtgttttttggctgcataaatgtcttcttttgagaagtgtctgttcatgtcctttgcccactttttgatggggttgtttgtttttttcttgtaaatttgtttgagttcattgtagattctggatattagccctttgtcagatgagtaggttgcgaaaattttctcccattttgtaggttgcctgttcattctgatggtagtttcttttgctgtgcagaagctctttagtttaattagatcccatttgtcaattttggctttcgttgccattgcttttggtgttttagacatgaagtccttgcccatgcctatgtcctgaatggtaatgcctaggttttcttctagggtttttatggttttaggtctaatgtttaagtctttaatccatcttgaattgatttttgtataaggtgtaaggaagagatccagtttcagctttctacatatggctagccagttttcccagcaccatttattaaatagggaatcctttccccattgcttgtttttctcaggtttgtcaaagatcagatagttgtagatatgcggcgttatttctgagggctctgttctgttccattgatctatatctctgttttggtaccagtaccatgctgttttggttactgtagccttgtagtatagtttgaagtcaggtagtgtgatgcctccagctttgttcttttggcttaggattgacttggcgatgcgggctcttttttggttccatatgaactttaaagtagttttttccaattctgtgaagaaaggcattggtagcttgatggggatggcattgaatctgtaaattaccttgggcagtatggccattttcacgatatcaattcttcctacccatgagcatggaatgttcttccatttgtttgtatcctcttttatttccttgagcagtggtttgtagttctccttcaagaggtccttcacatcccttgtaagttggattcctaggtattttattctctttgaagcaattgtgaatgggagttcactcctgatttggctctctgtttgtctgttgttggtgtataagaatgcttgtgatttttgtacgttgattttgtatcctgagactttgctgaagttgcttatcagcttaaggagattttgggctgagacaatggggttttctagatatacaatcatgtcgtctgcaaacaggtatctctcagaccacagtgcaatcaaactagaactcaggattaagattctcactcaaaaccgctcaactgcatggaaactgaacaacctgctcctgaatgactactgggtacataacgaaatgaaggcagaaataaagatgttctttgaaaccaatgagaacaaagacacaacataccagaatctctgggacgcattcaaagcagtgtgtagagggaaatttatagcactaaatgcccacaagagaaagcaggaaagatccaaaattgacaccctaacatcacaattaaaagaactagaaaagcaagagcaaacacattcaaaagctagcagaaggcaagaaataactaagatcagagcagaactgaaggaaatagagacacaaaaaatcccttcaaaaaattaatgaatccaggagctggttttttgaaaggatcaacaaaattgataaaccactagcaagactaataaagaaaaaaagagagaagaatctaatagacgcaataaaaaatgataaaggggatatcaccactgatcccacagaaatacaaactaccatcagagaatactacaaacacctctatgcaaataaactagaaaatctagaagaaatggataaattcctcaacacatacattctcccaagactaaaccaggaagaagttgaawctctgaatagaccaataacaggatccgaaattgtggcaataatcaatagcttaccaaccaaaaagagtccaggaccagatgaattcacagctgaattctaccagaggtacaaggaggaactggtaccattccttctgaaactattccaatcaatagaaaaagagggaatcctccctaactcattttatgaggccagcatcattctgataccaaagccaggcagagacacaacaaaaaaagagaattttagaccactatccttgatgaacattgatgcaaaaatcctcaataaaatactggcaaaccgaatccagcagcacatcaaaaagcttatccaccacgatcaagtgggcttcatccctgggatgcaaggctggttcaatatacgcaaatcaataaatgtaatccagcatataaacagagccaaagacaaaaaccacatgattatctcaatagatgcagaaaaggcctttgacaaaattcaacaacccttcatgctaaaaactctcaataaattaggtattgatgggacatatttcaaaataataagagctatctgtgacaaacccacagccaatatcatactgaatgggcaaaaactggaagcattccctttgaaaactggcacaagacagggatgccctctctcaccrctcctattcaacatagtgttggaagttctggccagggcaatcaggcaggagaaggaaataaagggtattcaattaggaaaagaggaactcaaattgtcattttgttttatatattccttatagacatagtctgaaggtaattttacataatactttcaataattttgtgcatagacagcaagttatatagttagttgtatagttatatatagtttatttgtgatatatatggtgatatatatgacatgttaaagggtgataatttttacagacaaaagttaagcaatggaagaaaatggaaagctcctatgtagggatggggggggcatttataattttaaataggactgaaagggaaggtcctactgaggtgacattataagcaaagacatggagtagatgagaaaataaacgatgtgaaaatttgggataagagcattccaggcacaaagaagaacaaaatcaaaggccatgagtgtgcctgtgacatataaaatacagtaaagaggccaagtggttggagtgggctgaagaaggggcagtagtcggaaaggcatccagaaaggtcacaggaagggagcgtggcaaggattttggctttttccctcagtgacgtgggcagccactggagggttttgagtagagaagtgccaaggcctgagtcaggtttctgaaggataaccccggcttctgtgtgaagaatgtttgagcagggatgagagcaatggtgggagtctggccatgaagcagctcagtccagggtggcagctgtagagtaggttgggagtggccagatgtgtgaaccaactggatatggagtaagtgtgagacacatagaggagtctagatcagggtccccaactcccaggccacagattactaccgatccgtggcctgttaagaactgggccacacagcaggagggcagtaggtgagcggcgggcaagcaaagtgaagcttcatctgtatttacagttgtaccccatcacttgcattactgcctgagctccacctcctttcagatcagcaaagacattagattctcatacaagtgtaagctctatgaaaactgcatgagagggatttaggttgcacacaccttatgaggatctaatgcctgaaaatctgtcactgtctcccatcacccccaacatgggaccatctagttgaaggaaaacaagctcagggctcccactgattctacattatggtgagttgtataattatttcactacatgttacaatacaataaaaatagaaataaagtgcacaataaatgtaatgcacttgaaccatccccgaaccattcccccttccaccctgccccagtctgtggaaaaattgtcttccacaaaaccggcccctggtgccaaaaacgttggggatcactagtctagctgactctaagtagttcatgtactcagtaacaactgttatttgtttttatgtattgctgggtttgtgtttgtgtatgtgtgcttttatgcaccatatttatagcccttttatgtcaaccacaaaaattggaaattccttctgacagataaatgaatgcccttgtaaagtgtgtatttatgagtacgcacacctcactttgctcttgattaagattcttaactttacaaagtgcattctcatctcatttaatagtcacaacacctctgtgttagaatggctatagtgagtataaaaaatgcttaaattatctccaggtcctatatatatatgtgtgtgtgtgtgtgtgtgtgtgtgtgtgtgtgtatgtgtgtgtgtatatatataaatatgtataaatgtgcctcagaaagttaggaaataaccactttaacaataattttacacttgggatagttgttgaatttgtagccatgtctatgtatgccaaatatctgtatgtaaccttaaagtctgtgcaatattaaaatgaattgaaaacatgtgaagtgatatctttaggttttcagtttttctaaaatttttggtgtagcttgcatgtcctaaaaaaaacttgagttttcccatcatttgtctagatgtaaaagtaggatgtagatacctctgccagcaaacttaatctttccttccacctcatccttcgtcttattatttttaaaactgtatacaacatgtcaagttctagattaagtattagaatttcaaaacaaagaggatttagattatctgctttcaaagaaatatgaattatctaagtatgtatcccctacctcattcatacaaggatttaaagtgtcttacagaagtatataggcaaaagggaaaaaaatagaggtgagactaaaaagtaaataaaattaggaaaataatgtgaagccaggaatgggatcagcattaaaatgcacatcaaaacattctattcaatgttcactccaagctttttccaagccagggtaaagaggaaaacagaacagaattcactgctatcaacatgatgaaagctcaccagttgcttataaatagtgtagtttttcttgatcttcaatcatgagaacaatttctccagcaggtaataaaagcacatggccagttttttctaagagctttctaaaagtaatgcagcaatggattttatggtgatcatttttataatatttcttagttcagatagattacacaccattcaagcatagatcagtaaagaggcccaaacggtgcaatctaaggacgatgtgaatatcacttcccacactgatgcttttcataagaactgagtagcagaatgatcaggttctctggccaaaagctaagtttctgttattttgctgtgattaaagtttgacaatcaacaaaacagaaactagagttgagctccttcagtgggatgtaaagaacttatcaaagatgatgtgtgggaatagaaaccctcaaacatctgaggtgtgccttaaatgaggctgactcctctgtaacaaccacagggacataggagtggggggtggggttgaggaaggcctcttagaagaggtgactcttgagctagatctcaaagcatgaataagattttgatatgaagaagcatggaagcccattttatatagataaacatctcaacctatgcagaagggagtaggttcacagagtatgttggcaaacagtggaaagtcctattaagttaggacaaacagtgatcagtagcaggcatgaggaaagacagcatagacaccagggtgaagatttatgaatagaccttcataaggtgtttcataaatattttatgaattaaaatattttatgaataaattaacatttattcataaatgttttatgcatagaccttcataagcctgtgtttcctccccctatcccttcatctcacatggctttctaaagaaactagagcctgacaaaaagtccataagttgggagcactaatttattaaaaaatttgacaactagtcactacatttacacaaaccatggcttccctctcaagatccaatgaatgtcattctctgcttcctctttatacaaatatttttgtccctcaacataaatgggagtgatccttggcctctttgggaggtactgttcatttatttcattgatgttcaataaataagaagaatcgatccaaaggtttttcttgcttttctaaagagtttagtttaagattcagcatttcattacattaaccttatggactattgtgtccggaattggttccttccagtggattcttggtctccctgacttcaagaatgaagccgcggaccctcacagtgagtgttacagttcttaaagatggtgtgtccagagttttttcctctaatgttcagatgtgtccagttgtgggttcatggtcttgctgacttcaggagtgaagccgcagaccctcgcagtcagtgttacagctcttaaagatggcacatccggagttgtttcttccttctggtgggttcatcatcttgctgacttcaggagtgaagccacagaccttcgcagtgagtgttacagctcataaaggtagtgcagacccaaagagtgagcagcagcaagatttattgtgaagagcaaaagaacaaatcttccatagtgtggaaggggacctgagcagtttgccactgctggctccggtggccagcttttattcccttatttggcccactcacatcctgctgattggtccattttacagagagctgattggtctattttacagagtgctgattggtgcatttacaaacctttagctagacacagagtgctgattggtgcatttttacagagtgctgattggtgcgtttacaaacctttagctagacagaaaagttatccaagtccccacctgacccagaagcccagctggcttcacctctcaatcccccctctaaacaggacaccccaactgctgttgggaattgggcgatgactgctctagctacttcctgctgaacaggggtgaagaaggggccctgcagttgtagtgtcctccggatgggaactctttaggtcagtgaaaggaccagcgggtcagtccaggggtcctcagtagttgttagttgagctcacttggggttccatttgtaagaccatctgtagcttgatggcctcaattctagaggaaacaaatttgacaaggaggttaaaaatacagggcccaaaggcaagtaatagcaagatggctgtcacaggacctagaaaggggagaagccatgttgcccaactccagaggatggtataagagtttgaaaggcattgtctgattttggaaaccttttcctgtaaacaccgggcggcatctcatactatccctgaatggttagtgtaaaaacaacactcttcccctaagaagatgcagagtcctctttttttggttgtgtaaaaacaacactcttcccctaagaaggtgcagagtcctcttttctcagcagtgaggaggactaggcctcggtggttttggagaatcactgctgccaaagagtctatttgggattgtagttactatccttactggatagattttgttatttcttgcaaactgtctgagaaatcctctgagagtgtggtagtaggataatgaaatagataaacctgctattctggtttctgtagcagtagccattcctaaccctataagtaggtgtattcgttgtatgcccctgcattgatggacttgagctttgaggggcacagatagggtctgatttccataagattagaagttaggataatacatgttacaccgttaacttttttagcaaactttacttttgttgaaaaccttgtaagtttgggattccaattattctttgctattaataagacctcgttcagtccatattaacttagaattggtatagatggctccttcctgattctgtaagtactttaagatttggctgaatgcaaacaactcccacgtttgagcagaccaattattaggcaattttcctaactctgcttctacaagagtttccttatcacttattgagtacccattgcgtctttttcccttaatttccagggaggaaccatccatcgtcctatcctgaagggagttcctcctagatgtggtcagacctttgtatggtaattaattaagatttagatccccctgttaggaaacctgctgggttaaggatttttgttaggaaggctatgggttgtcagtggcctcagtgttttcgggttatgcccttgttcccttgtttacactgacaacaaggtggtattgaagtgttatagggttacagagaagaccctcaattatcaattataggttttaaatttaccctggcttttaaaggaatagggtacactgttttttatttactatttctctttctctctgtttgacttcttctttgtctgtctctctctttctctctttctgactccctctttgtctcttcctttccttctttgactttctgtttctctgtctcttcctctctctgtcttcttctttttgtctctgtttcttcctctctctctctgacttcctgtctctttctctctttcctttctgctgcctctgccagctgcttatgctgctgttctcccctctccttccccttttgatggcttcagcagtataagactgccacctccttgggtttttgcaaggagtgcaataactccatgatttctttgtggtatttagtgggggttcccccagaggttaggaactccctttctttccatattgcagcatgggcatgtaggattagataagcatacttgctatctgtatacacatttattctttttccctttcccagttctaaagctcgggtaagtgccactagttctgctaactgggcactggtccctgggggaagaggtttactttcaagtatgtttacatcactaactatggcataacctgcccttcatatcccattctccacaaatgaacttccaccggtatataggttaaggtcaggattagccaaggggacttctaagagatcatatccggcagcatgagtctggactataatttgttggcagtcatgcttgattggttccccatcctctgggagaaaagtggcagggttgagggcctcacacatacatgtttgaagcactggtccctcaaggagtagtgcmtggtatctaagtaggcagctgtctgatagccataaacttcctttgacacctagtatgccatttacatcatgagtagtccagacagtaagatcctttccttgtatagcctctgacactaagacggccaccaccacaattacccataaacagtgaggccagccttttgctactatatcaatttccttacttaggtatgccactggttgtggggttgtcccacgagtctgagtaaggaccmcaagagctattcctgttctctctgtgatgtataaagaaaagtttcatcctgtgggaaggcttaaggctggagcttgagtttgtttcttccaatgcctagacttcagggttgattccctcctcaagcaggggacaacaaatgggtaactcgttctccatattcatgtagataatagctccagctttggctaatatatccctaataagggtatgggactttcaggcataacaagaaaggcatgtgaaaagagcaaagtcattacaactgaggaagtgggagaaatacctggttataggctgtcccaggattcctcggatggtaatggaccttgaggacagtcatccaggacaagagattaacattgagaaggccatgccagtgtccaggaggaagtcaatttcctggtcctcaatggttaaatgtacccagggctcagcaagggtgatgacatgagctggtgcttgccctgggcatcctcagtcctattgttgcatcatctggttgggggcttctggcccagagaagctttgccctctggggcagtgtgtcttctagtgattgcctcggcatagcagacatggatgagggggtggcttgtttctcattggacagtcttttctaaggtgtccttgcaaaccacactggtaacaagccccactgggtgattggcctgctctgttttctgtcctctctgaaccaccaaggtctgtttgtctgagggccatgactaaggctgtggcctttctccgatctcgcttttccttttgggcctattcctcttggtccctattataaaacaccaaggttgccaggtttaagaatgcctccagattttgttcagggcccagggctcacttttggagctttctcctgatatctgttgattgggtaataaatttatcttttagaatcaattgaccctcgagtgagttgggggacaggggagtatattttcttaaggcctcccatagccactcgaggaaggtagaaggcagaaggattttcttcctttccctgagctatggtggacatcattgaataattcatgggctttttcctaattctccttagtccttctagaacacaggtcaacaaatgtttgcaactccagtccccatgatctgagtcgaggtcccagtggggatccatactggggatggcttgctgactggtagagaatttgtccctttcttcagctgtcattctattgtttacttgactaagataccaggtatctccaaactcttgggctgcagctaaagccgcattcttttcattaaaggccagggtttgatctaacaatagcatgacatctctccaagtgagatcaaaggtttgccctagaccctgtaggatatctatatacctatcaggatcatctgaaaacttccccaagtctgccttgatctgctttaaattaaagagagagaagggacacgtacctgggttgggccaaattcccctctccctacagcttgaaggggacataacctatagcccgggggtttttttggtcctttggaaatttctttgcttatttccttctgggtgggggagattagaggaggcttatcattaataggaaggggagttatagggaggctaggatatggaggtaagctgagaggtcctcctgtgggatgtaaattgcaagctttgcatagttgtgtattctccttcaatgaaaagaaagcttggacataaggtatttcactccatttgccttccctcgtacagaaaaggtcaacctgcaggatcgtatagtaatttatacttccctcaggtggccatttttccccatcagagagagaatattggggccaggccatagtgcagaaaaaaatgasctgcctctttttcagggtttrtgggtcaaattggtcccaatggcttaggatgcatttcaagggtgagcctgttgatacctgagtgtttcccatctgaaagacaaaaccacctgcagttttggtttgtttctccccctgcgcaaaaacctgcaatgatccctggaccctgctgatcagaagagttgtgcttaccaatgcagcagcagaaacatctcttgcccgagaacccgcaatggtccctggaccctggtgatcagaagagttgcgcccaccgacgcagcagcagaaacactagttttcctcctagaccacaaggaggaccaaggaaggttggatttagtggcccttactgatgcattctcgaaaacctgcacccttgcctgtcctcctagaccacaaagargaccgagaaaaatcggatttagtggcccttactgacacattctcaaaaacctgttagagtcctaagcattctcctgttagtattgggactttatccatttcctataaagatgttatgccccaaaaatgaagtggagggccataccctgtgggatggaagggatctccagagttggaagagtgatgccttttgtcctcacttatatgaacagaaggatacaatttctgaggctccccatatcctagcttcaggagtagcttttgttaggcctgcttgtctgaagagggatcctaaaattccagataatcccctctacaacagggctttgggcaaaaattatgtctttctgatcggtgagcccaggtgcctaaagaaggtaacagagtcctggagtttatactagaaatcattcttacaggagaaaatagaaaagcaccagagacagggagtggtttttagaagcgggactagcctcggagaagagaggcaagaggaagtttgacaggcattaggacccaggaggcaagggtcaggatagataagatagatggatgagtctcacttgggcgacatgactttgagagttccgctcatggccgcagggtcaaccaacttgttgtcaggaccctgaagctgaatggctttcctctctgttgacccttggctcagcccagaagtacaggaaaagcagcagctggttccaggcaaaccaatgctcccaactccgaagagttgggggttgttagaaagccctttctcagaaagcctggcacccgcgtctttagtctggtagccacactagttgcttttaactggccaacaagtgcctgttatttagcccccagattctaaggaaaaataggacagaatagcaaacgaaaggggtccgatggtactcaccacttggcgataggcgatggtcccttcatggtcaccaaaatatgtctggaattggtgggttcttggtctcgctgacttcaagaatgaagcctcagagcctcacagtgagtgttacagttcttaaagatggtgtgtccagagtttgttcctctgacgttcagatgtgtccagagtttcttccttctggtgggtttgtggtcttgctgacttcaggagtgaagccacagacctttgcagtgagtgttacagctcttaaagatggcgtgtctggagttgtttcttcctcctggtgggttcatcatctcgctgacttcaggagtgaagccacagaccttcacagtgagtgttacagctcataaaggtagtgcggacccaaagagtgagcagcagcaagatttattgtgaagagtgaaagaacaaaacttccacagcgtggaaggggacctgagcaggttgccactgctggcttgggtggccagcttttattcccttatttggccccacccaccctggtgattggtccattttacagagagcttattggtctatttacagagtgctgattggtctgtttttacagagtgctgattggagaatttacaaacctttagccagacagaaaagttctccaagtccccacctgacccagaagcccagccagcttcatctctcactaactctttggaataaagaaaatgcaaacccaccagggacaaattggaaaatcaggaaaaccaagaggctgtgtaacttgatttataatatgctgccttgaagaaacataaagattccccttaggcgttgaagaaatcagtgtgaacctagtcaggagggaaatccctcaggagatgattaaaccaagggacatttgctgatggtgctcactgctaaaaccacacactatgtactctatgggtgttatctcaatcaattactataaacctatgtnnnnnnnnnnnnnnnnnnnnnnnnnnnnnnnnnnnnnnnnnnnnnnnnnnnnnnnnnnnnnnnnnnnnnnnnnnnnnnnnnnnnnnnnnnnnnnnnnnnnnnnnnnnnnnnnnnnnnnnnnnnnnnnnnnnnnnnnnnnnnnnnnnnnnnnnnnnnnnnnnnnnnnnnnnnnnnnnnnnnnnnnnnnnnnnnnnnnnnnnnnnnnnnnnnnnnnnnnnnnnnnnnnnnnnnnnnnnnnnnnnnnnnnnnnnnnnnnnnnnnnnnnnnnnnnnnnnnnnnnnnnnnnnnnnnnnnnnnntttttctctttgtcaccatccctactgcctctctgtttaaagaagttcaaacttgaagagcccttagagggtcatttagttcagtgattgaactaacagcagggattagaatcaagtgaatgaggcactcatcctaggtgcaaaatgtaaagggatgccaaaaagctcagcagttatgataaacaatatcttaatgccatatttagaagaatcaaaagtaatgcaaaagtttgtgataaatagaatgtcaaaatgtaaatagaaacaggattgttatcttaaagaatagattcctcttggaatccctctgtctgttaaagtcaccatcatcacagccttggtgtctaaatcagcagcactagtagcacctgagaatttttttttggaatgcaggtattcaggtcccatctcagtcctcatccatcagaggctgagggtggagcccagcaatctgtatttgaacaaagcttctaggtgaagctgatggaagttcaagtttcaagactttccctgtggcctttacatgcagtatgtaaaccattggtctggcccaatgccttcatatgacacatgggaaggggacatgttagcagcacatctgaggatttatctgtgagtttggggccctttctattctattgcactgcttcccacccattcaactgaccaagtgtggtcagtaacatgttctatgccatatttaccaggatttcctgggaatctgttcccttctgggagatgaatcattttgcttctgtttattcctggtgtcatacaatcaaatagagaagaagccacataaggtcccctgagagggattgctaacagcagtgatttccaaccttagtggcatgtgagaatcacctgaggagcctgggaaaagaccaatacccagatctcatcccaactaagtaaatcagaatctctggggataggccttgagtattgatattttgttttttaactccaaagtggattgtaatatgcatccagggctgagaatgatggggctggcaaatgtgggaggattcagatctggtctaatgcaatattcactgtcactgtccacaaatcataagctagacatcatttttaccaccttccttagtatcatcctctttattttacatttatttgtgtgaccatttaatcaatatctttattctactgtagaatttgtgatggcaggagcctcatcttcttttgcttatcactgagtccatagcagctagctagtgcttggacataaaaggtgtttcataaacatttgctcaaacaatgaatgcacagccaaataaacaattatataggcctgaagaattgcacaggaaagatctcaaaaccagagattgactctttttttttttttttttttttttttgatatggagtctcgctctgtctcccaggctggagtgcagtggcttgatctctgctcactgcaagctccgcctcccgggttcccgctctgacactttctactcctgttacctttgaaaaggccttttgcttcttgggcttcagtctttttaaacaccgaatcagtggtttttaaactaggttttgctgaatccctcaggatcagtgagtgataagggggaaaaaagagaaggctgaaggggcaagtggaataaagtcattttaatctatttctggttaatttcttttgaaagaagagtttagtttctaaaacaaaaatagttcaaaaaccactggactagaagttacctaaatccccttctggctgaacacttctgtaaaactggatgttttccaaaggagacttgactcacagagttctgagaagactgaacagctggcaaatcaggtttctgtttttctagaaggctgcaaatgtgcatgcaaatacaggtgggcttctcttttcaggaaaagctctgaagcaataaagcccccttatttagttgcatctgcccaaacagaacagacacagactgagtcactcccacttcctgggctggcaatttcataggcttcccagattgtccgactcaattaaggatatttactaagagcacattcctgggcaggtgcttcagtctcccagctgcaaagacgattgaagcacctgcattttcactgtgtgcacctgaattgtgctccctgaaaggaacttttttagatgaggtttacctcacttctcttcactctcagtttttagagaaaaacacaatctcaacaaaacacattttcttttcatcttaattaaaatgcctgtcccaggaatatgatactttccctgtggcctttgtatggggtatgtaaagtgaagagggacttaaagttattttctgctataatgagccttgcctggagccctctgcacacttgtgagaaggagtgggaggcagagatatgacccctctttgtttccctagagtacaactcaattatctgttttacctttggggtttcagtttagatttcatttaaatcaaactttgcattgctttcaaaaagagaaagagtaggtcttggaacctacacatttagaggatgtaaatcaaaacccagcacttatatttgccttaattacctgaatttttttacctaaggcttctgggtaatttctttcctcctttgtctatagagatgttgctaggttttgtggaaatatctactttattcgcaaaaattaaattctatccattctaaaaattttaccacattatattactgagtctactgttagcttaaaataatgaatatattcatgcattatttagcagtagtatttttccttttattactccatgttttaatgtattggtctcacatgttggcatgcatcaagatcaactgcagggtttgttaaaaagggaagtgctgggccccatccccagtttctgattcagtaggttcaagttgggtacttgaaattgtcagggatgtgtaaggcacagctgaaaggccaygtccatgggtgctgtgcttgctcagtcagtcttatacagaatgtctacctggagggcttactgccttgtgcaggcagcccagttggattccctcattcataccatggctgctgttgatagacacaagtgttttttaccaggggtcagagtagagagtggctctggaaaaggatttgagaatcagaagggcccctctgaatccaagttatccccttctttttcagacctatctccatggctgctccatgaaaccccacaattgttgctgggtttcttggtaaggcactatgccttttttaaatgccagtacctggtgagaagatggggatactctgaatgtttaacaactgagtacatttcatactggtagaagtaaactggaaaaaatctagaactttagagttgggtgcaatcccgtgtttgagtcttccaattttaaaaggtggaaatggaaggtcaaagaggttaagtgattcttcccaaagtcataaagccagtctgcctaaagacagtggggcagaggagttggcattgaccaagtagggcaggcctggagggagagagaaactggggatctggaaaggtccaggagtgtgaggcctggtgggacatggagtgaggagaggagacagtgggagggagaattgatccctcctgagttccttgctgttaatgacaccatccactgggccccatattggaaacctcaggattgcctttcacttgtttctctctgtcctcacccaggtaccatagtgacttatcagtagtttcttcctttccattactcctgccactgctgaagtccaggccctctttgtcactgttcttctagcctcctaactcatttttctggccctactgaaatcaktcttccatacagccatgagaattctctatgggcaaaccatactcctatttagggatcttcaggagctgcctagtgccaacagggtaacaatcccrtcttctcagtgtggtgctgaagttgttccatttccctaaatccaccttgctcttccacttctatttccttacactttcttccatgcaaactatagcccacccacatcacacgacttagaagaacctaattatctaattataccctacactttcaaactctgattttgcctaagctatgccccataatgacttcctcttaaactcaattttttcccagttatttaaagcaaagcccaaattgtcttctgtgaaggcttccccgtctgccarctagaaatacttttttcctctctgatgacctgagagcattttatctgtgaatctgtcataggcctagcttaattaataactgcatgagaatatgcttctgagcacacctgtacacacatcctactgtccttggtcctgaaaaataactgagtgactgtttatccttattccaggattccagttattcctgcccaaccactcacaaaaattgtcattgagtgttttcattttttatcatgactagagtgttgaaatttgaactctgcctcagaacaaattgaagcatggcatatctatattgctggttttatattgctggtttgaaaaccttatgaagttctggcacacccaacagtaataaattattcctgctacctctaagaagtcagggaggggaaatcttgctctcctgtgtgcctgcccaccttgtgttttgctcatgattcctgacatttcccctgttctggtcttactcatatcttcttgggaatgttttatctcttatgtattcttaagctcactatcttgctcactagaatggaagctgcatagaattttcttctaagtcatcaaaagacaatcctggcatgtagtagcaatgcaggaaatatggagttgaacttgtgggaaggtgggagatggatactaaaagtaacctttatttcttttccattttttggcagagtattactatttgcttcagagaacttagaaattcccatatcattcctgaattcaaacctgcacgttcagccatagagaatcagttcttataaggcagagcctgtcagtggttacacccccaattacaatacacacttccttgtggccccagcctcaacacagagtgtagctttttctatagacaggtcatttattccttctttccacaaataatgactgcctgtgtgtcagaaactgggyaagtactggggatacaacatttaaaaaggcaggcactgctcctatttaatcttaatatgaatactgattactatggaaacatatagcttgaaagtaaaacccactgggaagattcagaaaaatctctctgaagaagtgacatataatgtaagtcttgaagaatgttattagacrcccagatgaagatggagattattttgtacaaagggaacagaattgtggaaactcaaaggtaagacaggtgagacagtggtgacttaaatcactaacataccactgcctctagggagtctcttctgcacccacctcagtcttgggacaaggactcctcctatatakgttcccaagaattctatacttccatcattgcacctcttatcaccctgcattgtaattgcctatatactttttggtctttcccattaaataataaaatccataagagcaagaactatgtctgtcttgactaccactgcatctcttgcagttggcacagtgctgagtatatgatacattaaagtaaatgccctgtgcagagcctcactcctcaccattcacatgcatgcctgactggctgccaaacatcagcatctgaagtgttgggcagagcgggtcttggaggcagagagtcataggccccagggaattaacactcctgggagcagcctcaaccaaggactgtcagggttggtggataaatactatagtggctttcttcaccctaaagtgggataaggctgagttatatggtctacaggaggcttaagctccagtggccccctgtactaaactgcttaagaattcattattcactgggggccttttgttcctttctgacttccctactcccctaccaatatttcctgggatcgtctctcatgaaaaaacactctcaaccagatccttgactcagagttggcttctggaggaagccaaactgaactgttactcacgaaatataggttgaatgactgagtcccctcctgactcagccacttatttgctgggttacgcaagttattacctctctgagccttcacccttgtccccagttccctgcaaaatatcctcactatctcaccaggttgttgcttggctctagcaacatatggtgtaggaaaagcctgctggagctgcactgagttgttgaaatggaccattgccctgtcacatgcccaactggcccagctgggacacagccgagtaagagccaaatggctagaagaggttttttgactgtctgccttgaccttaagaagccacaacctgcttagctattcctgaagtgagtccaaaccccaagggaaaatacagtggttttaatgagaagaagttttctgcaggtcacacacagctctggggcctgtttatgactcctggcttaaatagcaattctggatccttagagaacagctactaactattatagtatcctaacgtagggagccagaatctagtttatatgtgacttacatttatttaaaaaaaaaaactgtgctggatatttctagttaatgttacaatgacaatgatgacagttatgatgatgatagcaagtgtcatttattgagcccctgttgtgagctaggaggcagtcctttaaggtagttactatagccatcatttttacaaataagaaagctgaggcttggaaagagtaaatttctgcttctgtgtatcacacagtagcaatgtatagagtcaaactggtatcctgaagcttatactgtgtactccttattagatttttctatcaccagctgggtgcagtggctcacacctgtaatcccagcactttgggaggctgaggcaggtggatcacttgagctcaggagtttgagaccagcctggccaacatggcaaaaccccatctctattaaaaatacaaaaattagtcaggtgtggtagagcagcctgtagtcccagctactcgggaggctgaggtaggaggattgctcaaacctaggaggcagaggctgcagtgagccaacatggtgtcactgcactctagcctgggtgatagtgcgagaccctgtctcaaaaaaatttttttctaaggctaggaccattgactcacacctgtaaccccagcactttgggaggctgaggcaggtggatcacctgagattacgagtttgagaccagcctggccaacatggtgaaaccctgtctctactaaaaatgcaaaaattagctgggcatggtggtgcacacatgtggtcccagctactcaggagactgaggcacaagaatcacttgaacctgggaggcggaggctgcagtgagccgagatcatgtcattgcactctagcctgggtgacagagcaagactccatctaaaaaaataaacataaaaataaaaaagatttttcatcaccagaataaagaattcaggtgttcactgaatacagagctgccacagcttttcttgatcctacatataatattatctaccatagcccccatgccagccaaggctgagtggagagcctatgctttcacctataagagtctgtaatgaaattataagtctgtaatgaaatatctcaacatcccactggggtgagatcagagaattccatgtaggawgccaggactttatcccaactatgttgtaatgagagccccctgccctgaagtgtctgtgtaaaccacatgaggatgatgctgggtttccactcccccaacaccctggcggtgataaggtgccccttgtcctccctattaggggtataagaggcctaatggagagtcagaactgtcgctaccacccaacagaaacaagccctccccgcaacatagagtcactgaaggccatgtgggaagcagtaacaaggaacccatactccttccatacaaagaggtatgaatgacaatggattttgcatcaggtattacagaagccagaaggaagtggctctacattttttcaagtgctgaaagagaactacaatctgatatccagtgaaaatatcttttagaaataaagtagctgtctagttttcccaacaccatttgtttaagagactatccttttcccattgggtattcttggcacctttgtgaaaaatcaattgactatacatgaatatgttcatttctgggctatctattctgtttgtctgtatgtgtgttttatgccagtaccatgctgttttgattactataactttaagtaatagtttgaaatcaggtggtttaataactctttgttctttttgctcatgattgtcttggctatttgggattttttgtagttccatataaattttagaattgtttcttctatttctatgaaaaattttaacattggaattttgatatggattccatggactctgtagattgctttggcaagaataaatattttaataatattaatatttccaatccatgaatatggaaaatattttcatttatttatgtcttctacagtttattttatcaatattttgtagttttcagtgtgcaggtcttttactaccttagataaatgtatccctaagtatttcattttattttattgtaaaatatggttgttctcttgatttcttctttgattaattaattttagaatttataattgaaacaataattgtacatattagggagtacaagttgatgtttcattgcttgtgtatatggtataataattgagttggtgtaaagtattatatccattactttaaacatttttcatttctttgtggtgacaacattcaaaatcttcttttctagctatcttgaaatatacactacattgttatttgctaaagtcaccctactatgtaatatatgaccagaacttattatttctgcctaatgtaatgttgtacctattggccaaccattcctggttctcctctcccgcctcccatccctagcctctggtaatcactattctactctctacttctatgaaatcaacttttttagattccacatagatttatacatttatctgtagatgggtacataggttgatttcctatcttggctattatgaatagtgctgcaataaacatggaagtgcagatgtctcttcaacatactgatttcatttcctttgtatatgtacccagtaatagcattcctggatcatatggtagctctatttttaattttttgagaaatctccatactgctttccataatggctatactaatttacattcctacgaagagtgtacaagaattcccttttgtctgtatcttcacaagcatttgtgttttttttatctttttaatgatattcattctaactgggttgaggtgacatctcattgtggctttgatttgcattctcttgatgattaacgatgttcaagattttttcatatacctgttggccattcgtataccttcttttgagaaatgtctattcatgttttttrcctatttttaatcctattatttagtttttgttctttctttttttgctattgaatcattgagtttcttatatattctgaataataatccattgtcagatgcatagtttgcaacaacccctccatattttactcttcactcggttgattgtttccttatctgtaaagaagttttttagtttgatattatcccatttgtctatttttggttttgtttctgtgcttttgcagtcttattcgaaaaatctttgcctactccaatttcatgaagcatttcccctatattttctactaatagtttcatagttttaagccttgtatttgtcttaatttatttagagttcatttttgtttatagtgaaaaataagtacctagtttcattcttcttcatgtgactatctagtttttccaccaccatttattgggactgttttttctcaatgtgcattcttgccacctttggcaaaaaacagttggttaaaagtgcatggatttctttctgggctttctattttgttccattggtctgtttttctataagtaccatgctgttttggttactatagctttatagtatattttgaagtcaggtagtgtaatgcttgcagctttgttgcttttgctcaaaatttatttggtaattcagggtcttttgcacttccacatgaattttaagattgtttttctatttatgagaagaatatcattggtattttgacagaaattgcactgaatttgaagattactttggataatatggacattttaacaatattaatacttccaatccatgaacacaggatgtcttttcatttatttgtctttttcagcttctttcattaatgttttatggttttttttttttttttttttgagacggagtctcgctctgtcgcccaggccggactgcggactgcagtggcgcaatctcggctcactgcaagctccgcttcccgggttcatgccattctcctgcctcagcctcccgagtagctgggactacaggcgcccgccaccacgcccggctaattttttgtatttttagtagagacggggtttcaccttgttagccaggatggtctcgatctcctgacctcatgatccacccgcctcggcctcccaaagtgctgggattacaggcgtgagccaccgcgcccggcctgttttatggttttaattgtagagatatttcacctccttggttattatgtctagcatttctgtagctattgtaatagaattgctttcttgatttctttttcagatagttcattattagcatatagaaatgctactgatttttgtgttgattttgtatcctgcaactttactatactcagttattaattctaatagttttttagtggagtctttaggattttctatgtatatggtcatgtcatctgcaaacagggacaatatgacttccactttttaaaatttgggtgccctttgtttctttctcttgcctacttgctttggctagaatattcagtactatgtcaaataaagtggtaaacgtgggtattcttgtgttgttctagatcttagagaaaaacctttcaacttttgcctattccatataatgttagctctggttttgtcatgtaaggcctttattgtatcgaggtatgttcctttatactcagtttgtcaaaagttcttatcatgaatagatgttgaattttattgaaggctttttcagcatctactgaaatgatcacatagtctttgttttttattctgttaatgtgatgcatcatacttattgattttcatatgttgaaccatccttgcatccctggaatgaatcctatttgatcataataaatgatctttctaatgtgttgttgaattagttttgctagtattttgttgaggattttgcatctaagttcatcagagatattggtatgtagttttcttttttgttgtgtccttgtctggttttggtatcagtaatgctggccttgtagaatgaatatggaactattcggttcactttagctttttggaagagtttaagtagaattgatatttgttcttctttaaatgtttggtagaattcaacagtgaagccatccattcctggacttttctttgatgggagactttttattactgtgcctatctcattgctcattattggtctgttcagtttttctatttcttcatgatccaattttggtaagttgtacatgtccatgaatttattactctcttctaggtttaccaatttatttacgtgtagttgttcatagtagtttcttatgatcctttgtatttctgtggcatcagttataatgtcatctttttcatttctgtttttatttatttgagttttgtctttattagcctaactaaaggattattcgttttgtctgtcttttcaaaaccatctttttgttttgttgatcttttgtaaattttttgtctctatttcatttatttctgctctgatctttattatttctgtctttctacttattctgggtttatattgttcttatttttctagttccttgaggtataatgttaggttgtttatttcagatctttttaatattttgatgtaggcatttattacaatgacttctctttccaaactgtttttactgtatcccataggttttggtatattttgtttccattttcatttgccccaagaaatttttaaatttccttcttactttcttcattgacccattagtttttcatgagcaagttgtttaatttctatatatttgaaccatttccaaatttcttcttgttattgttctagtgttattgcactgtgatcagaaaggatacttgatatgatttcaattttgtaacatttgtgaagacttgtgttgtggcctaaaatacattctatcttagacaatgttccatgtgctgttgaaaagaatgtgtattctacagctttttagtggtatgttttataatatctgttaagtctatttggtctagactgtcgtttaattccaatatttctttgttgatttttggtctagatgatttgttcattgctgaagttgggtgttgaactctcctactattattgtattgcagtcaatttcttcctttaggtctgttaatatttgctttatataattaggtactctagtgttgggtgcatatatatttacaactgttatatcctccggctgtattgaatctttcatcaatacatagtagcattttgtctcttaaaattattttttacttaaagtctattttatctgatataagtatagctactcctgccctctttggtttccacttgcttggtgtatctttttccatcctttcacttttagtctatgcatgtctttataagtgacatgagtttcttgtaggcaacatatagttgggtttcttatctattcagtgactctatgtctttcagctagagaatgtagtccatatatattcaaggttattataaatagtagtaagaacttactactgccattttgttgatttctgattgttttataactcctctattcctttattcctctcttactgtcttcttttgggtttattttgtctggtagtatgttttaaatacttgctttttatttttagtttatccattatagattttgctttgtagtcaccatgaggcttaaaaaaatgtatagmtataataagctattttaaactgatgataacctgactttaattgcaaagacaataaaagaaacaaaaaataaaactctttaactcatcttatccctacattttgtcttttggatatttcagtttacatctttttatattgcttatcttttaacaaatcattgtaattattatttttagtagttttatcttttggtacttayactaaagatatgggtggttacagtatatacttttgtcagtggattttatttcttcagatgttttcttgttgcacatgtgtcttgttgcacatgtgtctttttccttcagattgaagatcccaccttagtatttattataagtcaggtctggtagtaatgaggtctttaaacttttgtttgtctgagaaagtctacatctctctcatgttttaaggatagctttgccagatatagtattctcagttgttgggcttttctaaatcattttgaatatatcatttcactcccttctggactataaggtttttgctgtgtaacctgctgccagacatattggagctcctttatctgttgttttcttcttttctcttgctgctttcaggatcctccctttgtttttgacatttgagagtttattatatgccttaagatagtcttgtttgagttgtatctacttggtggtctttgggcttcccctacctatttatatatttctcttttgaaaagttttttgttattatttctttaaataagctttccacccatttctctttttctactccgactttaagggcaatgactcttacatttgctattttgatactatcttatatagctcataagtgttctttgtccttttgcattctttttgcttttccctctctgactgtgtattttcaaatagcctgtcttcaagctcactgattatttcttctgcttaatcagttctgctattgagaccctctactgtacttttcaattcatccatatttttttactccaggatttctgtttttttattaatacttcaatatctttgataaatttctctgataaatttctgaattgcttctctgtgttttactgaaatttgttgagcatcttcaaaatagctattttgaatttccaatttgccttccgctgcaatttattcaggacctgaggacacttgagtcagccaatggtgaagtgtttcagggctcagtttcttccagctgcagcagcagattccattttagccagggataggtctaagtacaccctctgtggacattggcctggaatcaagggctgcaggtttctattccatgttgtatttttctgtggcaagttggtactaagttccaatgcaaagtctcacacacacttttctctctctctcccaaactgatagattctttctctgcactgtgctgtactgcccaagtttgggggagcagtgtacaggcaatgtgggactgtccttcctcccctctccaatgtgcctcttcttgttattatggtaaaatcaggtagtatgatctctcacctgatttctttagttcttgtgaaggtgttgtcttacatgaattattattcaatttgatgttcttgttgggggatacttgtcagagggttctattatgccatcttgctctaccttttcctgttctcttgatttcttttttgtatagtttgttgtttttgtatagaaatgataccaatttttgtgattttgtatcccacaactttagtgtattttttaattagtttaacagttttttgaaggagtcttaggatttttatataaaattatgtcatcagcaaacagtgacaattttacttcttctttttctatttaaatgccttttcttgtttctcttgcctaattgctctgacaaaggactttcaatactacattgaataataagtggtgagagtggacatgtttgtcttgttcaagatcttagagggaagacttttcatcttttatttttgagtataatgttagctgtgggcttatcctatatggcctttatggtgttgactcaaagtgaattaaagacttaaacataagaacagaaagtgcaaagccgctagaagaaattataggagaaaaactacatgacattggtttaggcaataattttttgaatttgaccccaaaaacacagataacaaaagcaaaaataaacagattggattatattagacttaaaaagcttctgcacagcaaaggaaacaactaaccatgtaaagagacaacctatggatgagaagaaaatatttgcaaactaaggccaggtgcagtggctcacgcctgtaatctcagcactttgggaggccgaggcaggtggatcacgagatcaggagttcgagaccagcctggcccatatggtgaaaccctgtctctactaaaaacacaaaaactagccaggcatggtggcacatgcctataatcccagctattcaggaggctgaggcagaagaattgcttgaacctgggaggcataggttgcagtgagccgagatcacaccactgcactccagcctggttgacagagtgagactccgtctcaaaaaaaaaaaaaaaraaaaagaaaaagaaaatatttgcaaactatacatctgataaagggttaatatcccaaatatataagaaattgaaacaactcaatagaaagaaaacaaagaacagaattttacaaggagcaagggacctgaatagacatttttcaaaagaaggcatgtaatacaaatagtcagcagatatatgaaaaatgctcaacatttgtaatcactgggaaaatgcaaattaaagccacaagaaatatcctctcacacctgtcagaattacttttattaaaaaaaaaagccaaagataagtgttggtgagaatgtggagaaacaggaacccttgtacactgctggtggaaacgtaaatttatggaaaacagtatgaagcttcctctaaaagttaaaaacagaactaccatatgattcagcaatcccacttctggatattcacaaagacattaaaatcagtttgtcaaagagatgtctgcagtcccatgtttattaccacactattcacaatagccaagttatggaatcagtctaagtgtccatcaacagatgaatggataaagaaaatatggcatatatacatcatggaatactatttagtctataaaaagaagaaaagtatcatttgtgacaacatagatggaactggagaacattatgctaagtgaaataaggcaggcacagaaaaatacatgttctcacttacatgtggaatctaagatgatcaaacccatagaagcagagagtagaatgatggttaccagaccgtgggaggttggaggaatgagaagatgatagtcagagcatacaaagtctcagtaaacaagagaaataagttgggtggtggtctttttctgagatctattgcactgcatgtttaatatagttaataatgtattgtaaatttcaaaattgccaagagagtaaatttcaaatgtcctcattatgaaaatgacaagtatttgaggggatggatatgttaactaatttgatttaattgttctatattgtgttcataaatcataatattactttgtaccacataaatacatttagttataaattattaatttataataaaaatgtttagaaagaataaagggaaaattaagacattttcagatgttggaaaagaagacaatttgttatcagccaatcaaccctaaaggaatgattaaaagaaatcctctaaagagaaaaaaaattataaaagaagaaatcttaccttatgaggaaggaagaaaaaagacaatatacaaaaatgtgggtaaatacaacagattttcttttttctgttgtgttctctaaattatatttaacaattgaagcaaaaattatgacaatgtctgatgaggttctaaatttatgtagaagagaagtttaaaatagttataaatgggggacaataaactagtgtaaagggaggtaagatttctgtagtttactagaactgggaaaatgacgcccccaggagagtgtgataacttttgtttataaaatgtaatatctagagaaatcagtgtttaaaaaggtatacaaagaaacgctctgggccgggtgcagtggctcacgcctataatcccagcactttgggaggccaaggcgggcagatcacgaggtcaggagatcaagaccatcctggctaacatggtgaaaccccgtctctactaaaaatacaaaaaattagccgggcgtggtggcggacgcctgtagtcccagctactcgggaggctgaggcaggagaatggtgtgaacccgggaggtggagcttgcagtgagccgagattgtgccactgcactccagcctgggggacagagcaagactccgtctcaaaaaaaaaaaaaaaaaaaaaatgctctggaaaacacgatagataaaccaaaatggaattctaaaaaatgttcaagtaacccattagaaattaagaaaaagaaaatgaaccaaaaaggacaaaaataaaaataaaatgagagatttaaaacctaatatataaaaatgtaactgaatctaaatagtccacatacaccaattaaaggacagaaattagcagagttaattgagaaaacgtaagctaacaatatgctctctataagaaactcacttcaaatataagaatatagacaagttaaagtaaaaggatggaaaaagatatacaaacactgatcagaagaaagcagaagtggctacattaacatcagataaagtagactctaaagcaaataaatttaaagagacagagaaggacattatataatgataaaagaatcaacacaccaaaaggacataacaatcctaagtgcatatgtaccacacaacagagctgcaaaatatgttaggcaaaactcatataattgaaaggagaaatagacaaatctataattatagttggagacttcgacaacccctttttaacaattgataggacaactagacagagaacatcaaggatgtggaagaatgcaataataccatcaaccgacaggatctaattgacatktatagaaccctacactcaacaacagcagaatgcacattcttttcaagtgcctgtgggacctagaccataacctggactataaatcaaacgtcatctaattttaaagaattaaaatcatatggagggtgttctctggccaaaatggagttacattagaaatcaataacagaaaaatctcctaatacttgagaagtaaatcacatacttcatgaatgggtcaaaaaggaagtcttgaggaaaataaatatatgaaatggaatgaaaataaaaacacaacatatcaaaaattgtgggacctggcaacaaatgaaaagcaaatttatagcactaaatgtatagattagaaagaagaaaatatctcaaatcagtaatttaagttcctacctgaagaacccagcaaaagaagagcaaataagctcaaagcaaggaggaagaaaaaaataatgaaagtaagaactggttagaagtgaagtattttatatggttactttggggagaatttagttttccttgatttgtcctaaattggaagtaggaacaaaaaataaggaaactccatcattgaccaaatgctgaccacctgggccaactgctgcagaggttagggtttgacttctgggcaagttgctacagaggttatgagtcagagttctattattattgcatattcattgtctcagtttgtatattgtatctctcaattccatttatataacattcttgcaaagacaaaattataggattggagaacagattagtagttgccaaggcttaaggagggggtttaagtgagaggaaagtagatgtaaaagggcagcatagggatccttgtggggatggaaatgttctctgtctttattgtatcaatgtcaatatttggttgtgatagtatattatagttttgcaagaagttactattgagataagttrggaaaaggatacaagtgttctctgtgtattatttctttcaagtgcttatgaacccacaattatctcaaaggaaaaaatatttaattaaacaaaaaaattccaagagataggagactggttatcttccaaagaatatcagactcacaaccgaattctcgaaaacaataaaagccagaaaaaaattctttaagtaatagattcaaactgctgaagaaaaaaaaataactcattatataggacttgacccagctaaactctcattgaagagtaaaaacaaaatagaaacttctagttgtgaggactaagaaaatttaccacccaagactctccctaaaagagggattgaagtatgaacttcagtaagaagaaaactgaaccctgaatgaagcaggggaagaactgaatccattacttcagcaaatatttgtagagtgcctgctatgtgccaggtactatgaacaaaataggcagaatttcctgcctgctcttatgggacttaaaattctagtgggagacatacaataaacaaacaaaaaaaaatgagtaagaaatacagtattttaaatgttctgaagtttcactgagtcctttctagatgtagatatctttttatttagtctttttaggattcattgtttcttgaatttgagtatctaggttaaaaaaaatgtttaaaggtcctcctccattttcagaaactgataggttacaacacagaaaactagtaaggatatagagtttttaaataatgcaattaactagtgtcatgtaacaaacatgtatgtatatgaaatcttgtatctacacattagagaaagcaattctcctatgcatgtataaaacattccaaaaattgacaacatatagcctcaaattacatgcaaaagatactgtaaatcaatataacagagaccacattaccataaaattagaatacataaaaaaacaagagagattaatctatttaatgttcaagtctttcccagcccatctagttccacagggaacagggattcaactcacatttagttcaggcatgggagcctccattctctcccttgagccttccttcctctccttccttttccttgttgctgtttcttccagctctgttcctaatcttaatctctggggtgggttgtcagtgatcagatttcccttctggatgagactagcagggaggggagggatggtgtaaaggagacagaggttcaagtattaaaaagaatctgaagcatttatcctgctaattggttttctctttgaataccatctctgcttcattgtgctcagaaaacttctggctgcttccctgaattacaagatttccttctgttaccttatcttcagtatatgcccaacatctagttgggagatgtggaaagtctactctgaaacatagatacatgcacacatttttatttttatcacaatgaagtcatgttctacatactgttctgaatttctttttttcataaaaatatatcattggcatctctccataacaataaatataaatctatctcacctataaattatggaattaaatttaaaaattaaattcaattttgtggatatctcgaagatgaaaaccaccaagccatattaaaaaataaaacaagtttgcatatgtgtttgtatatatacacacacgtaccattttctccttttatctgccatggttttgctctctggagtttcagttatctgtggtcaattacaatgagaaataggtgagtagggtacaataagatattttgagagacagagatcacattcacataacttttattacagtatattgttataattgttctattttatgagttattgttgttaatctctgactatgccttatttgtaaattaaactttatcattggtatgtatgtatgaggtaaaacattacatttgttatttgtacatatggttcagtactatctgtggtttcaggcatttactgggggtcttggaacgtatcccctgtggataaagagggactagcktgtgtgtgtgtgtgtgtgtgtgtgtgtgtgtgtgtgtgtttcaaggtgggaagattcaatattggttcattggttcatttaagttttatttattgagcatctattgagcatctactatgtggcaggtactactgtaggcactgaggatacagcagtgagcaaaataagtaaatttctttgctattacagagtttatattctagtggaaggaaacagaaagtaaacaagaaaattgtgtgaaattttataaaatgatgaattctatggagaaaaagaaaacagaaaatgatgaataaggaagtattgagacagagaagcaatattagatagaagggccagagatgttctcagaaatgtaaatgaacaaaaacattaagaaggtaaaaaagcaagccatgcagttaactgagagaaatgtgtttcaggccaaggaaacagcaagtataaaggcactcaggtagaagcgtatatgtcctattagagaaatagcaaggagaccaatgttactgaagtagagtaagtagaaatgggaaaagagagaaacgaagccattcttaaatacatcagcttttcctccaggtgaaatggagaactattggaaagtttggagtagaagggtgatatgcatgaactaacattttaataagatttttcctgtctgctgtaatgaaaatagactttacagggatgaagttaatgcaagattatcacttaagaggctattacacaggaactaaaaaagagtccatataaccaagacaatcctaagcaaaaagaacaaagctggaggcatcatgctgcctgacttcaaactatactacaaggctacagtaaccaaaacagcatggtactggtactgaaacagatatatagaccaataggacagaaaaaaggcctcaggaataacaccacacatctacaaccatgtgatttttgacaaacctgacaaaaacaagaaatggggaaaggattccctatttaataaatgatgttaggaaaactgtctagccatatgcagaaaactgaaactggaccccttccttacaccttatacaaaaattaactcaggatgtattaaagacttaaacgtagtacgtaaaatcataaaagccctagaagaaaacttaggcaataccattcaggatataagcatgggcagagacttcatgactaaaacaccaaaactaatggcaaaaaagccaaaattgacaaatgggatctaattaacctaaagagcttctgcacagcaaaagaaactatcatgagagttaacaggcaacctacagaatgagagaaaatttttgcagtctatccatctgacaaagagctaatatccagaatctataaggaacttgaacaaatttacaattaaaaaaaacccatcaaaaagtgggcaaagcatatgaacagacacttcttaaaagaagacatttaagtggccaacaaacatatgaaaaaatgctcattatcactggtcattagagaagtgcaaaccgaaaccagaatgaggtaccatctcatgccagttagaatggtgatcattaaaaagtcaggaaacaacagatgctggagagaatgtggagaaataggaatgcttttacactgttggtgggagtgtaaattagttcaaacattgtagaagacagtgtggcaattcctcaaggatctagaaccagaaataccatttggcccagcaatcccattcctgggtatatacccaaaggattataaatcattctactataaagacacatgtacgtgtatgtttattgcagcactattcacaatatcaaagacttagaaccaatccaaatgcccatcaacagtagactggataaagaaaatgtggcacatatacaccatggaatactacacagccataaaaaaggatgagtttatgtcctttgctgggacatggatgaagctggagaccatcattctcggcaaactaacacagggacagaaaaccaaacgctgcatgttctcactcataagtgggagttgaacagtgagaacacatggacacagtgaggggaacatcacacaccagggcctattggtgggtggggagctaggggagggatagcatgcggagaaatacctaatgtagatgatgggttgatgggtgcaacaaaccacaatggcacgtgtatacctacgtaataaaccttcatgttctgcacatgtatcccggaacttaaagtataataataataataataatattaaaagagactgttacacaggagactgaggtaggaggattgtttaagcccaggagttcaagactgcagtgaactatgcttgccccactgcattccagcttggggtgacagaacaagatcgcaattctaaaaaagaaaaagaggttattaaagtaaaggctattacaataatccaaggataatataatgggagcttggaccttgtcggggggtgaaaaatgatgaccatttttaaggacgaatctaataaaattttctgatgtgttagacatcgggtatgaaagaatgaaggcactcaaggatgactccagatttgttttttttgttttgtttgggatttgttggcctgtagcaaagagaaagatgaagttgttattatatgaaatgggctatactacaggagaaacatatatagagagaaatatccaaatactataaaacgtcaatcctgttcttttaatctctatgcttgttagttttatgggagtgatgggtaggaaggtgttgatggggtggctgaggagtagtctaaaaattcatagtaaaattttcaggaagaatgaatatgcaaaagtcaccaagaaaattttaaataagaataatagtgagggggcatttgcctgcttactcagaatataaaattagcctacattaaataaatccatatggtactggcaacagaatagacaaatagctcaatggaatagaatagaacatctagaaatatatacatatacattagaatttgatatatgaacaaaataatgttacaaattgatagaaagaaaccttctttttcagtaaattgtgttgtgccaattggctaatcagctggggaaaaaattacaagttgcccccttacctttgtaccatatacaaaaattaactcagaatgaatcaaagacctaaatggaaaacataaaactataaaactgttggccgggcatggtggcttctgcctgcaatcccagcactttgggaggccgaggtgagtggatcacttgaggccaggagttcgagaccagcctggccaacatggcaaaacccatctctactaaaaatacaaaaattagtcgggcgtagtggtgcatgcctgtagtcccagctacccgggaggctgacgcaggagaatagcttgaacccgggaagcagaagttgcagtgagccgagattgcaccacttcactgtagcctgggagacagagcacgactgtgtmtcagaaataataataataataataataataatmataataataataataaattttttwaaaaatgaaacttttaggtaaaagcttaggagagaagctttatgacattgaatttggcaatgatttcttggatatgataccaggcacaggaaacaaaaataaaagtagacaaattggatgacttcaaaattaaaaacttccatgcatcacaggacacaatacagtgaaaatgtaacctatagaatgggagaaaatacttgcaaattatatatctgataagggatcaatatgcagaatatgtaaagaactcctacaactgaacaacaaaaaaccaattaaaaaaatgaacaaaggacctgaatagatattttgccgaataaaatatacaaatagtcaacaagcataggaaaagaggttcaacatcactaatgatcagggagatgcaaatcaaaatcacaatattacctcacacccattaggatggctgtcatttaaatataagaaaatcattgttggtaagtatgtgggaaaattggaactcttctgcactgtagtggtgaaaccactatggaaaacagcatgacagtttctcaaaatattaaaaattgagttaccatatgatccagccattccacttcagatatatagccaaaaaaaattaaaagcaagatctcaaagacatatttgtatacccatgtttacagcagcattactcaaaatagccaaaagttgaaagcaacacaaatgtccactgactgatgaatagataaacaaaatgtggaatatacacacagtggaatattacttattcttaagaaagaaggaaattcttactcatgctataacatggatggatcttgaaaatatgcaaagcaaaataaaccaatgacaaaaagaaaaatgctatatgattttacttatatgaggtataaagagtagtcacactcttagaaataaagctagagtagtgctcaccaggggctgggggtcggtgcaatggagagttgtttagtgagtatagagtttcagtttgcaagaggagaaagtcctggagattggttgaacaataatgtgagtttatgtaacactactgaactttgtatttaaatggtacattctatgtgttgtatcacaattgcaaaagtttttaaacttatgaaatttaaaaaataggcggggcacggtggttcacgcctgtagtcccagcactttgggaggcagaggtgggcggatcacgaggtcgggagatcaagaccatcctggctaacatggtgaaaccccgtgtctattaaaaacacaaaaaaattagccaggtgtggtggggggcacctgtagtcccagctactcaggaagttgaggcaggagaatggcgtgaacccrtaggcggagcttgcagtgagctgagattgctacactgcactccagcctgggtgacacagccagactccatctcaaaaaaaaaaaaaaaattccttttatttcaccatacacatttttttaaattatactttaagtggtcaaaatttattaatttattaagcatatagtttgtgcctaggattatgctaaacttgaaaacacaaagatgaatgtgacttaccctcagctcttccagtgaagaaatagatcaatgtgacagttgcctgagttgtacagagccctcctagggaggcagcaagcccagtgattcaggccaccaaccccagcacgggactgccctatccaaacccacctctgccacttactgcctatgtgaccttcaactggttactcatactccttggacctccattttctaatgtgtgaaatgggaggaataatgaaccctgcctcatggctggttttaaaggctatataaattaatgtatgttaaaggacttagaacagtataaagcacacagaaagtactattagttcattagtagtagtgtgaactaaacctactgtagaacagagtcctttattttctattttgacttttttgttcttttaaaatatgcattattgctgttatttacctttaaactcaaatgatactttcttgcccggattccaaatagatctacaagagtttactcttttctaacttaatctacttagttctttactctctagaaaaaacaaatcaataacacggaaaaccttaaaattatcattttgttcatctgcctccagattatttctgcagattttaaagaaggatgggcctaggatggaactctggggaacaaggatcccttaccctataggctttgcaaatattgtcttctcagatgagtgcctattatctatatgcattgtttccttcgctaatgcagtgactgaccctgacagaactgtcctctccaagaacatggaaacttgtgtttctcattgagttttgacacagaaccttgtcaaagatgttttaaaaatataagtaggttataccacttacctctgttgtcaatgtgcccatgtaccaccttaaagaatcctagcctcaaatactatctcctctcatataatcaagtggcaatttctctccaaatttgggttgagttatacgtgaggaattacaagccatggaattcttctcataaccccaattttgtagctctaactgtagatttaaagtaatgccactaacccagtgtgactcaaggatctgcacccttatctgccacttagctatgacctggggccacgctgcccttcggctgctgctgaagtaaggttaaagaaagggtagcccaatgtgccaacagtggctcaaaatgaaaattgtgcttggagatattgaggtcaatctatatgaacaataatgtaaaatatgagagtttatgttgttttgctttatctgtctctatggaaagaacatgggaatttaaattgtccagggctgaagcccctacacatttttccggcaaaattatctattgcacatcgataaaataatggaaaataggccataaattgctactgggacaaccaagtaaccacaagaaaaagaaaaagaatcaaatcctactcatttttatacctaaataaactccaggtagatcaaagacataacataacctcagaaaaaggataccacagaacatttttaaagatcatcaagaaataggtaatatatctctaagtgtgataaataaaccataactcataagagaaactaatacattttattacataaaatttttaaaatctatatggcaaaaacacarcagaaaaaataagaaatggtaagctgggtgaaagtttttaatttgcattacagagaaaaggcttatttctcataacaactgacaaaaataagattgattagaagttcaacagaaaaatgtcaacagttcagaaaatatagatggtccttaagcttatgaaaagatatccttacctataagataaatgctaattataattacactaagatttccctattttgtttttgtttttgtttttttgagatggagtcttactctcttgcctaggctggagtacaatggcatgatctcagctgacttcgacctctgcctcccgtgttcaagtgattctcctgcctcagcctcttgagtagctgggattacaggcacccaccaccatgcccagctaatttttgtatttttagtagagacggggtttcagcatgttggtcaggctggtctcgaactcctgacctcaggtgatccacccgcctcagcctcccaaagtgctgagattacaggcatgagccaccgtgcccagccaacatctccctcttgagtttgggcttgacttagtgattcatatccagagataagtgtgtggcaaagggaaaaagagtaactttaccatgaacacatctgrcaaacactaccttaaatccacaaggtgaacatcaccagtgataagtcatgttgataacacctaccatctgatatgacatgaggagggaactttacctgtgaagtgttccttccaaaaackaaccccattctaatcataagacacatatttgacaaacccaaattgagagacattctacaaaccactgaccaggacttctcaaaactcttaaggtcatgaagagcaaaggaagackgagagactgtcagaaaccaggtgagactaaggagacaagatgactaaaatgcaatattgcctcctagatgggatccaggaatattagtagaaaaactgttaaaatccaaataaaatttgaagtttaggtaatagtaatatattaatgttagttgcttagttttgatgagtgtaccatggagatatgagatgttgccaagagggkaaactgagtaaggaatatacagggattttccatactatctttgcaacttttctataaaatctagaattattccaaaataaaaaaagtatgttaaagatgtaatttttacctataggtaccacaaacataaaaagtttgataacctaatatgttggaaatgctgtaggaaaacagtatttcatacatttttggaagaagtataaattggaacttttaagaagatcaatttggcaatatcttcaaaataacaactgaattatcacttgactcagcagttacatttcaagaaatttaataggtatactgctgtatgtgcaaaatatacaagattattcatcatagcattatttctcatagaaaaagattggaaataactttgcacatcactagggacttaatgaattgtggcgcattctttcaaggtaaaatttgcaattggaaaaaagactcccaacatagagcgtaagtttttaaaaaggccaagatgccctagagtggatagtacgttaccatgtatttaaagagaaggggacacatgttatattttcttgtgtgtgcattaaaatgcatctggaagggtagacaagtagctggaaaatatcatctgtctccagggagaaacactggaatatgccgagggggaaagagatctttctctgtgtaccttttagcacattttcaatttttaaagatatgaacatatgtcctaccacatttcaccaaatctatgatgctatcaatgaaaagatgcagcattctttgtacaactaggagcaaaaagttatcattaacctgtggaataccactgattataagataaatcctgattttaaaatgtgcagctttggaaacaacaaaatataattttaaaatagactttgaaaaatgtttcgaagggatctctgtttttctatgcatagatcaaaagtctgaagggatatacaacaaatagttaccacaattatttctagatagctgaatactgtgatttttattttcttctctgtattttctaattttcctacaggaaaaaaaaaacattgcttttatgattagaaaagaatgttagtaawttcattgtgactgtaagttttacggggcaactcctcaattacctaatttgtggtgagggagtttttaagaaggtgaccttcttatgagccgmaagttcctcaccaccacacctccctttaccatctcctttgtaaattcctcttcctgtgacttaaatattcatttctgaggggtctaaccttctggtcttcccttcttcttcttcttttttttgttttttgagactgagtctcctctgtcccctagactggagtgcagtgacatgatcttggctaactgttaacctccagcctcccaggtttaagcaattcccatgcctcagtctcccaagtagctgggattacagaagcccgccaccacgcatggctaattttttttagtagagatggggttttgccatggtgacctggctattctcgaactcttgacctcaaatgatccgcccgcctcggcctcccaaaatgctgggattacaggcatgaaccaccgcacccggctggtcttcccttcttagtctgtattttgacacagaagcagaccaacattatagttcagggtgtaggttctggtgccagactcactggtttcaaatctgggcactgccacttactgtgcagccttgaggaaatagttgttctctctatgcctcagtttcctcatctgcaaaatgggaataataagtatacctacattatagggtgtcagtaatgagtaaaacagtgggaggatgtaaagagggtggatggtgctggtggagtaaatggcccagaaactttagtgattctgatgcatcctggatgattacatccatacacgtggctttggttagcatctatgtattcaaaactccgaaattcattttccagcccagatatgtgccctgagcttcagacataaattcaactgcttcgtggatatctccacttggacattcactgcgataaatgtaatccatctaaaagagaactcatcatccttcaggttaattacctgttcccctaccaccatctccacttccattcatttacttggttgcttttgtcagaaatctgagtatcattcttgactttgtttccctcagcactccttccaccccaaaaaacacacaaataatcaatcactttgtccagcaggcacaacctcctaaatgactcttgattcttctgttctttgccatccctgtggccactgccaccaggcaggcaacctgcatctcgctcctggatggctgtggcatcctgggtatagccttgtctagcctctctctttcctataccacaggcggaatgatctgataagaaatccaatcagggtgccctcacttatataaactgtcagtaagtactcaccatctttaagacaaactatttttgatatggtttatatgtcctggctttgtactctcctccccccaattttatctgatgtgaccaccttaccttcagcactttattccagccataatgaaatactgtgtatttccaaaagtttctgtgatctggtttcactccagtcctttgcacagggccttcctccatctggaacccactttccacccttcatatagttaatatctattttccttcaggtctcagattagatatttttgtctcagaaagctttccccaagcccaactcttgactggatctgccttccaaatgctccgatggcatcttgatcttacttcttacaaagcagttcatactatgagagcttttccccaactcaactgtgaacttcttcaagtaggagcctatgtctaaccagtggtaggctggagttgacaaatacccgctggctggcgccacttgktaaacgtcctgaattgttttgaactggttgttaagcatagccattataaaatatcaaattatataagtaaatattgtatattcaaaatgaaaataataaaagcttaagactcatttcttcctaattactagattgtactataatctatacttttgagatgatatacattcatgttgtacgtctctcctcaactccatgcttagtggcaaaatattggtagcttgaaattggccacgatggtcttatttgcacatgaagattggcaaatgctataaaccaaggcttgatttattgttagttaattgtctagactcaagaaactgatggagaaatgtcaataatgcagattaaactttaaagcgtgtcatagtatctgtgaacaacacaaaaaattaaagaactcttctattattgacacttcaattcagcaaagaagtagctcaggtcattaacagacgacactgacatagatcttcgtagtttcaatcttgtcttattcattaatgtaaaggaaaatgcaaccagcattcatgttagcccgacacatagcaagccagttggccatcacttaccagcaccccactgtatctaacccactttgatgttcccagcacctggcattaacctgaaacagaggtgatacttagcaaatgtatattcaagacaagatttgtcaatttacaagtacataaatatatgaaaacatgaactaatgaatacaaggaagcccagaatgtccctaaacaccatcactgcctatttatttggaggaaaggttcaaaaaagggtggaaactctgaactgatacccatggaatgtggaatgactttgccactgtcctttgagtgttgcctgagcccctttgcccaggtcagtgatccagaacagacaattcaataagtacagtgtcaagtttccccaagggcatgtggatggcctctacataactttcaattaacacgtaattggcaagattgttctagattcatggggccttggttgtgttcctttagtggtgcatgcggcttatataagctgagtgggctgtctttgagaaatgtccagaccttgcagggaaaattttcctcttttccatcactagcttgtttgctgcggtgaggatatttctggttcttggctgagtcggtctctctttttggcccatgtacccctagggaattgctgctgccacagatggaaactaattgaagagtaaccgtaggctgggactgcaaaccgggagggaggagggctagctgcaggatgcctggcatctctatgtattctgacttcagcacagtttctgagcttaaacattctgggaagtgctttactgagtggggctgcccctgaggttttctgagggccttcccttacctgatgtcagcaaaggaaatgtcctggatatagtcccctaggatggccactggtgcttaggagtgtatcctggaaggaaactgcctgcctaggttcaaaccagcgctctggtttagaatccaggtaaccatggggaaattacttaacttctctgtccctcagtgtcctcatttataaaataggaataatatcaatggaacctattttacagggctgttataaggattaaatgagatcatttgaaccctgcctggcacataataaaatcttcaataaattgtagctaatttttgtctttgaagtgaacgtggaggagacatctagaaaccaataaagacctggctacaagaaaaaccaatatgagatttagcttgggagaaaggcttcttacaaaggcttaaccaaaactcaggcctgggtttccaggaccgaattaagaaagcccttttttatccatgtatctaatagagggcagtatgttgcagtgaaaacagcagggcctttggaattagacaagacctgggttttaaacctgaactgagtgactttcagcaaattgcttcacttctatgagactcagctttcaaatctgtaaaataggtgaaactataagaaggatttcaaaagagaggattaaataaggtatggcattataatactgagcaaaggggaaccatgcttgttgaaattgaaagatcaattctargccctagaaattactgatcctatgtgggtggtgacattacccccactaagcaggctgattatagagattaaatgaggtgatctatgtacagaccttagctctgtgcccggcaaaaagtaggaaccataaacaataacagcagtgattattggcattgtcattgattttttatgctataggctacacatatttttgtgctcctacrctgtgccaggcccagtgttaggtacgagggatacgtaaaggaataaggctcacatggccccacacttggctgccttccattctagttaggggcaagagaaggggatgggaaacagaaagaaagtaatgttttcagacaacgatatgcttttgcataaaataaaatggtatgatggattagagtgttgagggaggggccttaggtcatgtcagaggaggccgatctttggctctgctcacatagccgcagtgtaagaatacagttctcaggtctttgtgtcagtttgacaactgcgcgaagatagaggggagtctacataagcaggaacaccccagtatctccctgggcatggctgcaagtcaacaagctgaaatcagtgtggacaagatggacacaacagcctcttccatgtgtgaccaggtgacctgacataacctccgtgatttccttacctgcatgtgaccaattcatccactaggtggcagtgttcaataataaacaatgacaacattaacgagcctctggccaacactaatatcgcaggcagccaaaggaccattagctaagarcaccaactacggttttcctttctaatgggtgtacaggattccaattcctggctttggtatggtgacaattttcttctcaatctccttgcattttatgtctgaaatagataatgtttttaattgccataaccgaccacatattgtatgcctggggaatgtacaaagagctttacaaacattattgcattgcattgctgtaccagctttgcagtgagtcgtacgattcccactttatagatgaaggatctgaggatcagcgagtaacactttgcctggatgcacagctggtaagtaacagtgctgggttcaaacctggtatcggatgtcagagcctagctattaaccatcatgctttcctgctatggattttaagaagaattattatcaagataagtgcattagtgcaaagtaaattatctctgatattagggcattatatttgtacwtataatactagcattcatactaccaaatggaggatttatgcagcactcacctggaagctgacgcaaagcaagcggggccagcgacacttctgctgatacctcaggacagggcaggcatatagcagcagagttttctgactatgactgacagttctgacaaggtatcttagaggaatggagggcacactgtcattattttctttttcacggattaaaaaaacaagtcacagagagggaaagttgcttgcctgaggtcccactgcagttcacctgaaccactctctgcactttcccattatcctgaaaactggctaatcagagaaaacctcaacgttctgaacaagtaaatgatagtgtgattctggggaataccttctatgatgtactggcagatagggacaaattatgtgtatgtataagaattctatagcttgaaaaatattattattttatttctggaggaaacaaacatatggcttaaattttcatcttatatattttgaagggagttggtggatgattttcttttgggaatctaagcctgattctgccatcaaactaactgagtgactgtgagtaagttattcctctctgggcctcaattaagaggatgagattaagaaaatataaacacacagtttgtcatgatgttctggtgtgtagccccatcaattccatatgtttaggtgatggtatgctagaattggaaggaaagttagagacaaatggtatattatcttcattttacagatgggaaaactgagccccagagaggagtgacttgttcacagtcacccaaataatagatggcaggaccaggcccagattcccaaaagaggaccctttgtcaactcccttaaaaatataggagatgccggtcaggtgcggtggctcacacctgtaatcccagcactttgggaggcggaggcaggtggatcacgaggtcaggaaatcgagaccatcctggctaacacggtgaaaccctgtctctactaaaaatacaaaaacttagcctggcgtggtggcgggagcctgtagtcccagctactcgggaagctgaggcaggaaaatggcatgaacctgggaggcaaagcttgcagtgagccaagatcatgccactgcactccagtctgggtgacagagcaagactccgtataaaaataaaaataaaaataaaaataaatacaggagctgagaacttaaaccagaagcttttctagagtgggctgttgcgggctggtcctgcaagataaaaaaaatatcctaaggttaaaaaatctgcgaagcaccaagtcaaactatttagcaggacatgccagaagcgttaatatgctaatgtttatcataaatctcccaaaagggaattagagtatttatattttgccaaaattgtttaacctcaaactgttttttcatttttttctttgactgtcagatctatgaacagctcacacaacagtgtttaatggaatgcaactgggaaacaccaacttaatttttgttttctcagttttctgacgtatttagccgtggaatctcatgtttaagaggataataggataaatgttttggggagcatacttaggaatggcttcactgagcaatggacaaggcaaaactatctttgaaccccagtgtccagctgacttaagggctacatttggatggcctacatgcctggagaaggtcaagtatcatcagaggaaattcagccttgagaagggtaaattattcataatagagagctgtctttgtaagaaccttctgaatgagacctgaaaggtcaagctgttacaattgttctttttagaggacaactccttttatacaatatttgagaaattagcacagatagtaagagtttaatacaatgagttagggagttaatgtcattaaacaaagccagaattttagaagtcagaccaatrtggatttgaatttaggctgtgcaaggtgttagcagtgtgacttttggcaagttactctaattgaccttcagacttcttaaaatggggataataacattagtaaaaattgggataataacattatctatgggaaaaaaaatgaagacaggaaattgaaggtgccgtatatgttcagaataattgctgataaaccccttggggaaaaacttgggaccccaaagaaatgctcaactaacacaatatgttcaattaagtgttctgcagggcaaaaggataagaaattccaagtgtgagtggaggactaacctggaagttcaggtaggagccagtgagtggtgaggcagagagcaagacaggagaaggggaaagagagaaaaaacctcacttcaccctccagatccctactccstggtggtgctaagaagaggaactctgagaataaaaatgtttgggaggaattttcacatgaaattccctaggcgatgtcagcccaatgtttcactacacaaaacctccatgaagacagcaaatctcatgcaatgattgtctgcactgattctgattttgatttgatttgataccaggttataaccaccacagagagttgtataaggactcataggaaatgcccctaaatgggaagcaaagcaaagagcttgaggtgtagctcactttatacaatttgttcttgaataattgccccaatccaatttgtacacattgaatcttttcttgttgaattgcatcatcatctcaaagatgagtcagcacagtaaaggggcctgtgttctctattcagctccactaagaaagtctgagtgccttagccagttgctcagtccactgggcctttgttcattcacctgtaaaacaagaggtagcaggcatggtgacttatgagacacataatctcataaaaatgagtttgaagtcattgagacctgagttagagtcccagctctgccactatctagctttgggcctttggcaagttccgcagcgaacttgagggtgatgagaatcaaataaggttatacttgtaattctgaaatggtatctctgattgggtcatcaattggtattggctccaaggactttttgctttaaggttgttttttttttattatttttatttttgcccagtctggagtgcaatggcgtgatcttggctcactgcaacctctgcctcctgggttcaagctattctcctgcctcatcctcctgagtagctaggattacaggtgtgtgccaccacgcccagctactttttgtatttttagtagagacggggtttcaccatgttggtcaggctagtctcgaactcctgacctcgtgatccacccgccttggtctcccaaagtgctaggattacaggcatgagccaccacacccagccgcttccttgtctggttttaatgcacacacattctctttctctctctctctctgtctaccaaattcttctaccttcttctgaaaaacaaaagagaaaggaaacattggaagcaaagaggagggaatgggaagagttggcatgatcaatttgaactgacccaaagaaaaaaacaagtgtattgtgcttcacagcctaagtgtttctagggctcagagtacacgtgtggaaagaagagccccagccatgtgcagactcagaagaccatactagatgggagtatgggggcagggatgttgcgaagagtttattaactcattcccttctttttgaagttctaactggttaagaaaattaatcccagactagctaaataagcttttgccaaagtgttttctgttgaaaacaccttagatggtgactccttaattcattctgttctctagggacacacacaagcaatgaccaggaattgccaaagctaaagtgagtcagaccactttatttgactaatagggacaccatagaaaatcccttttgctttatgatccattcctttgaaaaaaaatctcctccatgggggaccagtgtcttcctgactatggattgcttaagtttaaatatccagtactgatgttgggcagattttgggctgaatgctctctgtagatgactgaaccaaatttcaggctataaaaatgggttttcaatgggttaatactcttaacatataaaaggcatcaccaaacaaatatgaggaaggacaagaaagtacaatttatgaaaaagaatacacacctgatagttatatggaaaggtgttcaagcttcctagtaattaaaggaacaaaatattaaaataacaatgtggtgctaatttttacctatcaggtaggcaaaagttagaatcaaaaataatatttaaagttgttacagatagagcaaaatagacacttttttggtgaaatagtacatgaatacaatctttctagacaattcatcagcatgtagcccaggcattaaacatgcatgccactggctcagctattcaacttcttgaattttattctaagtaaatagtcatagaaacataagatttacctacattggtgttcatcatagccttcccccttcctaagcgtttttgttgctgttatcgggacaatttaagtgtttatgaagatgatactgatacaattatggtacaactgcataatggaatactctgtgtgctttaaaaatgataatgcaaatacatatttacagtataactggaaaaaagcaaattatacaactaaggtaatatttctttaaacaacaatggtaataacaataatatygttttcataagaggataaaagctggggcaagagttgtacaaaaatgttaagcctggttgactccggtgggatgaagaataatttttacttaaaattattttttctctattcctggaattttacaataggcatacattggttttataaatcatataaattaaagcatcagggaggagctgtgaggtgtaccttccacaacgaaaaagggcttgcagtttcagcatgcaagaaatcatgcctgtctttttatttgattttaaaagttactacttttcctcaaatatgtaaaaatctgtcatctaggatctacggctgatcccctgcctgaaagacacattaaccagagctcagaatctaatttggttaggtttttgactacattgcttggtccattttcatgcaggtctaatggttttccattctaattactgtgcttctgtcttctgtcctgctcaaactctgagcgacttttatttaaaagatcttgcactttgggaggctgaggcgggtggatcacgagttcaggagtttgagaccagcctgaccaacatggtgaaacccgctctctactaaaaatacaaaaattagccgggcgtggtggcctgcgcctgtaaccccagctactcaggaggctgaggtgggagaatcgcttgaatccgggaggtggaggttgcagtgagccgagattgtgccactgcactccagcctgggtgacagagtgagactccgtcaaaaaaaagcatgtgtatgtcttttctttacrcatgtaaccagatagtatctgagtgatgaaatgccttttgtagcagaaaaaaggactagggactatcctggatactctcaatagagccaagggaatctgagtaagaacctaggagggagaattatagtcaggtaggtctagaacacagctggaggtagatgacctctactcattaagtcctraaacaatgtagtattatctaacacagccatccctacagagggttaggaaagaagggtttacaattttgcaatcaactaaaagtgatcatgacatttccgtgcttaaaacctatcaatggctcctccatggctttcagagtcaggttcaaaatgcttagcttgggaaatatgatctgtctcctgctgacctcttgagctctgtcattgtcgtctccctactctgcttctagtctcccttgttcttccttagtatgtcagctggttctcctttctgtatgttcccccagccaaacctggaaagccttgcacagacccatcatcagcataacaactcacttacagtgctcttgtctatttgtctgtttctcccatcctcctcttcccttgcctggcttactgatgctaacttcttcagtttcagcacagttcaagcacctcttcaaggacccagaaacctttccattgtcctctctgtctcattcccagctgacttagctcctgccccccaaccctgcctgcagttccccagcaccaccacagtgcatgcatttattcatgcatgcatatataaatatttgtattctcactctgccaggcaataggtgaggtactgggtggagataaagcagagtaaggcagagactctgtcttcatggagctcccaattaatcatagcacttgatacctatactacaatcactgtttccttctgagtctctaccagactgtaagctttctgaaggcagggattatgtctcaatccccttagaktccccagtccctgaagcttcaggcactcagtaaacacacatcggtcattaaacaattgaatgaaaacattaatgctagaaggcatgttaggtaggcaggttttgattatttactataaaattctatttagtttccaaggactatcatatttgaaggcaaagactttagacttagaatttccaggtttctactatactctccctctgaactaaattgtaaatctggatgtcagtatattttcctagatatttattaaaacaccttaaaaatattggctttggttagattaaggctactatgtaagaaccaaatgtgaaataaacaagatctcaacagcttttttgaattgtttgaatcccacctccaactacttactaaatggatgatcttgggcatgtaatttaatttctctgtgccatagttttctcatctctgaaatggaaataatagaacctattgcataagtttgttgtgaggtttaaattggttaatacatacaaagagctaagttcacacaaaggcactcggaagatagtaatgatatagctcatgatctgaaggaaagagggcagaggcagtatcatatactgatttatactatggcctttcaagttggacaatcttgagtttatatcctggctctagtatttattaactacgtaattcaggataagttacataacctctctgaatcttgatgttctctctaaatgaggtttaataatggctacattatggaaattttgtgaggatgaaatgaaaatcgtgacaatacagagttagtaaaattcattagcacatgaagagtgatgaataaatattatttttggtagtgacggtaataaagtaataagaggttacagaggtaagatgactaacactaattttatggattcctcatctttccttagaaggtaaatatgccatacccagaaagtgctcatggaggyagatctactagtgatatttccttcaaaaatggaatggaaagatctctctgggattgaaggctttggtgtgaaaatcaagacaattcaatagagtaaagggctccaaggacccagataagggctagagacagtggcagctgagcatcctcaagggaaaataaaaggtacttctcttcatagatggtgcctggaatytgaaagggtggggccttcgggagatctgcgattaatgtctgctcgttgytgtatctgaggaacactggatatgggttgtttgattaatgtcttggcagcaacatttggagaaaaaaaaaaatagatgtttgatgatcctcctccaactcagattttcctacttccctcattattcgacccttttctgtcagtcctaggttcactttatattttgagcaggtacatctttttgacatgcagccaacaccataggctgtaattatagtattttcttcctccaggattccctgtgttccttgtgaagtgatatacgtgagactgaaaactgtgaaaaagggatatagtcttcccacttcctctcctctagacctagcactggcccactggtctttgcacaacttagaaactgagaccatttattcaagatatagtgttaccataggtcagaacgttattgcaacaaatgtacaaaactatgatgactatggtgtgattggtgccctaaagctgggtagagtacaacctacataactatttgtgtcaggtgcctctacctgctcccactgccctctaactttatctccaacaatcatgcaaataaagatgtatttatttgtttatatcccatcaactggtgcctactgaattttctcttctctctcaaggctcaacttaaatacactatttgaagaagcctctaacatccttctctagactaagtaaaattcctactgtgcccccacctcttgcagctagcactatgcatggtacacacttctgtcattcaatttatcatatcggatggcagtcatttgtttacatggctgtccctcattctgaactatgagcttctgaagcaagactacatgggatgcttatgcaaatgtagatttctaagtctgactgttgatctaaatcagaattgctgggcatagaatctagaaatctgcatttttaaataagactcacctgggtagtgtatgtcccctccattttgaagctcacagctccagatggcaacacacatatttactgcaagtggtaaaatattggacaatatgttttacttggagaaagacttggtgattcatgtcttcccaataatgaaatatttgagttccaaaatgtattagaaactctaggatatggctatagactgaatgtttatgtattccaaaattcatatgctgaaatcttaacccccaagcgatggtattaagagatggacctttgggaggtgatgaggccatgaagatagaatcctaataaatgggattaatgccctcaaaagagagactccagagagttcccttgctctttccaccatgtaaagatgtaaggacacgtgaaagatgrccatctgcaaaccaggaagagagtcctcatcagacaccaaatctgctggccccttgatcttggacttccagcctccagaactgtgagaagtaaatgtttgttgtttaaggcactcagtctatggtactttgttatagtagaccagatgggctaagacagatatatacatacatatgcatattgtcttctggaaagagctataatctcaagtctatggactggtctgtgtgtttggcatggggagacttatggaaagagatggagcgtactcttaagtttgaagtgtttctaaaatatgcatgatgacaatatcctgggttatttcaaaagctggctgagttggatatatttttccccaagatcaaatctttggtgaaacaaaagtggataaaatcttgagcaagctttctggggagtgaccagggcaattatttttctgtgatgacagttccacatagttggggatcagataggagaacaaagagcatgggagtcaagaattcaggcaaagttttttccattcatgagattaaagtgtataggagaataagttgtgcaaaaaccttgtaataattaatatgaaaaaaaattgaatggaaatttgatgggagaaaattgtggggttttttgcacttaatttctttaatcccaaagaacatgtgtmttttacctttgttctgctttctaatgactttgttgatatcccttcataactattttcttagactccttagaaagaagactattgggccaggctcagtggctcacacctgtaatcccagcactttgggaagccgaggtaggtggatcatgagttcaggagttcgagaccagcctgaccagcgtggtgaaaccccatctctattaaaattacaaaaattagccgggcacagtggtgggcatctgtaatcccagctactcaggaggctgaggcaggagaattgcttgaacccaggaggtagagactgcagtgagacgagatcatgccactgcactcctgcctgggtgacagagcaagactctgtctcaaaaaaaaaaaaaaaaaaaaaagtaatagaaagaagactattgttaatgacaacctatcaagtgaccagacagagggacagaatctgtaacctcttccatgcagaagtaaatcaggacacctgcactctgagagtaagcaagcccctttgttccagttcttcttgtgctgggtgttaaaaagagtcagaagagcacttctcttgggaattacttaccaagcattatttgaatggcttaatttttttatgggtctagtactactagcatatggagatactgtaaaattgatacttcaggtgcttccaatttatctggggacgtaatttatagttttcattacagaacaatttaaaacattgtataactgaatgctgtgccctatttacttgctactcaaaatgtagtctaggcattggcattacctggaacttgttagaaatccagattctcaggcccacacccagacctaatgaatcaatatttataatttaacaaaatctgtaggtgattgatatgcacatcaaaracttaccagtggattcttggaccagtattgagctggatgcataagaatcatctgggggcttttaattattctgattcctaggctccaacaataatgtattatattttagcacaattggtagagtatgagctcttggtaaagactgcttatgtttaaattatggttttcactctcactagatgagttaatggccaaataattcaacctgactgagtctattatctcatctatgaaagagggaaattatacctacttgggaggaccatcgagcagataagttattcatcatggttcttcctatacagtaagcattcagagaaactctggctatttttattctgatggtcagtgaagtttggaaatacctacactatgggattgtacctggtttattttactgattagaaaatatgtcttttggggtaagagctaagtaaaggaaacactyagtagtatcattgccactataccctcaactcaacacacacacacacacacacacacacacacacatatatacacatattcatatatgtatacatacacatatgtactggtgcgtgtgtttctctaaagatctcggctctcttttcatttcttttaattttttattttcataggttattggggaatggtggtgtttggttacctgagtaagtgttttggtggagatttgtgagattttggtgcacccatcacccaagcagtgaatactgcacccagtttgtagtcttttaccctcacccccttcccaccctttcccactgagttcccaaagtccactgtcattcttatgcctttgcatcctcatagcttagctcccacttatgagtgagaacattcaatgtttggttttccattcctgacctggatgagattggagactattattctaagtgaagcatgtcttttcaattcatacattttctggaggtccaactgatctgcttaaaaactgacatgggaatcatttcaatgttagtcattccattttagcagagcagtagttgtattaaagtatcctcatatattttgaggtcctggagaactaataccaagaaaacaccttccaggagtgaggttcggaggagggagagagactggctctgatggctccccaaactgaaaaaaaaaaaaaagtctcttggtaaaaccaaactatgtgatcctctcttctacagggaaatgctgtcataatgtggtatttatagggaaaattaaattgcatgcacacctgccccccaagtctacctcacagataccaattggtagatattcatatcccaatttagaaatactggagacttcagttctttcttagtgaacaaccaaactagttgatgctaccaattctcttttcatgcatctctacccattttctggctttgaatgtcttattaaaatatccacatttgtgtttagatgtatgcattcttacataggagtttggcattggatacatcctcagtagccgatagtcaccgaaacctatttttaacagttaaataggaataataactacttcatgggattgttataaaattaatggagattgtgtttattgaagggctcagtgcaatgtttaacacaggctaagtattccataaacattggccattttgccatattaacttcttcacttggtgggattcattttcttctgataatttagcaaattcagttttgtatcactttatatctttttgtgacttaaataacaagtatttgaccaactccattaacaccactgaattcatttttgcctttcctcccctaacttatgtgaggttcccatcgtttgaaataaaatgcttgttctatagtaatatatggcaactcagtgacttctatgtttggagctggtgtatccattgtgccctggatgataaaattataccccgtataccttggtagcaaccttgcaaatgaactggagtattacatttcagacatattataaattgcaaatataaatatgtctgtgtaagtatatgtgtatgtattttgaatgcaacagctacaggtcgagcaaatgaggagagtaaatgctttatcagaagccatgttgcagatttattcacaatcagtagttttgttcagatgcagattcatgtgcatttcttactacactttctagtttataactcagtgctctgttttgattagcaggagggcatgtaactgagtatcagccatttagcttttggcttgtgaagccagggattctaaatattgtttatcatttttacatattttatatgttaacctcagagatgggttttattttgaaactttgcagctatctgcctaaacttactatgattttagtcccctacccctctcacttattatctgctgtttctattcatttgctaacattttgtctgaagtggataaccatccaggtcatccatttgctaaagcttatgactctcacatacctagcagccaaggttaatcacataatctcactcgctcacactttccactgaccttagctataatctatcaccagaccagatcctgcggttccagactatacagatggtgttactgcctttcttataacattgtaccttatagagttcttcagttgcaagcaacggaaactgatcctggctaaagctagcaaaacaggacattgttggcagaacataggtagttcagcacattgaaaatctagctgagaaagggttggaactgggcagctagggtgtctatgtatccaattgactgtcccatctgaaagctattccaggaattaatcgaccccaactttttttccccatccttgtgtagctcagctcaatacccaaagtcttgagagagacaacgtgatcattttaacttggatcacattcaaggcatcctgattgacagcctcactaagatcacacacagtgatggaaaagaggtgccccagcaggatgctgttgtctgtcaaaaagagtgaatggatggagaaaaaaaaatcaccacaagtactttatggtgttgtttatcttggtttgtaataataagtgatcattacaaaggacttggtcatcccaaaaaaaggatttaaaaaatcaacagggcaagaaagaaagggagagttattcctttactcccatgggaagatattgaagatcatgataataatattttcagtttactcatataggtagaattttatttgtagaatcttagcattacaaaagtgccaaagattataaatttccatgatcctctaatgccagggtggatcacctacattaagtcactgaggagctttaaaaaaaaaaaaaaaaaaagattctatgtaaattagttcaaccattgtggaagacactgtggcgattctccaaagatttagaaccagaaacaccatttgacccagcaatcccattactgggtatatacccaaaggtatataaatcattgtattataaagatacatgtatgcataggttcattgctacactattcacaatagcaaacacatggaatcaacccaaatgcccatcagtggtagaccggattttaaaaatgtggtacctatataccatgcaatattatgcagccataaaaaggaatgagatcatgtcctttgcagggacatggatgaagcttggactcattatcctcagcaaactaacacaggaacggaaaaccaaacacctcaggttctcacttataagtgagagctgaacaatgagaacacatgaactcagggagaagaaaaacacactggggcctattgggagggacctgtcgggagatgggggagagcatcaggaaaaatagctaatgcataccgggcttaatacttaggtggtgggttgataggtgcagcaaatcaccatggcacatatttacctatgtaacaaacctgcacatcctgcacatatacactggaacttaattttwaaaaaaaaaaggcatgaggaactttaaacggggaatggaaatgttctatatcttaactgtgttggtggttactggttacatgggtataataattatcaaaacccatcaaactgtacacttaaaatgcatacattctattgtatattatacctcaataaagctgatattaaaaaaaaacaaacaaaaaagagattccagagtaccattctcagaaataatgctttatttaaatctggagttcatctccaggagtgaatttgaagaactgccaagtggtaagtgaggtcttagatagaagggccatttgcctgggtctttcaatcatgaaaaatctcaaatttagatgcttgaccttatctctacctgaggttgtataccatcatagtataccaggatttaaagatgactgtatttacaccctttagtgttttatccatattgccgaaaatttttggcactaagaattaaatatttcttatatatctgttaattacctggtaaatggcatacctatgttgtttgtatcctattttgtgctaacagcattaatttgttcatgtaaaccttggaaattataccatgactttagtcaccctcttttgacatttattcaagcaagagacttggtctgtcttggcatctgggagcatacaacctgtgatgttaggtccagcacttasagtctttctagggatactatgtacagcctaaacagtgactctttggctgtatatttattttcactaccttttaaaagcattaaaaagagctgtcagtacttggaaaagtactgatgtttggccttgtctcagagcagttgaacctgaacttcaggggatgggccccaaatgtcaccatatttcaaggtctttccaggtgattcactgtgctgccaacttgaaacttaaattttttttwaaaaatgtgacataattttggataagtagaacaactgtcaggctctgtgctctgtctttggcagtgatatcagcaaagctattcatttttttaatggtgctttaaaaagctaacagtacttctttaacataaattatctatcatgttcaaagttccctgwttgccttatttttaatttttacaggtaaaatgtaggtatatatatttatgaggtacatgagatattttaatacaggcatacaatgcataataatcacatcgggataaatggggtgcccatctcctcaagcattcatcatttctttgcgttacaaaccttccaattatatccttttagctattttttaaagtacaataaattattgttgacagtaatcattctgttgtgctatcaaatactggctcttacttattttttctaattatatttttgtacccattaatccccactcctatccccactacccttcccagcctctggtaaccatcattctactctctgtctccatgagttcaattgtttgtctttctgtgcctggcttattttacttaacataatgtactctagttccatccatgttgttgcaaatgacagaatttcattcttttttatggctgaatagtattttattgtgtataggtaccatgttttctttattcatctgttgatggacacttaggctgcttccaaatctttgatactgttaatagtgctgaaataaacatgggagtccagatagctctttgatgtactgatttcctttctttggggatatacctgctaggtagagctggattatatagtagctctatttttagttttttgaggaatctacatactgttctacctagtggttgtactaatttacatccccaccaacagcataagaggcttgccttttctctacttcctcagtggcatttgttattgcctgtctggataaaaaccattataactggtttttattttaactggggtgagatgatatctcattgtagtttggatttgcatttctcagatgatcaatgacattgagcacttttatatatgcctatttgtcatttgtatgtcttctttggagaaatgtctattcagaactcttgtcaatttttaaaatcaaattattagatttttttcccattgagttgtttgagctccttatatgttctggttattaatctcatgttggatagatagtttgcaaatattttctcccattatgttggttgtctcttcactttgttgattgtaaaaaaaaactattcttgaagcttaatagtaccactcatgtcaaatgttagcaaactcctaatcatctgtaagtacctagcacatgtatcaccttcaccatgcagcattccttgacctattcaggcaaaaagttattatcctgtcttttatgccaggaattacccatgaagttctgttacaagtacagatacatgaccccaaacccagtgtttcagaagctccatgggtgccctttctgagattctgtgatttttagcaaagtccttagatgagtcttatgtacagcagtttcaggaaacattactctatgccctcatggtatgtgtgcatacttctgttgttgcacattcactcaattatagttacttatttacctgtcaaatgtatctactaaaccatgagcctcttgaaagtaaggatattatcttaattttaactctcaagtccaatcataatgccctcttaatagaagtttttgcaccaaatgaatgaatatgaacaaatctccccaaatcagccaaatttcctttaatgattcatgatttctcataggaacacatgaatttaagaaaacaaaattataaagattaagttatttctttttttccctttgttttctacttaatatataagacttaaagaatttaagccttcttttcattgttacatttatatttttgtgtacctacatcaggcactattagaaactagaaatataataataatagctaatatttattgaaattttaccatcttccaggaacagtatcaaggacttcacatgcattaagtcatttcatcctcccaactaacctataagacaaataggtattaacattatccctcgttgtataaatgaggaaaccaaggcacagacagagtagataatatatttaagccaaacacctaggaagcagcagagccagtgtttaaacccaggcagtctgcatccaaagacagctcatgcccgtaacaatgtttcctgcctctgaatgttgaataaacatagtccccagtcttaaagcctcatgggagagacagacagtctcaaaaagtatttgcataaagtgttaagggtttatagggtaagggaaacgattatatgaacacagcatggcaagttttaaattttgccttgagaggagtaggggaaaaatatgaatgaagagaacttggcttagccacacaaccctgtggtctcatgagtgcatgcctttgcttatgctaccacttcattaggaatccctttacagagaaggtgattgggttgaacatgaaaggtgattagtgggatttcgccttgaggaaaagaagagaacgcaagggcattcctaatgaagtggtagcataagcaaaagcatggactcatgagaacacagggttgcatggctaagccaagttcacttacagcggctccaaagaaggaagtggtagatggtgagatgtgaaaggacagtggtgagaaaggtgcatatggccgttagatctctcacagaaagtctaagtgatttgagcaacaagagaatgtattgcctcatcaagcagtcacaaaatagggctggccccaggtatataaggctttaaaccatatgtttagttaggcaccttgtgtctttcttctggcctctcaacttggcttctgtcccattggctctgttctctggctgcagctccaagcctcaatcatctcattacacaaagcaccaagctcagcgactgagacagtccacttctccaacagttccagaaaaaacaggaaatgaatttcattgaccagatttcagtcacgtgctggtccctgttgatcctgatccaatcactagagggcagactgcacagatgtctaaaccacatattcaggctttggaaattatgaagtaggcgcaaagcacatgcaggtagaataatgaagagatagaccccaaagtagaattggggtgctgttgtcacaagaagagagcataaatgctgtgcagaaatataacaaatatccactgaagttgaagttcacattttgagagatcctgaatgttgtctgtaaactaaccaaggcatctgcctcatattatggaatttttccctaaacgtttagtaatgagctttgtctgattactgaccttgtgtagatctctggttccttggggctgaaactgaagagcaggttgctgtctttccttcagttgtgaggatgttcaacataaaacaagatgcaggattgagccttgactttggctttcttgagaaacaccctctcaggctttctctgctgagtattttttaaagctgtctaaacggatacccccacccctaccccaaccacccaattcccgtcctattggcagccactttagaagggaagtgtgtgagatgggaattgtttagatggaaacaatccttctgtaatggcttyggcctcctctggcatgaattgagcatttacagtagtgaagccatgttttatttatgttatttcctcaagacctctggttagcttctcaatttgcaatgcaaattagacatagaaaagattttatatactctacatacaattctccatacatccacattcagtgacaaattgtaatctttcggcctaacagttctagtgtaattttagataataaaaatattcaccacttacagttctagcttatgctaatagacccacagtcatcagagatgctgagactaagcaacagacttgggrctcagaaaagtaacactattgattgcactgccttttgaaaatgaaacttgcaatgaaagactctaacttacaccccagaacttggaaggaggagcaattaccatgaattcaagcatcacttggcatgtgagctcttgctgttgtcctatcatactccaagcagtggtggggggacagggggaagacagatatcagagccacctttgaaagatgggaaaaaaagacttgtctctcttcatctggtactgcttcaagttgattgctgaagtgtgcacaggggtagttgggctatactcgctactagctaattgtatgtccttttgtgtaaagctgttgcttaagcggctacagcgttaaaagggaacacagggataaagagattttagataaatcattttatagaatccacatgactaacggctggcttggctcaaaaactaaattgtgaattagaatcgatagcccaaatgtaacaaatctcactcagcctctggtcacacttcagtctctgcacaatcccaatatttgtctttataaggtaagagttgccagcagctgacgacacactgaccattaggcaggggtccatagtaacacctggctattagaaagatctgacacgtgtctcagctcattcttggaaacaatggttcttcttgcataccatcagtaacattctttctcaaatcgaattgccttacacaatgattttctgtcttcaaaaattagacttatgtgcacacaatataaaactatgttatccctgatgacaaggctgaaaatgctttcccccactgtcctctaaactttaggaaaacaaattgctatttttatttcctattgcctctccagtgggtgcaccctgggcacacagcccttaaaaaacatcatcagcagctgctatagcagcacaactttagcttcttgttacgaaaagcctctgggttgcagtggggagcaaggtagtcaatatatcggacttggacagtgcccaaacaactattacaattcagaccatgatttctggcccaattctggaaaagtatttgctttccaagataaaaatctgtttggcagaaaagaaatgtttgttttaaaataaaatccatttggttaataattatccacccagttttaggttgctttcctcatttctgtaaataaattttcctayattgcctctcccagtgattgatgaaaagtggacttaaattttgaggaaggaacctgaagaacatatccaagtcctcactaccctgtttggtaatagttgcatctaatgtcttctatttttcttcctgaattaactagatagtatagtgtgtaggragtacaaagcaggtattcatcaggagttacagagatttaacatgggtcattaaagtgctgtatgttggcctaatttgaaaaataattccccaactatggctaacgtatactagaagtcagtttgtctatctgtgtaaatgaggkttttgcaaatcttaagttagaacatatttgtcaaagagtcaacacagtaagttacaagagggcatctttggttaaataacagaagctgatctaatcactaatttgccataccttttcaatgaaaacaaactattagactcctctgagagaccagatcagacattcgttttcttcttccctattatctagatgcccttttttcatcacagtatttctttacctttaataaattgttttaaaggttgaggactaccaagggtggaggaagggcagggaagcaaggttgcaaatgaattttactgataaaatcagccttttcaggtgctatcaacttgaaataaatagagctcttataccacctacacagtcttcccgctcctgtgagtattcttcctttttttttctctttaaatcatgggacacaattctgctttctcaggagatatattgaatttcaatcaaactatataaaacccagccaaagaaaatctggtacaggtcaaccactgtaataatgtggaaaggctaagaatgctgctgttatttaatcttgtgatttctctgaacctttcaaatcgtttggcgtttccttgggttgcataatctaataatgaaaacaaaataaggttgtgggatctaccttttctttctttctctctctgatctaaagcttgaaaatctcttttcaatctcttcccttcaattaatgaaatagtttcccaccccactcccatcctgcctggagacacaattgccatggttacctggataccttttctcaaagaatatatgtagtggcaatcggcaatttagacgtctcagcgtattgcacttaggagcagtaatgagaccattatggaactacttgtagtgaaaatactattgatgttacagtctgagattaaaactttaatttgtattcatttactcctttaaagagataaggatgaggaggctggtctctgtagctaaatagcaagttactgacaggaaatgtcatccacttgagacaaggtgttggggctgcctctccttgaacacatgtcaatgaggctgaaagaatagacagaatcacccaccaatccaatacaaagttagcagtaaaaggccagtgtgaagaagggcgtattttgggagcaagtgttcctcaatagtgaatccatgtgaaggatcacggaaagagatacgaagggatattgtcttcattttatctgaaaacagtgcttgtttcagtaagctggatttggatcctctcatataactccttacagattttctctggggaaagaatacttctctctgagcttatgcctttctgctataaaaaaaaaaaatgagtgcctctctaaaccaggggtcttaacatcaagtccattctaaagagttgaaagatggttggcaagtaatttcaactactgataatcaaaaggcccaaatgtgccaagattgcaatttaaagaaaacacattaaaatggagtcaagattaaccctgtaatgtcatttactttcttacaacctyatgggctgaatgggagagaaaagggtttagttacagcaagaatgttgataaattcaattaactatgagtactgaagctaaaagtactgcttattaccatggctcaacattatgtccctgattactttttgagtatgcatttttctgtgaattagtacaaggcctttgattaaatgaaactgatctcttggaaaggcaaacaggaaacacactaaatttcccattcacattcccaaacaatgtaattttgagtgacttaataaagaaataaaactcagttcaatcagaatctctggattgcaattccataccctgtactaaaaacatgtgtggatgggtcagaattagaaatttatcaaagtgtgaaaatactagattaaaattatggatttgggccgggcgtagtagttcacgcctgtaatcccagcactttgggaggcccaggtgggcggatcacgagttcaggagatcgagaccatcctggctaacacggtgaaaccctgtctctactaagtacaaaaaaaattagtcaggcgtggtggcgggcacctgtagtcccagctactcgggagactgaggcagtagaatggtgtgaacctgggaggtggagcttgcagtgagccaagatcatgccactgcattccagcctgggtgacagagtgagactccatctcaaaaaaaaaaaaactatggattcacatttattacctaagaataaagaaatgccatgatttagaatttcacataggagaacatagaaatattcataaatttaaagtttttaacatatatcatactaatacttgtaatctaaaggacaaagaagatgggagaaacaggagttctcatgcattattggtgggaatggagttactccattctttctagtgtataacttgataatatgtataaaaatgcatatttttcttctacacagacattgtatttctaagcatttatcctaaagaagtaattgcacaagtgcaactaaaaagtgaaagaagaaagacacatcacagcatcatttgttataatttgcacaaaactgtagacatcttcaactgcttctgtccttgaacttgacttatttctgacggtataagaaaagaacatttgttttgagaaatatttgaaaagacatccaccaaattgttaacatggttatttttggtgggaggaatctagatgatttttaatttcttctttatacctctctttttcactaattgtattagttttacaatcaggcaacaatttagctgttaagggttaaatcatgttctctccaaaatatgttaaagtcctaactcatagcacctcagaatgtcatcttatttgaaaagagtctttgcgcatgtaatctgaaaaatcaagttaaaatgagatcattctgaattagagtgggccctgatccaatataactgttgtactcataagagagacactcaggaagaagatggccatgcaactggggaggcggagaccggagtgaggcatctacaagccaaagaatgccaagattggcagcaaacaccaaaagctggaagaagcaataaaaggttctcctctacaggtttcagagggtggttgcccctgccaacaccttgatttcagacttctagtccccagaactgtgaaagaataaatgcctgtcatttaagacacctagtttgtgactttgttatggcagccctaagaaaccaacacaaaagctattttaatttggggaggaaatttcatttactatacagatgcaataaaaagtctcttcattctgctatgccacacatggactagcaaactcctctattaactgttctgcatccaatatagtaatctgaaattgaattaattgctcatagaaaaaggaagtggaaaggttctatcaggtgggcacaaaagtaattgcaccaacctaatgttttttagtttttctacagatgacataaatgctgatgtggttctgaacacacccctargcaacagaagcrtcatttttcaagggccccaaagactcctccttctctgaaccatcacaagtattatgaattatccagagatctgtctkattgatggactaccttaaagaatttcaggccggtttgtcataattttcatgttttccctcaaccatattaaatgtgactataacaatgagctgaaaggaaaattaggtcccaagtgttttggtattttttcagtatcgaaggtcaaccacatagcagttagmcagaatgcattgtgaacagacatatggcatttgttggggagaagaaagggtgggaggaggagtgtcctgttttccagctgccttccaaagtcaggcttgattgctataaaatcttattgcatttcatgtagcctcataatcattttctttctaaaatggcctttggtaatcttgagaacaaagaagacaagtctccaggaaactcattccttctgattgtgctaggtcttcagcaatgtaaaatcgaggctctaaatgcaccagcggtggacaaatgtcctagtccagtactaaagtctgaacactagggcaaagaactattcaacaaggaatacttccaggagaaggctacggcttatggaaaatatactaggctgaaatcactcatattctctttagagtaactacactgatactaatttaataaaatcatacctgtttggatgctcatatgatagagaattcagtggaacacagacaactgtggatgcatggggaggatatgtatgcacctagtgtgatttggaagataactaaggggccaaggattagtcaagcacttgggcagtttcaaatgacggaaacccaattctatcaagtttatacgaagaaaaggaaaagggattttgttgggaaatcaaagggtagaggtggcattcagtctctaagggctcattaaatatgtgtcactgtgctccctttttagatatgttctccttgggcagtagccttatgtttttttttttttcccctagcaaatgttcttccatctggacttcttccatctggccagaacaagtaggtataactcctgackggcattcttatggctcacaatccaaaatgaaagcaaaaaagggagaaaaattctcctttctctgtgtccatatataaatattccagagaagttctctgttggatttggaatagatgttcacatttgaatcaactatcctggccaagtagatgtggcgcttcaatcatccaggcctgaatctgcagccaggagggcagggctctgagacttgtagctctattaagacaaagtggagtggaaagatcaacatggagttctgctatccagagaaasaagaaaatgatgcaagaaagacagacagtagatgcccactagaatacttttgttcaccaaatgctaactcatctcttcttgacctagacttccatggcacttgaaatctttgttttactcttttaggttacaactgccatacattatataaaaaataggtgtaggtagatagatactatgtaaatattcaaagattacaaatggctcaaaccttgcagagctgacaaaaagcaatgacaagccaaactctataaacaagtaaataaaacttgattgcaaaataaaacttgtacatgagctgagctttaaattaaggaacagttaggtatataatgttgggaagtataagaacagcttattttttaaaagcaagctatacataaatataaagctaccttgaaaaaaatgtcaaaaaggcaactcactaatttggggataaaatacaaataccaaatgcatwgttacaatttttcctattcaagcaggaatactatgtttgaccattcaaaaatgtttcctctatgaagcaggaggtccagttcacctcataaatagatatagtcagtgttgcattttccccttaaagtggagcctaggccaccaaaaagtttgtcttttagaaaaaacatttatgaagaattatgaatgacttacaaaacaaaagttgtgaatttgtagcagtgtgactcttagagatggaggatttaccatttaagcratggcaaaagttgaagcctaagcttgacttctgctcatcaccctctttcccactygcaggaccttgaacgtgacttgcatgtgctcagggtctcacagtttgcctcagactaagattacatcataaagatctcattccccagaccctctggtaccctgaggtagaagtatttatttttattttctccttttaggtatcaacttttaagggaaaattccaggtgataaagctgtatttccaattgggaatcaaataatcttcacacccttttaaccagggcctcagttggaaccacctggagcctggacagactcattgatgagacaggaaagattcaggagcctacttcataaaaaataaagttgctaagacaagggagttaattttccaatattcacatgtgtattgtctacttaaaggcccatatctgattgcctgagyttaggagttcgagaccagcctgggcaacatggtgaaaccctgtctctactaaaatacaaaaaattagccaggtgtggcagcatgcgcctgtagtcccagctactcaggaggctgaggcaggagaatcgcttgaacctgggaggtggaggttgcagtgagctgagatcacaccactgcactccatgcactccatcactccatcctggacaacagagggagactctgtctccaaaaaaaaaaaaaaaaaaaaaaaaaaaaggctattatctaaccagtagttttccaatttttgaaaaattagaacataaaaatgatcaaccaaaattgcttcatccagacaatctctgtcaacattttgatatgtcattcaagattttaattcctatgtaaacatgaaatgtaaatatattttttcacaggagtaattttataacaaatactttattacctgatttttaaaatgcaatgtaactttttaaatttaaattagtatttctttaactttaattattttttacatagaaaaactgaacccacagacttagagatataattgctaggtcaaagagtttgcagaatcttttgggcttaggttgttgggcaaattgccatccagaaatgtgtaagacttctcattttctctcatgtcaaccagggaatcagtacattttagaatttctgaccatttggggtgggagttaatatcatcaccatgcattttctctttaaagacacatttttttccacatttaatatatctgaaatcagagtacatcttgcaatagatagtgagtttatattgtgctataatttaatgaacaggattttttcttttttgatagcacttcaagtttaataacagcataccctataatcaatagtgtgttggaatccatgaaatacggtacctcaatctaagcaattttacgttttggcccagtaaaatttttcctttccacccacaagcttctgggaccagttgcccttgctaactgcttacagagtgctcaaagtatgtaaattcaattcaacttttgttcaagtctctctgcatatggctcagggaatacaaagacgaacatgacagtgctgagaaaaacttaattaggaaggtcactgcataaaaaccatgtaatgaattttctttcaaaacctttgtggaacaaggcagaatataaataaataaaaacattgtacatacagaagccaaacagacataaatttcagatcatctgtcccacacattccctctattgttgcagataaccaagagctgtaccgagcgacctgcagctccttgaagacatcctgttctctaagcctccgtgaaggtgtaactgcggctcactctagctcaaaggatgtctcctttcctcacgcttttacatggccaacccctgctcagccttcaaatctcagagcagaggccacctcccttggcaagttgttctgactccatctttctctttctctgccttctgtcaaaagcccctcctctctgtggacccacagttcttccacagtacttagtatttaagtaaccccttaataacacatatcaaagtaacccactgacagactgtgaggagtgtggaggtagcgtgacataaagtgcaaaagcaagactgccctggccccatcccagctctgccacttactacctatctatctgtggggaagttactagtaaccccccyttttttttttttctgagacggagtctcactctgtcacccaggctggagtgcaatggtatgatctcggctcactgcaagttctgcctccctggttcaatcgattctcctgcttcagcctcccaaatagttaggattacaggcaggcgccaccacgcccagctaattttgtatttttagtagagacggggtttcaccatgttagccaggctgatttcgaactgccgacctcaggtcatccgcccgccttggcttcccaaagtgctgggattacagacdtgagcaaccacacctagcctagtaaccacttttaaatctcaattgttttatccacaaatggaattttatactgtctagttcgaagaatgatttggaggactttaataaagtatatgaagcatttagtacagggactgtccattagacagcattgaagaaaaaaaaaaaaaaaawccctggctcactggtttgtctcccacaacagaacaaggacctcgggagggcttagagtatgtcttttatttctatgatccccagttacctggcaaggagtaaattctcagtacaggtgtgttagagtattaacatagaaaaaccaagcccacagccgtaggggctaaacgaaatgaaatgacaggcttctttttttggctcagagagagctttagtgctttgtgcatgtcctcttactatctctctgtacagagaggttctgtttgtttgagcctagtgatgtgaaaagcaatcaaaacgactgtaaaaatctcaatagacatgtcttgttttttcttttttttttttttgagaaaccatccttcataactgtctagggttttttttttttttctyttcctgcttacaaggagtcttaatgctgataacaaaaagaaggtaacataggtattagcaaccactgcattaatttatttcatttacttcttatgcccactcagagggggagtgggatgatcatttaggcatcttcttaggcagcatgaatgaccaggacaaagtgtaataatggatgggcacaatgattgtatcaaatgactccactgcttacagcaggaaatctttgctttcttgaaacaaaggatagggctaaactctcaaaagataagatactgagacacatcaggaagttaccctaccccaaaatgtcaacatatgtggctctgctgatgcctaaactgatggcagcagagcttactttcctgatacattattccttgttggaatgccattctatttgactgtagtaacagcaacagctgtagctcccatgtactgaatacctccaatctgccaggtacaaatatgctccatcatttaattttccaagcaatcctaggaagtaggtatattccccatwatatagataaggaaaatgagtcttagaagtggcataacttgcctaagttgctgggaaagatgagaactgggaatcaaacccagctctatctgagtccaagcatatgcagacctcaraagttaggtctcagattggcacagctttaagacatgctccctcctctagccatgttttctactacccttttccaaactttacactgaagacatatcaaacttcttttagtttctccaacatactatgagaactttttttctcttttcttgccctctttactttcwatcctcctttacctggctcacactttcaggcctcagataaaatgccacttcagggaatatatttcctgacagcctaccaccatccccacatattgctgggtggccttgctaagtgctcccagagctacttggcattcccccatattggcatggattacatggcataattactcttagatcattgtctgtgtccttcattagacagtgtcatagtccattcaggcagctataataaaatatcataagctgagtaccttataaacaacaaaaatttatttcccctagttctggaagctggaaagtccaaggttaaagtgctggtaaacttggagtctggtgagggcctgtgttctggctcatagacagtgccttctagctgtacctcacatgatggaaggaatgaggatctatctggagcctattacataatggcactaattccatttgtgagggctctgccctcatgatctagtcacctctcaaaggccccagttcgtaatatcatcaccttgcaggttaggatttcaacatatgaattttgagaggcacagatagattttaagtactttgaggactggatctaagtctgtctgatttactgttgaatcttcaatgcctagaaactaatataagttcaatacataattgtagggaaaataaataaatgcataaattaatcaatggtaactgatggagtatgaatgctttgcagtagaaragtgataatttcccatctttttttccataccaaaggcaaattctatcttctccatcattctacattcagattacccctccttatttacagacattatcagctggtgatctggaagaacgtgctctatgttgttagaataatagtccttgttcacctcagcaacacctttcaatcaaaaaaaaaaagagtttggtctctgatttctctttcagctttgaggaaattggatgcaactttcaaatatttagttttaaattttaggctacagctaaacctagaaaagctacaggtatatttgttgaggccaaagtctccccaggcaccaaacacgttctttttttttttttttttttttttttttttcttatgaaaaactacctcttctaactctaggacacctcagaayttccktttgtccaaccccatcaaaaagtgggcgaaggacatgaacagacacttctcaaaagaagacatttatgcagccaaaaaacacatgaaaaaatgcttatcatcactggccatcagagaaatgcaaatcaaaaccacaatgagatatcatctcacaccagttagaatggcaatcattaaaaagtcaggaaacaacaggtgctggagaggatgtggagaaataggaacacttttacactgttggtgggactgtaaactagttcaaccattgtggaagtcagtgtggcgattcctcagggatctagaactagaaataccatttgacccagccatcccattactgggtatatacccaaatgactgtaaatcatgctgctataaagacacatgcacacatatatttattgcagcattattcacaatagcaaagacttggaaccaacccaaatgtccaagaatgatagactygattaagaaaatgtggcacatatacaccatggaatactatgcagccataaaaaacgatgagytcatgtcctttgtagtgacatggatgaaattggaaatcatcattctcagtaaactatcacaagaacaaaaaaccaaacaccgcatgttctcactcataggtgggaattgaacaatgagaccacatggacacaggaaggggaacatcacactctggggactgttgtggggtggggggagggggagggatagcattgggagatacacctaatgctagatgacaagttagtgggtgcagtgcaccagcatggcacatgtatacatatgtaacgaacctgcacaatgtgcacatgtaccctaaaacttaaagtataataataaaagaaaaaaaaaacttaaaaaaaaaaaagaacttccgtttgtcacgataggtcacatgttcttaaatgggtctcattttgcttctctctggaagcttggtaatctccctgaagtagaaatttcagaataaagtgaggtggcccttaatggtatcccaagtgtggttgataataggttttatttttttctcttgtttttttctcaagaatcaggtgtcatagacaaaatacttatctgagagagaatgggaataaaaactccctaataatcattttcaaaatcttttgattttttaaagaaataattaaggtgcagctttgacctgctctgtaatcagaggattgggttccctggatacagactttgtgctattctacttaaccaaagagcaacttgggcgtttatccaggatattcctcaaggatctaatatgttaattgaaaaaaaatcttaggaaataactttacaaccaaaaaattcatctggttggaaacacatgggattattttccaatccctgttacttgaaatctcagctgctgaagcaaaggatattaaaaatatatataagaatttctcaaagagcaaacagaattagttacaattccaaggttgaatacaaccagctttaattaaaacagcatatgatataattcccacgtgaatattttagcatgcttagtgctggtacaggtaaagaaacagtttcctgggctgtccttccagattctcaaagcttctttgatacctccacagctgtaatatctctgctagatatagctttctcctctgcccccttgctcaaggaagtcttcttgatctacttcagcatttgatatctctctgcatatactrggtggttagttttccttttctcactgctctttgaccttgtttatcatgatcacaaatgggatgtatataaagaagaagaaagctaggagaagattcagccacctgggccactagagtcttcagtctcttcatggaatctattgtccaaagatctgtttgttagtctgttctcatgctgctaataaagacatacccaacactttgtaaaggaaatataatttataaaggaaagaagtttagtggactcacagttccacatggctggggaggcctcacagtcatggcagaaggcaaaggagaagcaaaggcctgtcttacgtggcagcagacaagaaaaagtgccaagcaaaaaggggaaaagctccttttaaaaccatgagacctcctgagaactcactatcacaagaacagcagtataggggtaaccacacccatgatttaattacctcccactgggaccctcccacgacatgtggggattatgggaactaccattcaagatgagatttgggtggggacacagccaaaccatatcaatttaatatctttggtaattcaaattatcctttcaaaccaggatagaaagctgagggacaggctgataccttgataaaccttaaatacaataggccttgaattcaagaatcccagttccctggagatgactttgacctaatttaaggaaaacaaacaaataaaagggagtgatgtttgtaaatagttactgaatgaatgggtgggccaatctaaacgattcagttcaaacatactaaggaaggttcaaagagtttgaaattctcctggtgtttcaggaagaataacaggaaatatttcagattattgctgatgaccagacatggatatgctgctggaggttgggggaatccattcactcacacatgtgcatgcatccacacatatgccatgcgtgcactcacacacaattctcttytaaattagtcttctacattatataggaaagtaacttctttattaattgttaagagaattaagaagtgttttccatttatagtcaactcactgtaaactatgttatggaaagaaaaagctaaggtggggctaattagaacacatagatatttctcaaacctcactttggacaatttcagtcctttctaccacccacccaacttatccccaggtttttcccatacctgctaataagaagctaaargtgacttcaattttattcccagtgcctcttgtttaccctcgactagagttgctaggaataatgaaatgcctcaaaagccaagaaggaaggaagatgacatctgagtaaatctcgataagcaaacagtcaacccttgaatctttgaattggtgctatagggtrcccttgactggggttaagttgatcaaaacagcactgcccatttagaaagaagagattattgagagagggtgctatttccggacagttccaagaaggcctattgtgagctagcagtcaagaaattttgtctcaaagctgcagggaggtcagcaatcttcttacctccatttcccattgtgtagcagaagaataacaagcagattggatctgcactcagaaacactaagatgggaaacatcttaaacctaaaacattttcatcacattaccacttgccaatgtattattgcggaaggttctggcttgcgttacagagatatcactttctcctcctttcaactatagttgagcatagaagagctcaactatagaagtatagagtatagaactatagagtatagaagagcactaaaaaaaaaattatctttggcacaatagcaaacaaaatwttcaggcaactagctggaacaccagtgagaatttacattcactggacacgtgaggggatctttattataatatggtgagcaattaagcttttgcaagttaaaagtaatamcatgtggtatttgctaagcattctcctggatgtttagctatttccaagagactagtctctgcattccaaaaagagaaaggtggaatgagaatacataaaaaagaaattttagacataaaattctaatatcgacaaagagaaatgagcttaggcttcaacaagaatgagagcatcagggttcaagagaaaccacaatgtcaatgagtcccaggtacaagctttttcttctgcatttttaattcatattcccttatcctctgagttgacacttcatgtccacctaaccccactgccctttttgtgaatggtggagagaaaagattaccaccttaacctgggaagcctgttcaaaacaggctagtcaattctccctgaattgtagaactgtgatcattgcctctctcttcccatccagaccactgggccattgccacaatccctccagggcctctcttctttcccccaagaaagaattataaattgaaaagtcatcccacaaataaagacccagaggggttagtgttatttagagctacaaaaaatgctatttttctccagcactccacatgaccagccacatggactttttatctaatcctgagcaagccaagcttattcctcccttgacacatctgtccttgttgttccttctgcctgtgctgctgtccctccagagagacccttgcttgactggatcctcactgaccagctctcagtataagcaaccactcctctgaaaatccttctggactattcaatctaaagcggccctccattccactctttctatcacataaccctgatttattttcttcataatagtgccactatcagaaaatgttcatctattggtttatgcgtttctagtctgtcttctgcctacagaacataaattctgtgagaccagggaccgatttctaatctgtatccccagaatcaaggataataactggcagatcacaggcatttatatcattgtttaatttgtaaaattgtgggagttcttactatgtattaggccctctttasttatattatcttaattctaaccccaaacctgtaatatacatactaccttattttacagataaaagagcagaggcttagagatatcaaataactcttgtaaatggcaagccaagatataaaccctagtagtctatctccagagcccacacgcaaaactgctgcttattttatttatacaatgtaatatagagatcttttttttgaagtttgagcttgtgttgaattctttttttaaataataaaattaagcccatttttttcctgtaggacttctcataacttttactatgctaatgtaccccatgattgaccaagataagtatattatatccatcatttcccaatcaatttttttctttttttctttttgccatggactcttctttttcatggagtctattgacatttcttttacctatgctcctcctgacatttctttggaaagtgttctcacatttggtgcatgttttctaaaactatatcagaaccatagaaccactgctgacttgttcgttcaacagatgttttttgaatgtctattacatgccaggcacatttctagaaactgtgaaatgatatgtcactgaacaaaagtccccacccattttgagttacgttctagagaaggaggagacagatgacaaacattaaggataggaaataagtaaatcatatagtagaaagtaatatgctgtgaaaagaacagaaatgtgggaatgagtgagagggatgtggaagaagagagaggtaggcgggcagtggggacacacagatgggaaggatagggtttgcaattataaatacagggtgggcgtcattgagaaggtgatatctgagcaaagacttgaaggaagtgagagaattagtcacttggatatttgaagaaagaggatttcaggaaaagaaaatagccaatgcaaaggctccaaaaagccagtatcatgttttccggaagcattaaggatgccagcaaggctggaaaggagtaagaggcagtgtagtgaaagatgagtgaattgaagaaggtggcaagacagactatgaagagtattgtaagtcactgaaaagcctttggctttttccctaagcaaaatgggaagccaccagaatgttttgagtagaaaactgatatgatcagcttcatttttcaaaatgatctttctggctacgatgctgagtatagtataccagggtttaaggatcactctgggtgccatgttgagtatggaatatgagagatcaaagttagaagtagtaaaaccagttgcaatagtcctgtgaaagatggtatttctcagactaggatggtagcagtgaccgtggtaagaaggcacagggttctgattcatttttaaagtaaaaccagcagaatttcctgatggtatgagagagaatgaagagaattaagaataactygattttttttttggtctgagcatctgagcagataaattaatatcaatcaagatggaaaaagcctataggtggaagaggccccaggtgggaacagttcagttttgggtatggtgacttagaggtgtcctttagatttccaagtggagatggcatgtagagagttggagtttgggggagagatctgatctaaaaaaatatatatataaacctaaaaagggccaataaatggatgggatttaaaatcatgaaaatcgatgaaatcaccaaaggaataagtgcaaaggttcagaagaaaaactgtcacaggagctgagcttgaggcacaagtaaaaaargacatgttcctcaggaaaccaaccccaagccttgactgatatgtggaagcacagcagatagtgcgatgaattatacatttcagctttggggacttgaaggtggtcaggtgtggtggctcaggcctgtaatcccagcactttgggaggccaaggcgggtggatcacgaggtcaggagttggagaccagcctggccaacatggtgaaaccccgtctctactaaaaatacaaaaattagccaggcatggtggcaggtgcctgtaatcccggctactcagggaayaggagagagtaggcaggagaatcgcttgaacccaggaggcagaggttgcagtcagccgagatcacaccactgcactccagcctgggtgacagagtgagactccatctaaaaaaaaaaaaaaagaagaaagtatggctacaaggtctcatcttctgatccayataatggctgcctggagttctgtctgaggaagattctgagaccatgtctagggttagtggggaagaaagttgcagtcatttagtgatgtgtgctagagttgtgacaggtgtaacagcatgcaggcagcatcagatatccaccactccttgcctgcaggaaagrccacaagcytaaggatagatggcaagcggtgtttagagagttcactgaatgcttttacttgccgcaagttaatctgcgtggtttatatcaatagtactatataatctgttgctgaagttatcttatatgtgcaagaaagattttattgctctagagccactagcaagtgttggacttaagtgtgtgaaaggggaaaatgaaggaagaagagagagacgagtcaaaacccaaggcaaagagtggacttttagctatgactctaggaggaggttgggtaaatcctcttcccaaaatgcaatgatagagctgtgcaaagttggaaacttcaactatttgtgctctggaaatcagccaaaggcctatgacaacctgagacgtgtttattttttaaaaatcatgggacatcactcaggaacactgggaatctgagatgttctgacctagggctcctctcatccacctcaacccagcctataggttctgccaaggtacagcaagccatgatgaccagtagcttctctgtagatgttgaaggagactcaaccagtttgaagagctgggcagtgcagacaccaagcaaagttgtcaatagaaatgatcatcttggatgggagtgagttgggagggccatcagctccatcagcctgaagttgcagttgtgatcagagacagcatattgctggctgaggctgtgcatatgggcagtggagactgaagagacagaagccctttatatgcttctggtttacccaaagtctcaatgcatgtgcataggagactcaaaaaggtccagcagatatcagactcaggggagcttgaaaagagcctgaactttgtatatgctcctctacctgaaaataggtgaaaaagggcaaaggatggaaatcttagtggtttaaggtgtttgaacataaatgatgttcaatcattagctgaccactaaggctatacagacacaggagcaacctctagcaagccaagtttaaaaataaaatcggagcctgtggtcccagctactcaggaggctgaggcaggagaatggcataaayccgagaggcggagcttgcagtgagctgacattgcaccactgcactgcctgggtgacacagcaagactccgtctcgaaaacaaaaaaaaagtaaataaataaataaataaataaaatcaggaatgtatatatattttagactagcataggcattagtagcctaggggaaacagatttcacagatttagtccaggaaagttacaaacaaaataccagcaacaaccaccataaagggaaaaaaaatatcagaattcagagtcgttgcaatgtgttatcttaaatgtcccatttttaagaaaaaaaagtgtkacccatactcaagaaaagaaaaacagttaatagaaactctgtgttaccaaatattcgtggacaaaaatttcaaggcrgctattataaatatttccaaagaactaaagcaagccatgtttaaagaattaaagaaaagtggggtaacaagagatcaacaaatagattcttaataaggatattgaatttattttwaaaataccaggtgaaaattctgtagctgaagggtacaataatggtaatttaaaatttttcactagagagttcaacaacagatttgagagacaaggaatcagtgaactataaatcaatagaaattactcaatctagagaatggtgagaaaacagactgcagtaaaattaacaggccctcaaaaacctgtgggacaagctcaagcacagaaacaaccatgtcaggggaatgtcggaaggagagaagagaaagggacagaaaacctatttgaaaaaataatggccaaaacttccaaaatttgattttttagaaaattaatctatacacccaagaagctcaaagaaacccaagcaggataaatacaaatagatccacacttgaacacatcattgtcaaactgttgtatgccaaatccaaagagaaaatcttgaaagcagcaagaagaatagcacgcaccatagaaaggtgagcatccatgcaattaagctggcttctcatctaaaaccatggatgccagaaggaagaagaatagcacatccatactgcaaaaagaaaataatgtcaaacaagaattctgtatctaacaaaactatccttcaaaaatgrgggcaaaataaggacatttttggataaacagagactgagcaaatgtattgctagcagccctgttttaaaagatgtaccaaaggaaggaaggccttccggaaatggtactctatgatagcacaaatccacaggaaaaaatgaagagcactgtaaatgataactatgttagtataaaagattccataaaatatattttttctcctttttcccaatttctttaaaagacataggactgtgtgaaacaataattttaacactgtagtgttgggtttgtaacatgtatagatttaatatataggacagtaatagcacaaaggagggaagagggaatggcagtatattggagcaaacttcttgtattttctggagttaaattactgttaaccaaaagaagatcatgatacattaaaacgcatatggtgaaccaacccaaatgcccatcagtgatagactggataaagaaaatgtagcacatatacaccgtggaatactatgcagccataaaaaaggatgagttgatgtcctttgcagggacatggatgaagctggaaaccatcattctcagcaaactaacacattctttttgctccttgtgatttttagtaaagagggaaataaaaatctataacaagcaggatggcctacataattctggacacaaagcaaaatgaaaagttatggtcccttattcaaaaagtatttcaaatttcaggatggtgaaagcwgatcataaacctaaacaaggaggcccttctgaccacagggtcctgtgtgactgcacaagttgttcatctatgaagctggccctaataaaaagcaagaggctactgtatcccattttctcactctctggataaccccctttggtgactcctgttgtcctgtcctttcttatccttgtacttaaaatctccagtacttgggaagggcccatccttcacaatcagaagtccaagagaccagatccaagctgttacttcaacttcaggcagctaccattatactttggtgaagatggttttgcattgaaacctgtaattctcttatttgtgctgactttgtgcttttcagttgcagttgtccttgtaagcaaagacagcacaggggtgtcagagaagaacatcattatctaagtagctgatattttctttaacttttattttaagttcacaggtacaagtgcaggtttgttacatagataaacttgtgtcatggggatttgttgtacagattatttcatctcccaggcattaagcctagtacccattagttatttttcctgatcctctccctccttccacccttcatcctccaaaaggccccagtgtgtgttgttcccctctatgtgtccatatgttttcatcatttagctcccacttatgagaacatgctgtacttggttttctgttcctgtgttagtttggtaaggataatggcctccaggyccatctatgtccctgcaaaggaacaaactaccatttcttctttcctgtggctgcatagtagtccacggtgtatatgtaccatattttctttatccagtctatcactgatgggcctttgggtggatttcatgtgtttgctattgtgaatagtgctgcaataaacatatgtgtgcatgtgtcttttatgatagaatgatgtatattcttttgggtatatacccagtaatgggattgctgggtcaaatggtatttctgattttaggtctttgaggaattgccacactgtcttcaataatggctgaattaatttgcactcctaccattcactaattcctttgaaaatgtttagtatttgtgaaacccaagaagggcttccgacaaacccactagggatcgtgctgggctaagctgatctgtttattaggaatgccaatggtgcaatggtctaactgtgcaatgatcttatcgtgttttcataattaggctttgggactgccatagggagaatcaactcgaacacagttcactcgtgtcaaacacacttgagagcgctctggaagatcactgccatacatcatgcaatccagttctacttaggctctgacaggtacattttgcctgtttcaagtttgtgatgagctaataagtggtcccctctggtccttcagacctctgtcatacttgtttttctggaaaaagaagagtaaatatgaggatgagcatgaaacaatcaaagttgtcacctagatatattgagaatcttttagtgtcaagtcagagaaaatctggctcaaaaccggctaaacaaaaaaagaaatttagactctcatgtagcggaaaaacctggagctgtcaaagctttggagcaaggcttgattacatggctcacctatgtcatcaaatgaaatacttttttccatttttcttcttggcttcctatgacatctcgcttactcctaaagctgaattccattacacttccaaaattatttccactatcttccggatctttattgttctacatgaatctccaacagggagagagaacctcttccctcgtagttctctgagccaggaagcattttttcccagaagccccagcaaacacctccttgtttctcactggcctgaactgagtcttctgattttaactgatcactgcagcaaagccaatgggatgtgctgatgggcttaaaccacccagagttctactctagaactgagagtagggtgtacttcctccaagcacatgggctatatgggtaaaggtactgttaccaggatagtgggagaatgctatgtgctgagagggttaaactagcaaaagcctattatcccaccattaggaaacattgactattgtgaagtcagtggccaccagaccctgagctccccgccccatgtgctgtggagtctaggatgttgaagagagctgggaggagatgccaagaacactaggctgcttcctaccatctagcttacagtccaacatgtgagtaacaccaatacaaatgaaaagccatcaaatgtgtccaatagtgaatatcatcccggcagtctctgagctaggagggagagtcctggagaggtgtttattttctgatataaaaaaggtaaggtgagctttcattttgatacacagtactaacaataatccttgatatcatgcacacttggaagaaaacagaaaagtagaaactgcaaaggtttaatcttaaccaccaaggggatgcagaagctaattgatattaaggtattcattcattctaccaatatttatcaatgtctgctatgtacttaaccctcaactaggcaccatattggataggtacagtttagcataggtacagtttagcatacagtttagcaaaggctttagaatctttcagacctagggatgaatcccagttctgtcactcagcctctctgagcctcatttgcctcatggtaaagtgaagatatacctaccttaagtggctgttgtaaatattaaatgacaagaagaaataaaagttaaataaattaaagcactcatccaagtgacttgcacatttatagccataagaaatggtaggcatctaaataattaatagtagtagtacttgttgttatacttgaatggctagtgagacatggtctctgttcttaagatgcctttctaggggaggaggtgtggaatgtgtacaggtaatgagtgtcagaagagaaacagagatgaactgatacagagaagcagagatgaactgatatagaagttcacaggaagatgaaatttcttctccattttgagagctgagaaggctcaccaatatgtattttacatgcagaagctagcaggattatgtttaactttaggtgacatcttttgagtcttttctcatgtctctctaagaaacgaaatcttaagtgtcagtaaaagcttgtaagagaaagatacacgagcaatgctgacacttgcataagcacgtgtgctctagggaatgcgagttgctggatgtctccactgctctgtcccacctcacatgagagatgaaattgttgttgcctgtccatgtggcaaaaggagtagctgcttgattcatggtttagttggggctatcaggttgtactcccaaaggcatttgataatctgttcagctgagcacagtcatttgtcttgtttgctgactacttagcagatgaatttgtgattttggtaattactatgtgaacattaataagacatgatatcttttattaattagcacttyatggggtttttcaaaatagcaaaatctagatgatttacaaatattaatgagtcactagtattagttttgcaaaattaacatttggaggttattcactctagaatagtttttccctctgaagtcttttactgaagaacaaagaccrgagacaacatactgtaccctgcaccctagaaaagrctaatttggtctgcccaggcagaaatggtttaatttagagatgtacttacttaacacatttttccattttaattctctccaaagaggttttggtggtcaaaggataaaatactttcagaaaattaagttatgcttgaggaatgattttctaacagaattctatgagattcagacctgtttttcaaacgtaggggatactgcagacgtacccacccactcccctacaaaacaaacacacacacacacagcataaaaggacacaacagtgtgctggagcagtgtgctggaacaggttggcaggagcttcattctgctctggggctctctcccccgtagccagcctcttccttccatgtacacacgtaccagcaagccatcatgaaaagccacttcctagcagggactggcagtcatgargttatgtagcaaagaacagcatctttagtaggttaactcagtcggaaagcacttctgaacaaagcaatcaggtggcatattgttactgccctccctgaagaactcatttaatgactcttagaacggtacaatttcctttaaagatccagatgcctactgtgctttaaactgcctgcacggcccatggttgacagcctcaacaagcatttcttgagcacccactgtgtgcctctcactgtattgggcctggtaagggctttatagcacacagcaaagacagcctgtgccaggcagggtgtagagcccatgtcactagttattacgggagcaactatgatgcaacttgcttttgccactaaatttaaactagcaaatagactcaaaggaagagattgttcatcttttctgcccagccaccttttcagaaacccaaataattcctataatgtagggattatttgtaataattactataaccttcatgtacggcctgattatgtgccacatattatgcagtttacctttgttttctcacttctcacaaagatatctttggtaattacttatatttgtaagcccattttttagatgagcaaattcatgattaagatattaagtaacttatcaaaagttacacaactattaagaggcagagctatatcagtggctgccatgatacgcaaactggtttaattaattttctaaataaacgtttaattcagtgcccaactatttttcttattacaagtcacaaaattgaaactactgagcttttcacctgtaaagttgctattctggcatagtctacagattaaacattaaacactcaactacatagcaagaatctggagctattgtttgggctgtccatggagatgtctttgccaactgtgtccagttgtggcaggtgagtccttcaggggcaccccattaaaagggtgtatgaacatagtcatctgctgccccacagaagtgggcgctggtatgggagaatgtgcggaagacagagcctgtctcagctgggtggtctgttgctctggctttgtctttgttgcctgggcaacatctctctcagaatgtgagaaactcactttctcttttgcatgttgatctgtgggaaggactaacagctgtagctataggttgcctgttatccactaccacctatagttgagaaacagaaaccagattttggggaggtaaaccatcaggcccagggtgcagaaagatattaaatcactgagcttcttttatgtagctctgaaattagttgggaaaaagatcacctccctgaatcctgggagctttttctactaaatttttctctaagacaaatatcctgtagaaatattctttatttttcctgtgatagctggagggaattttgagaagacagtgctgtagagtaattgtgaacatgggttttgacatcagtctttgattcaaagcttggcttcaccatatgctaattatgtctttgggcaagttatttaactcctcttaacctgtttcctcatctaggaaatgggaackttcatatataggttttgcatataattgatttctaattatttattcaaagtctactcgtgtcaggcattcagctagaggctagtgaaacaactgtgaattagtagacacggtgtcagccttcgtagaggttaaatctagcagaaaaggtgcaatttaaatagtcatttcaagtattgagttacaaaagagtttttcctcttttttaaccttggaagcaaacaacagggaaaactggagatagcctcttcaggaaaaaaaatagtaaggtcttaaagggaggtatgagataatcaggtgactagtgggagaaatgtggttacaagggaatatatttaaaggcctattggcaagacaaagtataaacacaggaagaaccaaaagtatagatgagaccagacccatccagaaaggggcagagtggtattagatgaggttgagagagaggcaaaagtttgtggaatctcagagagtctcataaactatgttaaaacatttggactttatcctaaaggcaatgggaagtccttaaaggatttaaatgagagggctatatagagaagttgtgaatattgaataaaataatattcacaaatgcttagcctactattagtacctatttacctctcaataaatgcaagctgccattatcatcaacttcatcattctaagtattaccaactttaggtaaaaggcaaaaatcctgccccatactatggaaagaaacttaggtagtttgtggtggagcaaacatggaaatcctgaaaggctgggaaaaccattctcaacttgcagtagtgcagagcccaaggcgagtttcccttcatatatattcttcctcctgtttctttgcttctctgccttgctacctccacagtgaattcacagcttgttaagcagtgaagtcataattctttctggcagttctgtcattttcataatggattctttgcttgagcctaaacatacaaaaatgcaggtagacaagattatatgttttcaaggaaagccagtgccagggatgggggactgcagggagtgtgagggggcatcttactgcaggaagtttgaggcagcagctctgaaaagcagatagcttgcataatgacatgtatccatctgtatttgagatgactctgttttaatcaggaggagatgtcagattgcttggcactttactgttaaacagatacttcgcatccttgagtagcaaataaaacaacaggactcagtaaaaggtgaggaaagcaaaatgtatcatttctaagttcattagactgctcacattgcttcacctcagatcttgctacagatagattatgaaataagattgaactaaagaattgaagaggttgattttgccagccactgtggtattagaatattaactgggaggcagaagatacatatttatttatttgtaacccaccttatttataaaaaatgtgaagggaccaagtcaattaggttctagaaccaactctaccattaattgtgtgcccttgggcataactttgaacctctatataaatgaagatccttatttataaaatggatttcttaaattgatagacaccaatgarcagaataaacatttttttggctctgaggctcatatataatgctgtacaaggaatgaccttttactgaggtaggcgcttggtgacaaaagcacaaacatagataatggcagtcgaggagggtatatagcaaggatcaaaaagtggcatcggaaaacacaagcatttcttgagcacccactgtgtgcctcacactgtattgggcctggcaaaggctttatagtgcacagcaaagacagcctgtgcaggcagggtgtagagcccatgtcgctggttattacaggagcaactatgatgcagcttgcttttgccactaaatttaaatcagcaaatagactcaaaggaagagattgttcatcttttctgcccagccaccttttcagaaacccaaataattcctataatatagggattatttgtaataattgctataaccttcacttaaggcctgattacatgccacacattatgtactttaccttcgttttcttacttctcacaaaaatacctttggtaattacttatatttgtataagtaatttttagatgagcaaattcatgattaagatgttaagtaacttatcaaaagttacacagctattaagaggcagagctatatcagtggctgccatgatatgcaaactggttcaatttaattttctaaataaatgtttaattcagtgcccaactttttttcttactacaagtcacaaaattgaaactactgagcttttcacctgtagagttgctattctggcatagtctacagattaaacattaaacactcaactacatagcaagaatctggagctactgtttggagctgagtgagtatggactcactcagatggatgagggaagtcaatacagtttagttgtgggatacgggtttttaatcagaaaaaaacctggcttggaatactctgtcatgtattagctgcatgcattcattcatttatttcacatacctcaggtgccagtcacgtgtcagatattgagtttggctgtaggagtacaatagcaaccaagacagataaagaagaatgaaggaaartcacctgctttagttctctctgtcactctctgcccagcattcatacttgaaatcatttgattaaatatataatgagacctactatatactcaaagagatagaacttcctctgagtcgtcaaaaaaaaaaaaaaacggtggtaacatgtggttagaattttcttttttttcactcttctgggatgaaaagaacttgaataactcaaaaattgaaatgccttttaaaagtactaaccctttgcatttttttgttgtgggtaatgtggtgtttcaaaacagatatttaagtacaaaccgtgggtcagatgctgtacaaacctcttcaaagtgatacaattttttattttctttagagatgctatactaatgtattgtcttcaaggagcttttagtttaatgggaaacataactcaccccaaagtgaaagtcacgtgtcttacaagtccggtttctaaaaacatgacttttccatcacccctggagggtgagaattcagagtaatgaggcagtaagttttcttaaaagagtttcattgcaaaaaaggatgagaagacaaagatgttgtaacagtgttgaaattgattttttttgtcttggttaatgatttttaaatattagcaaggaggaggcaagcacaagaatttgggcagaggagaagggcccaataacagtgatttttgttgtagtggctcagaatgcagcataatatataaaccaaatagaatggtaacctggaaaggaacaaaggccagtgaatctatgagtcagtcgttaaggaaataytatgtttctttctctaactctgcacctgagtgtgacagctaaacttagggtaaaggaacaacatcttcaggacagagggctgaatgcctggagtgctaaaatttcacatagtggcaattgttatgaaggaatagcagtgggggaggggtatgtaaattgcacacatgtgtacgtgtgtgtgtgtgtgtgtgtgtgtgtgtacataggtagaatgacttctttggatttattgagtaggasgggaagatgatgtatgaatgagagagagctgggcatgcaaagggctgtaagaagaatgttttgcattgaatgccagggtgagcaatttgaatttttctccgaatccaagtggcagacattggaggattttaagtagaagaatgacatgatctgattcacatttattttaaaaattttttcctggctacttggcagagtacagcaaatttcaagaggcaaaattagatgtaagaaaaccagtgaggaggctgttaccaagcccagatgaaagatgatggtggcttggaccagactggtagtagtgaagatagataaggatatatctgagagcaatgtagtacataaaaccttgaatcttctgttaaatttgatatggagaataaaagaaaagagaaaaaacaacatcttgattttttagctctctaatgtgtgcattttaaccagaacatctttatgaaaatgacctttttggaagccactgtcgattcgaatactgaaagtggaggactagtaggggagatacatttgagctagagaaagactttaagtaccctggccctaaattgtaccacacaagatatgccaactcccactaggtcttggatcttccatttgggctaccaaatctgctgtctacattatgtagccaaagaaatggctttgttcataaaacccaaccctatacttattcatcaacatatgacctttattctttgccagtgtccccatctactcatgtctcatcctcaaattagggccaacctggccaacaacatttttttgcagcaatagctcctttacaccatatgaatgcctaattggttcccagattttaagtgcttttaaaagctgattatgtcaggagatcaaatttgttgatacagatgcatactaaagttgaagatcaccagagattagaatggtgcccaggaaagcatacaaatcattaattttggaggtgatctttacataggttgtaatgacgtaccaggatgcagtgcagtgggacaattgtgtaaactgccaccaccctaaccactgcttcccaaaggaccccatggatgttctcctctgagtccaagttacacaagcttgacaagcagaaagcatgtggcctctattttgcatttcatcttgctcataatagaaggtcttctttaacgggaaaagaaaatgtatggcaataaatctttaaaagtattgtaacattcaaactgtcaatattggttttaaattattgcatcattttctgaaataatgaatgtcatgaattgtaattaatttacatatgcactaagtccactttcaaagaaaccctcttttctctttcaaacattggaaattaaatatttatagttgttgtgatttcatatatacatagttaatattgcctctcaaagccacctgctctccaccatatgtcattttgtttgctgattccttataacctcatagatttgaagttgggttggccagaacaaaaatcctaccaaagaccacgtaagtagtaagtgaaaagcactgagctaggtccattttagtaggacgtaggaggtaaatggggagtaaatagtcccatcacctttaagtatccctttttgcagtttaattcactaaaggatttaagagtttagcttttagtccttaaagttgaatgattgggcagcaatcaatgtatatttatggtattagagagygttcctcaaattttgcatctctcaattcagtttatgtttttcaaaataaagatgagcatacaaaccaagaaccatgycttgtggggtcctcagctaaaggcaaagtggagatcaagagaccgagtgagctgttttaatgtgatgtttgaaaaaaaaaaacattgaaaatgagaaaatcaaaaagtaaagaggcctagaatataaatagaatttcagtcattactggaactrtatgttggcctctatttctttcaatttttactaagcatagaacttccttgcatgtttctgccttggatgtagggctactttgaaagtgtgggctaagatggccagacactgtaatgggagagagtaagacccttggagtcctccctgcctttcttaaacatgggatggctgcgtgtgaagactacctcttccaaagcatcaatcctttccctctgccttctcctaccatcctgaagaggcaataataataacaaggacaaacatttatttggcactgtttctgttttaagcacttgactctatgcttctaaaatcacaggaaatagactatttccgccgaatataaactcattcttgccttcagaacatcttacctgcatgggcagacagggcctccagaggacagctgcattccaaaaaagcctgaaataaagcattaggcaagtatctgcctacagggctgaacacayagtgtttttaacaacattttctgcaagttaggtgagagtttcttggctatagataggatttgaacttaccagcatataatccccagaagagcttggactagtcttttttccatatgacggtagtacttgacacattgaagagacttacttggtgtttgttatgaattaataagcagatgaatgaatgaatcaaaagttgaaagaggccgggtgcggtggctcacgtctgtaatcccagcactttgggaggccgaagcgagcggatcacaaggtcaggagttcaagaccagcctgaccaatattgtgaaaccccgtctctactaaaaatacaaaaaaaaattagccaggcatggtggcacacgcctgtaatcccagctactcaggaggccaaggcaggagaattgcttgaacccaggttgtggtgagccragatcgtgccactgcactccagcctgggcgacagagggagactctgtctcaaaaacaaaaaaaaaaagaaaaaagaaaagttgaaagaacaagagatcgtggatatgtcaactctgcaagtatgcagaatgcctaaatatcccccctctattctttctttcagaatgctcactctctccccactactcttcatgtgtatacctcccactcattcttcagatgttacctcagaaaatctcctcattcaggaagtggccactgattcctcagatgataaggtcactctctttagggtatgctgtacctctcttagggaacttttttttttttttttttttttttgagacggagcctcactctatcacccaggctggagtgcagtggcgcgatctcggctcactgcaacctccacctccgaggttcaagcagttcttctgcctcagcctcccaagtagctgggactacaggcacatgccgccatgcccggctaacttttttgtattttagtagagacagggtttcaccttgttgcccaggctggtcgcgaactcctgagctcaggcaatctgcccgcctcagcctcccaaagtgctgggattacaggcgtgggccactgcacctggcctcttagggaactgaatatacactctacactttcttaaatcagagctttgtgcatgtgattcgtcctccactgtgctgaaaaaaccctaagtataggaagtgtacctttattcattgtatatacccaactaaacctagtgtgctacacattctaggcacttgacaagtatttgtgaactaataaaatgttcaaagaaagtggttgcttatgaaataaaattggacctaggtgtggccatatagagggaagargtatttgggttcactatgaggaagacaagcagtaagaactcttaatccaaaaggcaatagtctcccatgtgaagaagtgtcttcctcgtccctggctaggatagccagtggcaatattatttttatatccttctttaaacaattacttattgtgcacctactgattgcaggctactgtggtgaggataaattgccaaccaaagcagaaaggtctctgctctcttggaactaacttagcatctagtggcatagagagamagtaatccaataatcagaaaaataaatccataagtaccaactgtgatttattttaaaagtcaagaggctggscaccgtggcttacccctgtaatcctagcactttgggaggctgaggtgggaggatcacaaggtcaggagttcaagaccagcctggccgatatggcgaaaccccgtctctactaaaaatacaaaaattagccggacatggtggtgtgcacctgttgtctcagctactcaggaggctgaggcaggagctttgcttgaactcaggaggcagagattgcagtgagctgagatcacactactgcactccaacttgggggacaaaacaagactccatctcaaaaaaaaaagacaagaaagtgtctaacagacaatctgatctgggccctaaggaaatgatgattgaactatgatataaaagatgaggcagagttaactatatgaaaagggatggaaaagaattttagactgggaacagcctatgtagaagccctgtgacaggtagacgaatatggaacataaattatttaagaacccaaaggaagaccagtgggatattcagggagagctttagaagatattgacagaaaagtacatggagtcagattatgctaggtttgggggacatgctaatgattttatactatattctttttaaaaatatgattttayacattttcttaaaaaagtaagaaacttctgaaagactataggtaacatgatcaaattgtacaatacaatgtaatgtattattaacagtaacatcatggagcatttattaagtgcttactatgtaccrggcaatattctaagtgcttaagtgaattattttattttatccttactacaccaccatgaagaaggttgctattaccatcacccttttgcagatgaggcaactaatggtcagagatcttcccaggactagagtaaaggaagcaacaatcatatggcacaaaatttaaggataaaggtattcactgcatgtttgtacatgtgctctcccaaccttgcataacaccaagagtgagcacttcctttaaatcttgcacttgaggcactacacttgtctcatccttgtctcaaatctgagttaagtaacctattctgggcattgtagctcataaatgatcaaactagcttttgcatccatagctgtatagccttcaaatttttttctatctgcaaaattttttgaaattctaaatgaacaccctgctaccttcttgttattaggctcgtgaaaaatgaaattacttgcaatgaaagattaaattttatgttagacttcaaattgtaaatagctaggcttgcctgaaatgaattcagagaatgaaaactgataagttgtagaatccatcccatagaatggactatctcaacattattcaggagatgagaaaggatgagtcaaatatttaaaaagtaaacaggtttttcctattaattttaagccaatgaaatggaaattaaatcttctagctgcaattagataaatggatgtcaatcagatatgaaactgctaaagaaattagccataggggtagtccttaatctgtttgggcttttttgtgggatggtagaaatgtaatctgttatcagcataggtatgattgaattattaataatattgtgcaaagccacctagaaaccagagcttggggactcttaaatctattctaattgaaacacagaaccagcagactggaaaagaccctgactcttctcaagatatgtcacaggatgtgacacagaggacatgcgggcttgcaacacagtggcagctgcaagctgacctcttggcaaatttaatctgtaaatggattccagtttaagatagtgaatgccttccattattaggaagscttctttctayattttggaaagcctggttaaaaatatttcatgccaggttattatgcagattgcctagctaacagggagattatgaatgcaaataaatcaggttttgaaatgaagagctttactgacctcttaagagggtagtaacatgtgcataatggtgaggaaaatgctcccagatcattaggacaagaaaagggtcacattgtcattctttgaagtgtattggggttggaataaaaatccaagaatatcccagargcaaatgaactgaattcaagaactgctctacttactgataagttacccactcttccctctgatgttagtgtgggggratgtcatggtctaggaggatggatgagctccccatggaacccctagttagtctcttaattcctcagtgtaaatttatgttgtggtaatagctggtggtcagaaacagtcaaggtcactcaccctgctactttctgtgacctcccactgccctctcttagctgcaggggaaatcttctcccactattacttctccatggaccatctgctttctctttggtggctgcctccaggagctgatctgaaggatcttaaagtaaacccaggatgaaaaacacgatctgagctccagggcccacccctgtaatcccagctactcgggaggcaactcaggaggatcacttgagcccaagagtttgaggctgcagtgagccgtgatcacggcactgcactccagcctgggcaacatagcaaaaccctgggtgggaaggaaggaagggaggaagggaggaagggaggaagggagggmgggaaaggaagaaagaaggcatgagttttatattgaggggaagctggaattgaatcctaggtctgacactgactagtgtagggcctttgggaagtttctcaacactctaggtcatcaccttcttcaactacaacctgaaaacaatgatgtgagccttacagggtgcagactgctaaactttttctgttaatggagcccttagtgtctcagtaattgtttaacacacccctatgccaaaaaaaaaaaaaaatctaacaatttctttattamgtagctaggcccaaacagctgtatayatatgtatgttcaaaaaatttaggagtcttttgaaaaatatacatattgaaagaaaaaaaaatttaatttttaagtaaacaccaagaacttactagtagaatatgtgtgcctgttgagtactgcataattccttgaaacttggaatcagacttttctcttccatgttgaattttgcaccatacttggttttcatcacaaccaacctttacaaagatctgtcatgtagtacaatctaatgttgcaactgtgatctacttcaagctaatattttgcatggtgtatcacagaagtgtttccctcaaaactttaaaatctgtcttggctttcctgtaagttcactgtggtgccctggggtacctccagtcacttgaggaaccatggttataggtatcatgtagtttgatttagaagacaaaacgtgagaattaatgtaaagaacgtggctgtgggtatgctcataaaatcattgctgctgctgttctgctcggcagtttttctctatgatcatatttattaataaggaagaacaacatggtttttccttctagggaattcaatgctgccaacatttgatcagccagtttgaaagactaacaaaccactgcatactatggaaatgaaaggcatgcccccaagaacctcaccatttgattgaggagacagaataaacacacaggacccaatagtkaataactcacaattgctaaacagtaaagtagtgtaggatttcaaagcagtagaaaatgaaagtggtatgggaaaagacaaaaacttagctgggccttgacaaatcaacagcatttatacaggataatggaaaagggggtttctcccragtagagaacttaaacagtgtgargcacagtgtgttccacactatagctgatgggttggcctcaggggggatgttcaggtayacctgyccttagccctttctccaacttggtgatgaccaggcagcacagagatgctgttgtagactttgcccttctgtggayattaattccactttctttggctcctgggtacatgaaattttccataataggaatataagctgaactttgggaacgctcatatgggaacacattcattttaaccaatgtcctgaagaagctctgggagaagagctgcttgagctgagcttcaggaaaatgcacatagatggcttaaaatacrtagttgtaataatccmccagctcgcttgtgcaaaaatgcagctttatttctagattttaacttctacatctgctgatggaaaaaaaaaatgtaatttagccaattcatgcttatmcaatcgttttcagacttaagctgataatttaggctctaaacattccattttacacccacaaaagcctcctgtactttcctacttccctgtcggaatggcatcctgcgctatcttctgtcctcaccacaatcagccaaggagcctcttgcctttcctggtcttccctttaggcctctgtccctgcarcgcccccttcctgtgttactcatcctgtctcctgctacagtgtaactcggctggtcttcttagaagtagattgtctctttaaatttaatcagctgcataaagtgcaattgacatttcaaaaaatgtgctagttttaaatgtacaattcaatatgttttgacaagggcatacagtgttgtaaccactgccacagtcatgaggtagaacagtactgcccaatagacgtataaggtgagscasgtacataatttaaaagttttccagtggccacatttccaaaaagtagaagaaagatacatatattgagatatcactctgtgccccataaatatgatgatgcataatcattatgtgtcaattaaaaataaaagaaaaaggccaggtgcggtggctcacgcctgtaatcccagcactttgggaggccgaggcaggcggatcacctgagatcgggagttcgagatcagtctgaccaatatgtagaaaccccgtctctactaaaaatgcaaaattagctgggcgtggtggcgcatgcctgtaatcccagctactagggaggctgaggcaggagaatcacttgaacccaggaggcagaggttgcggtgagccgagatcacgccattgcactccagcctgggcaacaagagtgaaactctgtctccwaataaataaataaataaataaataaataaataaatggaaaatggtacaagaagcaggtgaaattaattttaataatatattttctttaacttaatatattcaaatattatcactttgttatggaatcaatayaagaatatattaasgagctactttatgtcttttttcacatccattctttcaagtctattgtgtattttacacttccaacatatctcaactcagacaatatatcttyactagaaatacttaatttttatttagaacttataaaattcacagctgaaaaaataggttcaaatgtccaaattgtttcaatcctgcttacaagctttccattataacttttatttccatttaaattttatttaatttaaattatatgtaattaaaatttcagtagctacatgtggcttgggagcttccatactggatagcacagagaacatttccatcatccccaaaagytgactcctgctattttgaaatcaatcccaacctaccaccactgggcactagcaaccaatgatctgccatttgactctatagttttgtcttttctataatgttatatgaataaaatcagattgcacttagccttttgtttgacttctttcacttatcacattgattttgagatttatttagagggtatttaataggagtgagttccttttaattgctaagtagtattacattgtatagatgtactataccattcactagttggtgggcagttgggctgttccagtttttggcttataaataaagctgttaagaacattcaggccaggaacagtgcctcatgtctttaatcccaacattttgggaggtcaaggtgagatcatggctggaggatcactggaggcctggagttcaagaccaccagcctggtcaacatagtgagatcccayctctattataaaaatttaaaaatttaaaaatttcaaacttaagacaagaacattcaagtacaaatgtttgtgtggacatgcttttatttctccctaataaatatgcaggagaggagtagattgagatatgtttttatttcttcctaataaatatacaggagtggattgaatggtgtgtgtttaattttataggggaataacaaatattttccagtgttccattttccactcccaccagcaaagtatgagagtcccaattgctccatgtcctcaccaacacttgacatagttagtcttrgcaattctagtagagatgcaatggtatttcattgcggttttaactttcatttccttaatgactaataatgttgagcatattttcaggtgyttatttgccactcatatatatcctttggtaaaatttctgttcagatattttgcccccatttttatcaggttgtcttttaattattgatttgtaaaagttgttttaaataggctgaatataagttccttagcaaacatgttttgtatatgttttctcccagtcttggcttgggtgtgacttttttgtatctggttcctcatgttaatgttaacctgctgctgttaaatgtggtgttaccatgacctccagtaccatgtccgtgccctcattttgactcctggcacctttgggttcatcactgtgttcttaactgtttctgcttttctctcaaggagatgaagctacttttagcagtctctttcattctatactgaggctacaggacttcaagcagatgtcttcagccagtctgtatgatcagtggttacaaccattactcaagcaccatattggttagacatgaggtttctccaagaagcttacaacctctctgggctatactttaggactcggggaacacgctcccaatactgcctgtggaattttctacaactttcctctagttccattagttacctcctaccccaggactgggcttgataagcctcatgagaggctgagtagatatttaatctctagactaagcctattgatttcctactttctgccacttggtcaaactttggtctccttttataataatgttcttatataataaacttgcattctttcctttttcttccccagaatactgacctttcatacttttaggaactgtggatcagtatttaaaggcaagattttgatcttcaaaaatttttttctccttcttaggcaccagactcttacagttcatgagttagaaactcaagaacaaatacaatactttggtctttctggttctataggagtgagagagagagtgatgtctgcattctacaaatactagcctactacagttggctctcagtagttagacaagtctctgagaggacaatccctgcagagacaagaatatcactaattactctgagccaggaaaccccggagcatgtttagaagatgacaatataatgatcattatgttagtcatgaaatgggaagaatctatcatttggcaccatttggtactgtgtgccaactctggcttaagcattttgctcatattaccctgtaaggtcaataattattatccccattttgctgtagagaaaactgagtattctgatacaactttaactttcctggggtcaaaaaaattatcagtatcactaggatttgaactccaggtcaatctgattttaaagcatgtactcttaagcattagaacagtggttcttttgactgggcatgtggctcacacctgtaattccagcactttgggaagccaagggtggcagattacttaaacccaggagtttgagaccagtccaggcaacatggcgaaaccccatctcaacaaaaaatatttaaaagttagacaggtgtggtggcatgcacctatagtcccggctactcaggaggctgaggtgaaaggattacttgaacctgctaggtagaggctgcactgagccaagattgtaccactgcactctagcctgggcaacagagtgaaattctgtctctaaaaaaaaaaaaaaaaaagagaaagaaagcaagaaagaaaagaacaaaagcaaaaacaaaaacaaaaaaacagtgtttcttaaactatttggtctgaggaccaccttataaccttaaaaatgattgagaacctcaaagttctttaattaatgtggttaatgtctattgacagttaaattatttattaattcaattaaaaataacaataataaactcattacatattaacatcaatggcatgyttttatgaaaaattactatatatatcccccaaaatagaagagtagcattacattatgttttttataaatctctttaacatctggcttaatagaagacaggttctcatatgtgcttctgcagtctgttgtaatatcgcatatcacagagtgcctgggaaaccctgctgtacactcatgagagaatgagagttacaaaagcaaataacatcttcgtattatgaaaatggttttgatctatggacctcctaaagcaattttagggatccctagaggtgctcataccacaatttgagaattagtgcattgaaaataattagaaataaactgattccwtgtagcaaaactttgttatgtgtagagaagargtgtgctctgaattgggaagtatagattaggaccagatcttgggaggacgattatcagcttaaggagtttgaatgttgttctcaatgcactggggaaccacagatggcttttggcttgatcagatctttgtgtggggacaattagtctgtcaataaaatgagtaggatggattagaaagaggacagagaaaaggcaaccagttaagagcactttaacgaggccgtgtgtagttgtatatctagagccagacctcaggayttttgtgacaattaaatgtgttaatctatgtaaaatgcatataacaaagcctgatccatggtaagcattatttgtattagaagtagttgtaataattgttgtgggtagtagcaatattattattgctattattatttatattagatgagtcgtaataaaagcttgaactaggcagagtttgagagacattttgcaraacagttcataggatgtagttgtgtgggtgtgtgggtgaggaaataaaacaatgctgagatgacaatattttgctgtttgactactatagggactcaggaagtattttgacagagttgattttcaataaatatttggaaaaggaatggggagaggagaggaatagaaagaaatggtgactttgggggcaaggaagatgatgtctgtgtttgttgattctgagatgccagtggagtgtrcacatggtgaggtctttaggtaagtcaaacatgcaaccatacatcagttcatgtccttgctgtgctttcagctcttcagagattttttcatcacactttgaattgtcttctaatttcttacaatagcctacaggccccgtgaattrtggctctaattaccttttcaatttcatctttggccatcctctctcacttactttggcacagtttcagttcctgaacgctccaagcattttcccatcttgaggtgtttgcactactattccatttccttctaatgcaaccacycatcacaccgaccattacataactggattatttgaatcgactgaattgttacctcaatggaaagtattttcctgaccactctaaccaagtaaatcttcctcctcctgcttgcattcttctctttcaccaaattctcttcattatcttcctagactgaaagcttcatgaggatagggaatttgtgttgttgacacagcatctaggacctcaggtataatgaatatttgtttcatgagcttatgaatgagattcaacagataggttgaaatagcaytggaaatgtaggggagtttgtattttggtttttgtttgtttgtttgaggcagggtctcactctgtcacccaggctggagtgcagtgacacgatcacacagctcactgaagccttgacctcctaagcaatcatcccacctcagtcccccaagtagctgggatgataggtgcatgtcacaacacctggctaatttttctttttaattttttgtggagcctgggtctcactatgttacccaagctggtcttgaactcctgggctcaagggatcctcccacatcagcctcccaaagtgctgggattacaggagtgagccactgtttgaatttatttgtacagatattttatgttagcaccaataagttaactatctgtaatggaagcttcttggtcatattcaacttcaaaactgggtgtgcctcaatttgtaaaatatctttagctatgtttacataagaaaatatagctgctattcacaatagcaaagacatggaatgaacccaaatgcccatcaatgacagactggataaagaaaatgtggtacatatataccatggaatactatgcagccataaaaaggaatgagatcatgtcctttgcagggggatggatggagctggaagccatcatcctcagcaaactaatgcaggaacagaaaattaaacacttttaagtgggagctgaatgaaatgaackcataaayacagggaggggaacaayaacacactggggggtgtccagtgcatggggrtggggcacggggagaggggggcattaggaaaaatagctaatgcatgcccggcttaatacctaggtaatgggttgatgggcacagcaaatcaccgtgacacacatttacctaagtaacaaacctgcacatcctgcacacatcctgtagcccggagcttaaaataaaatttaagagagaaagaaaagaaagaaaagaagaaagaaggaaagaaggaaggaaggaaggaaggaaggaaggaaggaaggaaggaaggaaggaaggaaggaaggaaaaagaaaggaaaggaaaggagaaagaaagggagaaaggaaaggagaaaggaaagaaaaggaagggaagctggaacaataacctttgaaatttgccaaggtagcaacaatgacataatgytcctttacatatggcaacagtctaaccttgcctcaaagtcccaggagtggatggttctccctgtttctacattgtatcttctttkccctatgagctggcctgtctttgtgtgttcaaaggcccagtgatatactctggaagaagaatagcagattggctcaggtatgttttctgactgtggcacttatttttgayacttattccttgggtcgacctattagtggatcttgtctgtgcatggcaaaaataatacttcctttaaaggagtgttaataatcacaataaagcatctagcaaaggaagggcatggctcaataaatttccggttccccagccccagccattcagtcagttggtaggttgagtatagaaatcttgtttgagttgttctttcatggaactttgaagctgtcatttcattgttttttagggaccaatgttgaagaaattttccagtgacaatctgatagttactaacatagatatggcctgtgttttcctccaggaaacttttaggatcttctttgtatccttagtgttcacaatgattatgtagttatatatcttttaaaataaccaatatgggtatacaaagggctccttttaatctcgaacactcctgttattcaattgggaaatagctcttcaagtatttmtttaataatttccttatttttgatttcctaattcttcctgatacttctrttaattggatattagtcttcatagaataatttcctaatttgtatatctctgatattttggctttatctttttctcctacttttttatttattattattatactttaagttttagggtacatgtgcacaatgtgcaggttagttacatatgtatacatgttccatgctggtgtgctgcacccattaactcatcatttagcattaggtatatctcctaaagctatccctcacccctccccccaccccacaacagtccccagagtgtgatgttccccttcctgtgtccatgtgatctcattgttcaattcccacctatgagtgagaatatgcggtgtttggttttttgttcttgcgatagtttactgagaatgatgatttccaatttcatccacrtccctacaaaggacatgaactcatcattttttatggctgcatagtattccatggtgtatatgtgccacattttcttaatccagtctatcattcttggacayttgggttggttccaagtctttgctattgtgaatagtgctgcaataaacatacgtgtgcatgtgtctttatagcagcatgatttatagtcctttgggtatatacccagtaatgggatggctgggtcaaatggtatttctagttctagatccctgaggaatcgccctactgacttccacaatggttgaactagtttacagtcccaccaacagtgtaaaatgttcctatttctccacatcctctccagcacctgttgtttcctgactttttaatgattgccattctaactggtgtgagatggtatctcattgtggttttgatttgcatttctctgatggccagtgatggtgagcatttcttcatgtgttttttggctgcataaatgtcttcttttgagaagtgtctgttcatgtcctttgcccactttttgatggggttgtttttttcttgtaaatttgttggagttcattgtagattctggatattagccctttgtcagatgagtaggttgcaaaaattttctcccattttgtaggttgcctgttcactctgatggtagtttcttttgctgtgcagaagctctttagtttaattagatcccatttgtcaattttggctttcgttgccattgcttttggtgtttcagacatgaagtccttgcccatgcctatgtcctgaatggtaatgcctaggttttcttctagggtttttatggttttaggtctaatgttcaagtctttaatccatcttgaattaatttttgtataaggtgtaaggaagggatccagtttcagctttctacatgtgactagcccgttttcccagcaccatttattaaatagggtatcctttccccattgcttgtttttctcaggtttgtcaaacttcaaactatactgcaaggctacagtaaccaaaacagcatggtactggtaccaaaacagagatatagatcaatggaacagaacagagccctcagaaataatgctgcatatctacaactatctgatctttactttttttgtttgtttgtttttttgagatggagtctcactcttgtcgcccaggctggaatgcagtgatgcaatctcagttcactgcaacctccgcttccctggttcaagagactctcctgcctcagcctcctgagtatctgggattacaggcwcctgccaccacacccggctaatttttgtacttttagtagacacggggttttgccatgctggccaggctggtctcaaactcctcaggtgatccacctgcctcggcctcccaaagtgctgggattacaggcgtgagccactgcgcctggcctttcctactttttaagagatttccttgaccagtatattttaaccttctaataatttaaaaataaatttgccatattttttaattccatgttttttttttcttattctctatgttttccttctttgtatagcatcyggttcttgaattgtaggtttattctccttttaaatgtttctgcrcatacaaattaggatttatttatttatttctggccctaaaagtatccctgttgtctccagtatatgtttttatatttgtttatcttgktcttttttcccctcacagtgtaggtttcactcaattgastagatgatcttccattgccaagtcatatgtgagaatgaatcagtagaactgtcaaatgaatatgaataggacttaccaactggtgggtttcattatacagtgagtaggcacagagattatcttgtattttgtagtccctaattccaaaatgcagagcactttgctctgaagacccaactcccacacttgtgaccttagtccaccccagaccattttagttttctttcaaaaggaagaactttttattgtatccrcccagggtgtgatgagaagagttaaacagtgggaacggggggcaggtaaatcccttttcacacccgctccatttttcacccttcatcccacatcatctttggcatttctaaatcctaactctctctaggtttttgcaagatagatgggggccctccttggctgtgccctcaatctgtcatcattcctccrcttacctgtcttctctcagaaacacatgaaatgcatcgttcacttaatgaccctctttatattcttttcattgttctggggctgtatctgctttgcttctttactatcattttaaagagatcttgggaaaaggagatgacaaatatatgctcagttcatcattgaccttaattttctttttctgcttgttctaaatcaaggaggatcatyaccttcttaagaggctaagccagcatttcttagctggtccacttctatatcctggaactttagttttaaagtacaaaagccatctttttttgacagtctgagcctccacttttccccaattatactaaacagcttctctgctttcatgtattgacaacccccactaacgcctttaaatcttggaatattcagttttatttgatgtgtgtaggtgtgtaatgttctgaataacaggaaagtgaatcaccgaaaaaaaaaaggaagaaagaaatgggcttaaaaaattaaacaacaaaatgtctacgggtttatttatcattttgtaagatctcaccaccacagggcatttcaaactgaayagcttctttgagagaaaaatcatcctggtgactgtttaggtgttcttttcaaatgattatgggaattatggcactttgattctttttgataaatacttagtatgtacttactgagtggaaggctggaacagaaatttgcatagagaaatgtaagtggaatcattattgagtagagtcaagtaacagtgggtttgagccccacatcagtcatgttctactttctctaagatagttcaggtctctgagtctcagttgcctcaatgatagttaataatacctccttcagggtgatggtgagagatagagttaatgtgagcataaagacatgcataatacctggtacttggtaagcacctatcaaattgtggatgatttgattatgaggtaaacaggctttaaaatgtcattgcctaccctgttcttaaaattatgggggtaaaaaagcacttcttcccagacatatcaaagtttgtgtaactccaaaagcctgaccatagcctttctttaatgtatttctcagttcctctgccttcgtttaaggtcaaacagagccaggcgaccactcagacaatattatttagcccgatgaattgtcaaacagtaatgacccctttggacagtttgttttgcgattttcataatttcttattgaagaatcacggactggtctgtgacaggacatattttgatgtcttccaattatgtacacattatggaatttatgaattagagctattgtcctttcctgtggtggagatggactttgtggttctttattttcctaatgaggtggagtccaggagctaggcagatggaattcttttgacatttatttcaasagaagccataaacatattacaaaatagtatgaaaatatgcaaatattactaaatttgtaggaacaaaattttttatctcaaccattactagttaacaactgtttataaactggggaaagaaatcagttatagtctctcatttaacaaacagcccttacctactgaaccctactatgcatgtacacggtgatgaaacaaacaaaaaactgctgatgagattaaaaactactgtttttaattcatgaatcagtttaacaaacttttgtgtgtcagtacttaggcactgggaatccaatagtgaataaaaaacagacatgattctttcatgagcttactgagtattggaggaaacttttgctaaataaacattcatagacatagatgtagagctacactgtggtgaaagtaatgaaggagacacttggtgctatgagagcagtatggcagggggccgacttgtctgcatcagcaagaattctttcctcttgaaaagatgactaatctgaaatgtgaaggataaagagatattaactgtgggtgaatgaagaagaaacactctggagatgcaaaggcttttcaggtggagcatacatggagcyttcggggagttgaaaggaggacaatgtattttgacatagaggacaaaggcaggaggatgtgtgaaaggaagctctaaattccttctcttgtaataccccaagctgtccttttagttttgctttcatttactcatttattcattatttgattcattcaggcattcaacaaatgactattccatgccagttctagggccggcaccatattaggtacagataagatcatgattaaggtatagccctggccccaaagagcttacaggagagaaaaagatgtcaagatgctatgcgccctagaggaagagcactatccttgacstacatttaggaagctcatgaattagcagagtgaggaggagaatgaagagaatttcaagaagtagaaaaagtgtgtacaaaggtccagaggcaggctaggtgtggtggctcatgcctgtaataccagaattttgggagatcgaggcaggtggatcacttgagccctggagtttaagaccagcctgggcaacatgggaagaccccgtttctactaaaawwcacaaaaattagctgggtgtggtggcgcacgcctgtggtcccagctactcaggaggctgaggtgggaggatttcttgaacctatgaggtcaaggcttcagtgagccatgattgtgccactgcactccagcctaggtgagagagcaagaccttgtctcaaaaataaaaataaaaataaagtccagaggcaaaagaatgtttggcaaggcctataaatcacaataggctctgcaagscttcctgtgtagactatgagatcctaattaataacaaaatataggtgaaaagcagagagtagctaatccttaaagatctgttacattgtattaagggccttggattcctttcctaagagttatgggaaggcactcaagaactttaagcagggcaattggcatgatcagatctgcactttaggaaatgattgtacttgtggtaacatggaggtggaatatttgcccagaagctaccgcaggaacacagccaagagatgatactgatccaggctaacttagtagcagcgtaaatggatagatatggacagattgttgttgttattgttgttgttttgagactgagtctcactctattgcccaggctggagtgtagcagcgcaatcttggctaactgcaatctccgcctcctgggttcaagcaattctcatgcctcagcctcccgagtagctggaattagaggtacccatcaccatgcccggcttttttttttttttttcaattttactttaagttctgggatacatgtgctgaatgtgcaggtttgttaaataagtatacttgtgccatggcggtttgctgcacctatcaacctgtcttctargttttaagccccgcatgcattaggtattygtcctaatgctctccccacctttcctcccacccactgacagcctctggtatgtgatgttgccctccctgtgtccatgtgttctcattttgtatttttagtagagacgggttttcaccrtattggccaggccggtctcctgacctcaaatgatccgcccacctgagcctcccaaagtgctgggattacaggtgtgagccacagcacctggcctatggacaggttttaaggttgtttaggaatctgggatttataggacatgacacctgactggatgtagggtasaggaagattttcaaaatgtcttctgtgtttctggaatggggcagctaggtcgatggtgggcaccactcaaaaggcagaaaaagaagtgggtttcttaatccatgcatttattaatctgtaaagtagaccttattttaatcatcttagatggttgtctrcatcamaataaaagctacataactgacacaaagaaagcattcattaatgctcaggaatcatttttgtatatgaagttctttagaggtgttaaccactggaagtaggagacagtagttactgaaaatgtcagagatgtctttacagagcaagtgagctgggtcttcagtgaagagaaacacatcacgagggaataaatggatggatgagtgacaggaaagacattcttggcagagagcacaacaggtgcagagctcagagttcttcaagaaactgaaaatggcccactgtttctgcgcatagggtttgtgaaaggggtgacagaaaatgaactagaaacctagggtagcaatagatcctagaggttctataaaacaagcagaatgcctgagtgcaggccagcatttgacaaaatgtttctgcagaacttaggtattgtataaaatgtaaatatgcacaaattaatatgraaaattctgatttgaacaaagttaaattaacttttttattgcaggatttctcagaagttttacatgtgcattggaaacctacaacagagggctatagcatgacgctttttttcaaactgcacctcttttcccagaacactgattaacaaatgcctcaaaagacactgattctgtgccattggatttaggaaactttacactaggcagtgaggaaccataagttagaaagatcatactgacttagtgaggagcgtggcttggaaggggtraagactgaaggcctgatgatcttaagaagttacatgagataataagaaaaatcatatatgctaagcagagagaggtggtgggagggacagagaggtgctcacgtgcatgtgtgcatgtatattttaatcaggcactggacacttagcaagagctatttgtagcctgcagaagctagggaagggtttacaggaaattrtaaagctctttgtcaatatgaggaattattatttcaacgctattttacatttctgatgccttttgatccccctgtgtggcatgtgtgcaaacccactatgagaaaagttaagagaatttgctcatagttctagagctgatggaatgcagaattgacctttgctcttctaagtctgggactctttttattctattgtgttccctctgagctcagactcaagctgggatttgaaggataggtagggtttgcataggttgaaaaagtaagtaaaaacattttgcttcagagaaaaagtacaagaaaggacacagaggcatgtgaatggcatgactgacagtctggaaagtgtcactctgctaatgacggtaatcgctccatgagtcttcccatccttcaaggmagagcatgtgatgtgtagtgtcttaagacccactcttagaagggtcctgtgcttggtttaatgctctgttgttgctgtcttaaaattccaaatactttaagaacaaaagatgccccctttttttgatttgggccccacaaattatgtagccagtcttgcttcaaggcctaggttaggtattctgatcatctattttatctgtcaaagctattctcattccactagatgcctctacatttttacattgtggttagttcacacttggttggtctcttattcgcacataaattactaacagttatctttgcaatcaagtcataatctccttacaagcaactagaaagcctagtgctaagcacatagtaggcaggtaataaaaatttgatgttgaatgaatatacctccattagaagcccactgacatgagtttcatactcctttataatgaaaccatgtctttgagttaacttaaaaaaaattaaaaagagcaaatctgctaacataattcaagggtgaagactacacaagtgaataaatctagcatccatgtagacaatgacagtgttcacaaaaatgacagtatccaacacctaataccaagagcaaacatttattgggtgtggattatgtgccatgcattgctttaggcatttcattccatttttacaactactctacaagtggatcctattataatctttgtttcacaaatgagattaraacacaacatgattaagaaacttgcccacagtaaagatttgacctcaagtagcctggttctcaaaaatcatgcctttaaccatttgcctattacactttactgacccatcatagaaaggagactcacatctggccttatatcattaccagttaagtgctgtatctgtgacagccacttttattctctacgaaaaaatttgctggggacatgatagcactgtaattctaaacttgcactcaactgtgtacctttctttggacccaggccttatttttttctctctctctctttttcttcctatctgtgaaatagacataatgagtcagcatttggaagcaggaagtgctctaaactatgttgctgttgctgttttcctggggagagaaatcattaaattctcaaaaggatctatgatcctaaaatgttaaagtcatggctcagggcctatgctacttttcaawtgtaaatttataaacttgggttttcatcctttgttcagtccttgtagggctgtcagataccaaatggaaattgcaaaggtctctatttgtgggatgtttaatattattattttyactctatatttattccttaaatatttattgagttttaaaatatatacaaccttgcttacaagttcaaggtccatctaactcttgaattctggcttctgtaacttatcacactagtacagtaatggccagattgacaaccttttttgcataatgccttgaatttgtcaacatgtttcccacatgatgaactaagtttaccacgtgctgtttcccaaagcttctaaagctgcctatacttttcagatttcctccaaagaaagagagtgtggcaaaccatgatggtgtaggtgaaggataatagaactggttaaagataatagaactgagcataaaggcttccaacctgacctctacagycgtggctcaggaggactgatacagctcctcctgcagcacttccctggcccatcacagggcttaaaagcagaggcaagggagaaaagaggaactgtgttactttacaattttgtccagggctggccctggtgagttttgaaagacagtagtaatttctccccttgacactgaccttaacatactggagagttaagccaacttaattgtccaataaatttttattaaccttcttaagaaaaagtggtgcatatgacgcaaaacaaaagttaagaagagccattgtgtgtgtgcggatgtgatmatgggattcaggacaccaggtctcatgctcgtctgtcaccaaattaccaggtaacctgggcaagtcgcatcttttctctaggctttcatcatcagcaaaatgacgggctagacctaatgctctctaagcccattttttagctataactttgccagatgtatgattagcattgcctggagttagacaactgctaagtttgagggtggaatcccgaaaactgccctaacttctgacaacaattacaaattcagagggtttctaaaattattctcagttttgataattcactagaagaactcacagaactcactgaaagtgattatactcaaggttatgacttatasggaaaggttacagattaaaataaaccaaagaaagagatgcataaggcaaagcctgggagagttccaattgcaacgtttcaattgttggatgcattaccctcctgccattgacctcatgcattacccccctgccattaacctcctgccatgtgacaatatgcataaagtattgtcaaccaaagaaacttatctgarcctcgtatttagagtttttattagagctcaattatgtagacatgatggattgactgattatatacaagattgaacttagtgttcaggtcacctgataaccatgtgacccaaagcttccaccctaagtcacatggtcatctggtattgccatccccaccctaagttccactggagccagtcctcaccctaaacaaagacattgctgtcatatatgatacagattacctccaagaagcctagggcaaaacccaggcctctcttcaggcaagggtaaaccctttactacataagcatcctaggtttgttgttcattaattttcccttgtrattcatccttattattgagcaaacacatattcactcttttattcttttaaaagatatattagcataactagtagtgccaggcactgttccaggtactgcatataaagcagagaacaaaatcgtttctctctccctggaaattatgttctactgctgtaataaccaaaaccaaataaatatatacagtctagttgcaatatagggatagagagtgaygggcagagatggaggtgctaatttattttatacagagtagtcaaggaaggtatcccagtgaagttgatactggaacagacaccagaagaagtaaagcactgagctatgctggtgtctgaaagagagggaacataagatgcaaaggtcttggagtgggagtgttctcctgtcttcctgtcctgtcttccttccatgtctatagggagtggtggtggtgggaggggaggtgaaatttggtggtgctgcatttgataagttaaaaaaaagagctatagctggagctaaatctttccagcattttaagaaagttttagtctgaatgtgtaggaagccaataaaagcctttgagcggaaaagtgacatgaagtgatttgcatttaaaaggaccattctgcctgctgcctggaaactactctgtaggggttgggggtgaaggaggatcagagactggttcgaatctattgatataatcatggtgagataggatgatagttggagcatggtagcagcagtggagatggtgagtagtggttgattctggacatatttcaaagttagagcaggcaggattgaaaagatgggaatgagagagtggaatgaaggaacaggagggtggggcagggtattgtggggcagaattagggattgagatgccttataccctgtgaaatatcagcttggctgctggtgatattgctctggaggtctggggagaggtttatgctcaaagttcagatttagggttttgttgttatgtgagtggtgagctgtgggactgtggactttgaactttgaactctagggtagttatacatttagaggtcacagcagtgaggagctaccaagtgagcctgaggagtgtacactgaggcagtaggagaataaagagagagcaatgcccaggaatcagtgaaaaaactgtattaggaaggagagagtactcaattgcatacaaaacaaactgtttgcatgtatgagttaaagacaatggaatacctaattcaataagtcctcagaaattaatccactgatcatgtgaccacaacattctactctccagtacaatctaaaagactactaatggttctctactagatgcctacaaactgtacctttaaatttctccaccttcattggttataatagtgtccagatgcccagatatgaaagtgcccttttggcagtgacatctggctatttggcttcttctcttagctggaattgaaggtatacatgttgaactaaatggttgacctattaggatggtaactataacagtgatggaattatatatcacatctttcttgtctgagtttgttatatggtatcatcttactattagaatcctggtctttttgtaatttatttattcagcttactagttttaggggaaaatgcagattggattcaaaattactattctgcataatatatatatataggtatgtctgtatatattttcrtcttcagtttgtataactttaaatagttttgaggcttatcagattaatgttatttggtttggttttagcattacattcaagtttctagtaggtaaaaatttatttcttaaagaacacattaaaactctttttgcaaatggaataaaaattttgaaacagttccattgtacctctgctgtccaatatggtaaccatggttaccagcccctagaaatgtagctagatttgagaggtcttttagtgtaaaacaccagatttcaaagatttgatataagaaaagaatttagatatgtcattagtaattctttattgattatatgttgaaattatattttgacagattaaataagataattttatcttcaaaaaattcaaatataaatatattaaaatgaatttcatctttttttcctcactttttaatgtggaaattagaaaatttacaattacaaatgtggtttgcattatatttctattgcacagagccgttctatacattctggtcacatatatgtttttatatgtgaccagaattgttttatgtgtctcttgacttcctggtgggaagaaaatggtttaatcttttctatacaagtttcatcctataaagtatttcatggcattaaaaatacttattttttttttttactaaaaaagtttaaaatgataatctaaaaaatctaaaatgatgcatgttctaaaatattttaacgaaaacatgaacacaaaagaaaactacgcataaccattgctaatattttgatayattccttttagcatatgcacattttttaaccaaaaaattgtagcagttggcttattytggtttatgattttttgaacatcatgaacatctatctttgtcactacttttaagcgtttctgcactgctataccttaaggatatagcatactccatactccccataagtaacagtggtttatgatggtgatgatatttttatctttaataacagctgtattgatatctaactcacatgccataagattcaaacttttaaactatacaattcagtggtttttaattatattcagagttgcgtagctattgctccaawtttattttattttattttagytttattatttatttatttatttatttatttatttatttrtttttgagacggagtctcgttctgtcgcctgggctggagtgctgtggcgcagtctcggctcactgcaagctccgcctcctgggttcacaccgttctcctgcctcagcttccbgagtaactgggactacaggggcccgccaccaygcccggctaatttttttgtattttyagtagagacggggtttcaccctgttagccagggtggtctcgatctcctgacctcgtgatccgcccgcctcggcctcccaaagtgttggggctacaggcgtgagccaccgcgcccggscgcccctatctaattttagaacattttcaacacccgcaaaagaaatcctgaaccctttagcagtcattcccaccccttttttttttatcctcagtccctggcaaccactaatctactttctctgtctaagcagttgtctattctgaacgtttcacataaatggaatcatacaatatgtcatcttttgtgtctggtgtctttcatttagcataatgttttcaagtttcatctatgttgtggcatgtttcaatacttcgttcctttctgcagctgaataatattctattgtatggacatataacattttgtttatccatytatcagttgatggacattttgggttgtttccactttttggctattataaataatgctactacatgaacatttgtgttcaagttttggtgggaacacgtgcttttaattctcttcaatatatacatagaagtgaaatttctgggtcatatggtaactgtgcttaatattttgaagaactggcaaactatttgtggctgcattgttatacaatcccagaagcaatgtaggatttgaaggttctgatttttgccacatcctcaccaacacaattgtggtgattttcaactgagagaatatttatccctaagagagacaagtaagaatctagcggtgaatggtttggaaagagacctccaggtgattctgttgtgacctaaacccactgcaatagacacacacacacactcacaatagctcaaatcacagtggttaagagcatgggctgtagagacagatcatgggttggcgccakgctctcatctatctgactttggttatattatttacctctattagcctcagtaaaatggagatgatactgtatagaggctgttgttagaataaaatgagacaatgcaagtaaaaccctttccacagtgcctagtacataatagatgctcagtgttagctataattactatataaatgaatcaataatttgccatcatatgaactcattataatttgcctaacaaattattttgttgggcatttgggttgtttccagtttttcatgattataagcaatgttctttagaaataattttatggctaaatttttgcccacatccatggttattttcttagaataaattctgtaaagtggtatttcttggtatattttttaaaggtttgaaagacatttcccaatagttattcttgtttaaattatactaaaattttactttgagcaatgtagtcaggtactagtatatccctggagtgttgctaacctggttttggaaattctcaccttatacctaacaaatatactgtaaactaaaactttcttgcacaggacagcctaaatttaactctaaaaccaatgaatggtaagaggtacaagaagatgttttatctcatgctctcagatctagactcttgagttttgtaacttttctccctttgcatcaatatcctaactagacaagtaaaacagctgtcagtgaaatcacgcacagtagatatttttgtttaktattgaagcaaatcaagggcaagactaaggtcacaatagaacctgaatagtcaaaaggaatgattccttgagagtgggcatgaccgaacattcctacgttgttaggtctaggagccctataaaagcaattactcacaagtctaccatggcaatttcataaccarcctggaaaggatcagacaacgacatcaattttcctctgatggatatgggaaaccctcagggaaaggtaggattttaagagttatttaacattatggcagaagtttggttgaatggtggaatgctctggaactgacataacttgggagatttattgtacagaaattggaggggactttgcaccgataacagagatgaggggaaagacacatcagcaagtaatgtgtttctactggtaggctggtaaatgtttaacaactggctctcaaaaaaaaaaaaaaaaaaaaaaaccctgaatttacatagtgtttttttttaattttctgtgatataaatatcctaccatggcagatttctgatgttaatgatgtcactcaaagcagaactagaaagacatgtacgtgatcagcaaaatcagctctcaatagccagtacctaccagcttcagtgtaccactgtgtattttcataagtttctgtacttgaatttcagttgcagagacatttacatggtaaaatccattaagaccccagagtctagaattaatacaacactttgagggcaagaggttttcttttcttttcccagattaaatgccacgttaaaggatcacttatgtggcattacatgttgtagcatgcacaaacaggaattgcaaacttgctagaaattcaagaggtcattctctagacagcacgtaaaccaccttagagagagagttgtgcaattggtgcttagtgatcatagagagaaattccatatgattccacaatagagaaatgtgactaggtctgcacatacataatgagaaagtccaagagaagataatcctgattcctttcatttgcaggagacttcatggtttataaagggctttttgcaagatgataaaatttcatgtatccagtttctaattgttcattaagacagattgataggcagtaaaactgaggtttctaggtcacttctgttcacatgaacaattgacttggagtgcatctctccaattctctgcaagtgggagatctcatgaagtaccgcaggaggaagaagggtcattttagtgaaggctggctctgagccaaacctggactaagcactttccttacctctgaagccacccaacaaccctgtgaagtagcaactattgttttcttccattttkcaaatatagaggttcagagatgttaaactactcaccaaaggtcatgaaatttataaatgcctgagctgggacacaaaccaggactgtctgacacctaaagcctctattaagaatctccagactggcttaggtcaaaggttttaataaaattatagatatttaatgtgctaattggacagggtgacccaaaagtttcctgtgtaggaagcattagcctaaggaaggaagagtgggtatgtgagtgttgggggaggggaccatgacaagggtggttaaaaaaacgaatgtrtccacatgctgtcaatactgaactgggtaacataagaaggctgtgtatttgtaattggccttttctatgtaaagcacaagcctgaaataggtcagtctttcagagttccctctgctgccccctttgaagactatggccccttttacataaactgtaaattagacactaagttccatgacatcagagactgactacatcttatacactgatgttgctgaatctataatcctatcccagtgtctgacatagttaagtacttgcacatttgctgaacattgatgatggtgatgatgacgaaagtaaatactcatagtaatagcaatgtattttttccacgtattatctcatttaatccttgtaataactctatgaaacaaatactattcattttcctaatttatagatamgaaaatgatgctttagggagatcttgtaacttgcttgaggacagaaaaataagtgacagaaaatgatatcggagccttggcacttaacattgcactatagtctgtcgatatagaatgcatttgctgtattkctaagaaagttcacgttattaaaattagatgatagaatttaagttctatgaagaaagaaattctgttttatataaatctatatccttggcacctagagcaattctttttttttttttttcttgagaaggagtcttgctctgtctcccaggctggagtgcagtggtgcgatgcaacctctgcctcccgggttcaagcaattctcctgcctcagcctcccgagtagctgggactacaggcgcgtgccaccatgcctggstaattttttgtatttttagtagagacagggtttcaccatgttagccaggatggcctcgatctcctgacctcataatctgcctgactcagcctcccaaagtgctgggattacaggtgtgagccaccacacctggccagaataattctttacataattgcttggtaaattttgatcgtatatatgcatacaggaataaatcgaaccaattatttcaataggaatacagcttatgagctagaaaatttccagctcacaacagattattttaatatgaattttaagaaggggggaggtatgaaacctaaatattaaagtaagatattcagcaatttattcatttgtttaagaaatgtttgtctccaacaaatataattaagcatctactaagtgacagttagtcaatagaaaagatctagtgaggccaggcatggtggctcacgccagtaatcccagcactttggaaggcccagtcaggtagatcactgaggtcaggagtttgagaccagcctggccaacatggcaaaaccccatctctactgaaaaatacaaaaattagctgggtgtggtggtccatgtcttagtcccagctactcaggagtctgacrcatgagactcacttgaacctgggaggcagaggttgcagtgagccttgatcgtgtcactgcaatccagcctgggtgacagagagactctggctcagaaaaataaaataaataaaataaaaaaagaaaataaaaataaaagatctagtgaaaatggccaacaataataagtaaacaaatattataaaacgctgtrggacatgaaaaagacaaaaaaaaaatgtggasgcagaaaacaccggaagtcaggactatsgtgtggtcagggaatgcctcaacgaagcagggacagttaagaggctgaatgccaagacatgaggaagtggcaaagaacatagcatgcggaaatgcccaccacttttggaaagaacttgacattttagaggaaaagagaagtggccagtgagtcttttgaagactgatctctgcagcctactcccatctcccccactctctcccccaccccgccccccagctccacagtggtgcacagggctcttttcactcccttacctccaccacaggtcgttgtgttatggcacagagccaacagcttttttccccttggttttgggtggatgagctagttctctcatattagaaaagagtagttggccaaatggaaaccttgaaatctacttaaacaatggagacctatccaatctgccttctcagaacatgtgtcttaggaaaaatgcctggactgttgaataaatgcaggagaaagtttgcagcatatgtgaaaagaaaaataaataaacccagagactcgatctgtggaagggacattctccccattggttacaatggaaaattcctcaagcacagcctggccaatgagcctgggcctacctgattcatcacacagctctgtcccaatctagcccttgattcagaaagatacaggggaaattttcccaaatactattccaaggcctcctgaaacaattttaagatcattccaaccgaaggcacaatgtcttctcatcattttgattcactaagagatgaactwagcttttccccactctgctcctactccaaattgtgccaatatccaagagaagctgcaatgtgtaactacaaaaggactgaatgttggaacctcggtgatagatacagctcatcccatggaagaaccagccacgacaacttgtactgaagtggattaaatcaacttgtacccgtcttcacctgttactaaaattttaaatgtggattttgaacaaacaagtgtataagtcttaagcactagatgaaaataaaatagaatctattgaaagttgaactgaactccccccaccacacacacacacacacacacacacacacacacacacacacacaaaataactatgtcaaggaacatttctgctcttttctcccagggatatgcagtcaatttctggagatgaggaagatgtcattttctatctaccagaagtatccatactgcatggaaatctaatgacaattcccaacctcagttaaggacttgtttttccatttttctgaacttcaaatactttctaaattgtgttagccgaagcattgtatgtatataattaactcataggtccctctgggcccatctagctaaacttgtggagcttaactgagcaaaacatttgctgatgtctctccctacagtgntacccattgaaatgaataccttctacaagatgaaacctaggaaatgtcgtttccaattggctttctastgattrgggttgatgtcttttccaaattggctttctagtgatttgggttgcttcattaaatgtttttggttgtttcataacaatagtaatctcattttctttcaaaagtagagtttgaaatttgggaaaacatgggtggggagggaattctayattttcttcctagttgaagtaggaagacaggtctcttttctgtattaattggactcctgaaattcccccagggtagcagtggctctctgtgggcacagggctcttatgcttatgttyctgtgcttcaatgtaccttccatgctgasagcaaatagaaggtgttcctgcacaagcaaaacctaacggagaggctgcaataatttgtccaaaacgaagtgcaaactgcaagggagagtggactttttcagactgatcctgtttactagtctggtgctttcctccacctgtgtagacacagatgctttattgaacaccagcctcctacagttagaaggtattttgactcttaggaatgggggaaccagttgcaaagttctggcccctgatccccctcctattcctactagagggcttaagataggctctgagcggcacttcccactttctcctctttttctgaagcttcgagccccaaacctcgccctttaaattcaccaagggaccacatgcatcatataagggtgaggaaaagggacctggatgtagacttcctgactatccaaaggaacctacttctctttgctgttctcaagttcaggcgtccggagaaaggcagggarctaggggctctgggtgctagcgtagacgtggcccttagctgagtggcgcgagaggggaggaggttggaagagcgcgtctatgcgttccacctgaacctgcaagctagtcgcttgctgcccaggtgccgattcgcggctgcatgcgccccactgcagcaaagagcagccgcagcctctgcctcggccaccactgctgctgggaaagagtcgtggggctgctgacgcggttgggaggagcctcgcctttaatgcaccagccgcctccagcctcctgcagcagcagcagcagcagcagcagcagcagctgcgagtgcgcgcgtgtgggtgtgagggtgagtgcgctggcgccggctgcagcgccctgcccagctccccgccagcttccctacccccgcctgccggagccgccctcccgtgggaccagcaccctcattccggccaggcaagcctgaatcctgtccctgccatctcgccactgcagctcgggtccagaaaggcaccattttgtcgcggctgcccgctctcccagggggaggagggatcttttttgcattttggagcggctgccaaggaggggaacctgttgggcatctccccagacccgcttgtgagcgcctccggggcgggcgggcgggaccagacccctcggggcacggcgtatcttggcacccggaggcagcggaggcaggcgcagcatcctcgctgggaactggagctggagtgagcgcaccgcgcgggaggagccgccgcagcctcgcagaacccgagtggaggaggtgacagctccattgccgggtttttattttttttctctccgcctccccgtctcctcctcaggctcggaccatggtgcagtcccactggctcccctgcccccctctcctgtgagactggctgcggggagggatcatggatacttgtctgccggcttctggttcccacgcaagtaagcctgctgtcaatggaggaggacattgatacccgcaaaatcaacaacagtttcctgcgcgaccacagctatgcgaccgaaggtaacgccagccccgccgcattccgccgttggggccgggcgcaagttgcggatcactgtgcttcctgggcagctgggcgcgtagtggcggagactcctccgggccctagggctggggcgggggctcggctggccccggcagccccagtgcacctckcatccatccgggctccgcgaggcgagctcggcgttcagcagcaggtggacccggcgcccacgggagttaaaatggccctcagggattaggctttttcagggtggggctctcgcccagaaagatgaccccaggaaggcagatgaccccttccccgagatgttcgcaggggtcttggggggagataagaagggaggggcccagtaggaccttggtcccccctccctgagcgaaacgatgttatgtctctcagtggctgcagggagggcaaggtttcatttcctgcccattcatctccccggccggccaggttacctgcttagacaatcaaaaccccaaaaagccctttgcagacgggcgaacctctttccttttggaagtgcattagcaaaaataaaaaggtggctggggaaatagtgctctggcgggcagcgaatgaggctgacacgtggggtgagcaacgcgatcggtggggcctttaaaaatcaccattatgaattctgcagcagtagtttctgctgaatcaacagccagcagaaagcaaaagggttcagcaagctgagctttgccaagaggtgaaattgtcgtctctccctctctcccagcttgttctgacataagcactagtgctgtgcgggcaggaagggaaagtcagcaggtggaatctcattctgccttttgtgtgtgaatagagagtakaggcatttttttcccccagtgccaaaacttttgcatttttgctttcattttctacctgtaggccttttatccttagccactcatacaaagtgttgcattatcacattgtaatatccatgcgagaaaatgtatgtggaaatgctttaggacaatgttgcaaggtgtattaatttaaaattattattcttggatgctaacatttctgtaatatttaatcaaatcaaaagactgctagagaaatgtgatggggggagtaaaagagttcaagctctgaaagaaataaaaagacacacacacatctgggggtaaaggtggcatcttctataaacatccctggaagttctagacagaaagaatgtccagtgctattgaaagtatattctccatttgtcatcatttttggagagcatcaagcccagtatgcccatggtgctagacagataaagcagagttgtaagctctggcttccaggagcttagagatggcttttaagatgtgcagcccatccctcccctatacagagcaccatacttaccgattctttttctgtgcatgatggcaacctgattgtaagatgttctccctcaatcttagtgctttgtcactgactcagtgacctgatagcacatgactaactctgtatctaagcatgtcatccaagagagaagttggccttgggtctgttggcttttgggggaacatttatttctgtttgtaaccacaaagaaagagagctgccttcatgttttcttgtatattacattatgcaggcaagagaaacttagcaagctgagaaaatgcccagagtggagctatgtgtacaggagtgtcaattgtgaagtgaagaaatcagttaaaaatggcattctttattgttttcagggcsctggatattaccgttgttcttatttttattccatttttgaaaactctgattctggatagaatatctaggttcayatagtcaaaaatagatatgagtttatagcaatgagatttctggcatgtgagaatcaacctctcagatttctttctctttctcaaacacacacacatactaatcacactcaaaactaacaaacctttatttcacagaagcttctaggttttaaaatctgatcttagagaaggtatgaaaagaaaaggaaaatagaacttaaacgatgtaaataccagaagttggatagaacaagaagttccctacagttttgacctattcgtttcagggaagattcatgcaattttgttgccagagggggaagagtccctgttcttccaatgaattccttaagaagtgttagtataccttgaaaaagcaccagatcaaaagactttttaaaaattctcctcactggggacttgccccacaagttttcttcccccttattaacttataccctcttactgggtggggaattagcttctagtccttccatagatcttgcttttctgtttcctttactatttctacattttcctcctacctgctcagttatgtcagattgttcttttttttcctccaaaatatctccttcacatgtatttctgaatttttcttctgtttgctcagatcattccacattgcagtgttctatttaaagctgaaaggtttttgctgtgtagttagtgtgaaggactctaaactcaatttgcattgtaagtggtgrctgcaggcaagttcatccagctaagagcaatgcaaatgctaaaggacactttcacccaagctccyctctctcagtctctttctctctctctgtctttctcaaaagaatgcatggtgtgcatttaataaataaatttcctaggacttttttttaattctgagcatgaaaattaccaccctcccctacctttcctcctcttttaaagttaacatctttgagcatcttctatgttccaagcactgtgctgagctctttatgtatagcatttcaatatatctaaaccctgttaaatggatgttgtcatttccattttcaaagaaggaaactgatgcaactgaggtctgaagatgttactaatttgccaaaagtcacacattcaatggaaaaccttgtcttcaaactcaagccagtgtctgaaggccaggttctcccactaggaaattctgcactacttcattttcctttaaccatcagctcttattctgggaaagattgcaatggttttatctcagtgtataagctatatttccatcaggcataaaatcctttgcagggaaaatttgaagtgtgtgtatggggttatatagaggaagggccttgggtagggttgaaatttcccacaaaaataaagtcaacacaatggtttgattttttttttcagatatggaaccccaggtttcctaaccagggattcatctctcaaatctctctatatgtgggtttcctgctatatttttaggcttctgttacagccaagtaaaaccctatctccattatagcagtctgtgagttttctagattaatcttcctactttcaaatggggccacagatagaccaaatattctacatagatggggtgttttaaaataactgctctgttctcagtttccttagctggaaagtgggaataacaatagaacctatgccaaaraaaaattatttgatgcagagaaagcactcaagcactcgggatatgcctaatacaaagcccacccttaattcattatagctgttattgktacttaatgtacttcctggttatattctggcaacaagtgggttccaccttccctcagaagcctttttaaaaaactgtcttgtttatacatattaaaggaagaacaagtttactattccaagtagctcctttcrattattgattcattctgcctttaattccttcaacaaatactgacgttttgcagaggtgataygggatgttccaatacagacgtggtctctgtcctcagggatctttcaatctagcaaaggagatagtatgagacaaataattttgcaaataaatatatagttaccaattgtgataagtgatatttaggaaaggcacaagatgccttggggtcataaggtggaaaggtggatctaatttagatcgggagttcaaggacagcctctcagacagctgaaactgagaactaaaggatgaatttgcaattaacaagacctgaaagcattttaggtagaagggacaataggtayaaaagcccagagagataaaatagcctaactgattcaaggaatggaaagatgactatggctaggaacagggagaagagtgataaaaatgagaatggagtctgcagttcattttgaaatgtaccagaagcaagaaagattaatgctaagagagagggatgggtaaatggatagacatatgataaagcaagtataaaatgttagtcactggccagccatggtggtgtatgcctgtaatcccagctactcagsaggctgaggcaggaaatcgcatgaacccaggaggcagaggttgcagtgagccgaggtcgcgacaccgcactccagtctggtgacagagcgagactccatctcaaaaaaaaagttaataactaaattgaggtggtgggtctatggataatcactgtaattttttttccactttgcagtctgtttgaattttcataataaaatgttgggggaaaaaaagactggagaagtattcagggaccagatcatatcaagccttgttgaccacaaggagtttggactctatccaaagatgaatggaaagccattaaggaaaagggaaacatgatcagatttgtttttctagaagtttaatctggctgctgtgtaggatggggttagagagccaggcatgtaatgaaaaagaatgaaagttgggagataattaggaggtcatggtgtgctccaggatggtggcatcagtagagatggagagaattagatggatttaagatacgtaatagagaaagattgcattgcacttacttactatgattgggtgcagatggagaaggtgatgtcaaggacaactcccagaattttgccatgaaaatggatgcataatggggcgcatcactaaaagcggaaacagactgaaaactgattagtttgagaagacagtgagacatctagtttcacagtgagacttgcaagtagacaattggatttctgggtctgaagctcaagagaaagacctggactagataataaatttgagattaaacatcaccagcatattaaaggtacttaaaactgtatgaatagatgagatgcctcagataagaacatttcagggcaaaatttgaaccaatgagtgagaaagtacaaggaagtggatcttggcttggtatgaagaaattgtagcaaaaaagtacctcacaatagaatagggccttggtaagcataaataaccacacactgatattattcaagtaatactataatatatggccatttctcagcaatgtggtaggataagaagagtccagtcttggatgagttgagtttagaacgtctccaggtttgagatctgagtgatttgtgaaatacattagctttttagggccacagagagtaaaagtgaggaagtaaagattcctcctccatcccccattccaaataagctcaagaaaggggaaacttataatgaataaagctgggaaggtacatgaaaatggcttttgatatgaagatgctgggaaggcattgaaaaaataaaagggggtagtgtcatatgatggagagctgcctcatagttccttaagttgctttggtatttgtatgcaaatgccagatcagaatgctgtttccaatgcatatggatgaatgtttgagctctctgctgttctcagagaaacctgaaatgcgaggtgagaagtagctgccttacactattgtaaatgacctttctggggatgggaaatgttctgctactaaacataataaccagaatgcattgaaaatcactagcaagtattcattattagcatccaggtccccaggggcaatcccaagccctttatgagtgctggtcagaaatgtaccaatgatcctggggtgaataatattaggccagtcctgtcaaaatattggtaatgcccaatgaaaagagcacagctgtagactgacattcctagactttggcgtttgcatttaagaagaaataggggtccaatttcgacacttagctgagggaaagaaactaaggtatcgcgagtactgtctattccaggcattttcctaggtatttcttatgtttactcawttaatctccatcaacaacccagagagaatggttgcattaacctcatttttaaaataagaaatttcaaggtacagagaaccaaaggaacttgcataacaaatacacatgtattacaaacatactcacttgtaagtggcataaccagattagagctcatgactgtgtggattcttggcacatgttctttgctcacccatgctgctcaggatcttttggagaaatgcaagttgtgctccaccctccacatatatmccattggcgcctggtcggtgctgctggatttacttgatctatcttctcctagcacagcagtgcacgtctctgggccttttccattatcccacagggaggragctgaattctacgacccagtaacagaattcttagctgacttactcctgtagatttcttctgttatataataagaacagaaaaaartgtttatggaattgagcaatcaagatgtgagaactagctggagttttttgaatagctttctccatgtcactcatccccagtgtaggacagtaagcatgcagctcccagactgagctgagctgagatggtcccgctgggccatctaggcacccactcttcccagctcatgacaactcatatagttgcctgggccacagcaakagaaatatgacrgaggcagctgtgggatggcagatgttcttttgcacataaatatgtagatgtctgaggcttcactttggccagagtggctctccagctggttcccctcatcttccattaataagaagacgattttgctttcacccaacttgtcatctttaccaccaaatttccttcttttgactccaatagaactctagaatcaggctgaaagtcagccccaacataactatctcgcagaaagcacagattatttttataagtccactaggaactttgtcagaaataacccaggaacctttgagttctcctgctccaagttcactgtggaaagagttaatagtgggaaatattaattgttaatgttcatagctttctttggagaaagggtcatcctgggtaatgagaaagggtgtgtgcttgtatgggggtagtcagactttcacttctgtgctttagaggtaaatgacttgatcgcttacaacaaatgttaaatgaagtggggtgggggtctgtgtgtaaggggaaaaaagatgtatggagtttaggaatctasaggggcccttatgaacaggttttaacctgagaaggatggggtctgttggacggagcgtggcgaagagtaccttacctgtgggaggatgtgtttcaggtgtactggcctttgtgcttggtgtattagtcagctcagactgcatttttaaaaacgccacatactgggttgcctaaataacagaaattttgttttctcacatttctggagtctggaagtccacgatcaaggtgccagcatggttggtttctggtgagttctctcttcccatgtatagccaacttcttgctgggtcctcatatggcctttctcctgtgtgcaagtgtgaaaagagagagcgcaatctctggcatttttttttcttcttgcaagggcaccagccccataagaccttatccttatgacctcatttaatcttaattatctccttaaaggacctatctccaaatacagtcacataggagttagggcttcaacatatagattggggtggaggggggcacaatttggtccataacactggggaactgaaaacctcctccatcaagcattgcttatcacactggtatgaatccttgctaagcaatgaacctgaagtggtcaaagaatggcaggccgcctcctccacttgacgtagaaggatcagcttgwtgtccctctacagacacacaagggtgtagagggtggcaaagctgtaaatgtctctaatagggaatattgtagcaagatgctgctgagagttcccaggtggtctgaaagatagaacttgggtccctaagtacaaaataccaccaggaaggaccctaccacagtgggagagccacacaggaaactcagtgaaactaacattgcttatgtagctttgtagaagtcaggttagggctagagacactcaagttgggaggtctgttggttcatgccaactgcattattataattcacatttccctctgcctttatgtttttatttataagtcaaataatactatattctttcttacttaaaaggattcaagcatgataagtaaataaagcatgaatcaccctccatcccatgcccatcccactttcctacccaaaggttaccattatcagtagttggtagacttcctcagagccatctttctattcatacatttaaatatacatgtacagatatatagttggggaggatgtttgcataaatgagtacacactgcccrttttatttgcactttgtttttctactagtgatacgtcttcaagatttttccatatcagaacacctacatctgtctcatgccttttaatggctgcacggtgctccatagtatgacagtaccacagtttatttagtagttccctgtggatagaaaatcgtttccagcttttatattacataagatgctgcagtgattatctgtgtatatgtgtttttgtttaaatgtcctccttcctgattttattatctttaaagctgagatgacagttcccatttcttagcaaaatggcaagaaaaaatcagaaatctgtggtcttctatttgttttctgtgtaaccttggatcagtcatttaaaccaagaacctgaatttcctaatgtagagaatgagaatacctgatctacctattcatatgtgcccagtactgtgtcttccaaaaccattgtggatttgaatgttaataattaataatgattgctggtagttatggagggctttctgtgcaccagtacaggcttagagccttaaagtatttttctcatgtaatccagtttacttgtataggctgatactgttcttatccccctttaaatgaaaagttaaagcagaataatatgattactagtccatagttacacaacagtgagtagaacagaagtcacatccaggtctatctgattccaaaccctgtattcttaaacttggcaaaaattcatcacaatgtagtatatgaacacctgtttaaaagaacagttatgatgttgatagggaaaagatgattcatttttctaaaaaatattcttctgaatcaatcaatacaagggtccaatttctaccaaggatttgaaaatgaactggggggaaatggaaaggcaatgcagtatcgtaagcagttatgtggaatgcacatcagaagacctgggtaggattccagtcctgctaccataatttgtcacttttattctctgggcttcagtttcctaagctactataatgaggttgaagatgggggagggaaggcatgctctctacagacttttctgactctcagtttctatgaggcattatttctgtatttgtgatcatctaggtctctttgatatgttctgatgttcacctcaggggtgagactgggaaaacayggccataggctttaaatgaccccagaaattccaggtctggctgtacttcctgggtcaaatcatccttctggcaagaaggttctggtgcagccaagaggcagagccagaaagggaaacttctctttgccaaaagctgctgcagatggaggagccagtctgtctgggcagccatgactttgagaggagccatttggcaaagttgttggcaggagctgccttgcagcatgaatgctggagacagtcctgggctggagtgaatcagggactcagcaaaggtggctggtggaacaaataaccatctggtgagcagggtgctgctcatcttgccacactgatggggaagagcaagtgccaatcaatgaggttaagctckcaatgacatgatctgacaggcacaatagaatttctctcctgttattttatactccatggtgggggttataaactccaagggagcataattttttcagaaaccaggaaggccccaatttcttccactattataaagtaggaaagaaaatttaacaattcaaacaaaaattatttattgccaagtgctatgtaggaagttctggggcatatggtgaagtataagcctatagtcttgttctcaaatgtctttccatctatttgggcaggtgacactccgtccttctcaaaatataattaaccacagaagccagggtrcgtgaaactgtgtcctgtttatctctctgttatcatgaggtggccgaagtggtggaatcagagcccacctggctctagacacacctctggctatgctagttctgtggccttgggcaggtcacttcatcttgctgagtgttttcttgccaacaaaaatatggcaggggatgaggcaacatgttactatttatatgtgataaataaataaatacraaagawtccctctctactccatgcatttgggaccaatagttgacagtaaacttgaaaagttaaggcaaggagtcataaaaaataacataccatttaaatttactaatttcaatgaaaggcccgatgaagaatcaagaccttacctttgagtatggatctgctgattaggggttgtaatatttttcttgcatgaactgtcccccaaatgacaaagaccatgcccaattttgatttccttgaggttgaacaagaccatagatatcgcagaagcaatcttactacagaatacttctagatttttgtaattgttccccaatttttatatctcctacttttaatttgacaatgctttgtcaagtcttttgaaattcttcaactgacttttcatatgaaacaatcatcctccttttaacactattcttctcattacctttcatgatatttaattaactaacaagtataacttgcatcaggagatttggaaacaaacacaaatgactctcagtaaacatgcaactcaacctgaaggagcagaagtttgcctatgtaccagagattagtctactcaattagctgtgagtacttataaaggatgttgtaggcctgttttacagaaagaatggaaggcactttttcttcttggagtgtcagctacttggaggtctgttaaaaggacttctgctgtaattatgatcatgaggaagagccactatatactgagtgcttgcaatgtagcaggaatcaggttaagtattctggatgtactctatgtgatatactatgtattatgtatctatggtatactacatatgatgtatatatgatatagatgcctctgtgtgcatatatatgtgtgtgtatatatatgtatgtatctgcgtgtgtgtatatatatataatttaatcttcaccacaaccctcaaaagtatgtataattagagctgaattaggtgagactttagatcttattcaccattgtttatccatctcctagtatagtatctggtgaaaaagcactcattacacacttatggagtgaaagagaaaatagatttctactttgctgatgataaaactgaggcttagagaatttgtgtcatctttcccagtatcaatcagcagacccaggacttgaatgcaggtatgtctgacataaaaatatatgttattaagagcaaactgacgtacaatacaataatttttctgtacaaagttattggacatatactttggatctcatattgcctatgaatattctaatagaatgaaactttggtattatctccattttgtaaaaktatgtcgatgttctagagcagggatcagtaaactcttcctgtagagggtcagatgataagtattttagcctttgctgaccatacagcctttgtcccagctactcaattcttccattgtagtatgtggacatggctgtattctagtgaaactctrtttacaaaatcaaggagtagcctgtagaccaycatttgctgacccctgttctagaagagtaccgggaacctaatagaggtccaaacagtattaatcgtctaagtgagtggctgcagtaagtgctagagggaagctcacctcaccagaagtggttaagtggggaggtggggccttggtaggatgctggcaggtagagatgggtggcaatggctttcctcattggaggcagagtcttgtgtgatgttaggaggcaaaagtatgcgaggaaggtggcatgttgttttaacaagtgagctggagattagagatgtaatggaatgaatgtttgacagctcattagagtcctcacacatagccatatcccttctaatcagtgtctgtccaatagttcactcagtagttattttaaaaacatttattatatattaggcactgtgctaaaaaacctaggtataaaatatttaaaaattaaatgtagaccctgctctcacagaacttgccttctattgggaatatatacgttaaaaaacacacgtgaatatgaatatgaaacctgttaaagaaggaagatcctttaagagaataaagtacatgttcattatgaaaattttgactgtacagaaaattctaaaagagaaaatcaaatttacttctagctgtgccagagacagtcattataaacatttttgatgtgctatatttccttccaggctcakgtgtgtgtgtgtgtgtgtgtgtgtgtgtgtgtcagagacaaagagagagatgaatggagaatgctaggattctatgcaaaacaacatcatctatagggtttgtttgtttgcttttgccccagacacaaactgttagcatttttctatgatattctatagttgaaccacaattttgcctgttgcctaataatgaaagtttagattatttccaatatttgctatactaattctgaaatatataaataatgtatttggttatgttatagactctaaatcatgtctttggttatgttttagaacaagtttctaaaagtagcttactgggttaaatggtatgaacaattatgtttctagatgataggactaaattaccttctaaaatggctatcccaaggaatacctttgtaattactgtaggcgttttccacttttgttctatccatattttgcttccacctcacattgtcacaaattttcaaggtgcttaagtttatcctaggraacttatgtggggtgaagatcagagaaaaaattcttaaagatacagccattgaattttaatttgatcccattgcccttctaccccscaaagctccaggtacttcgaccctttctgagaggagaggcaggctcaattctcagcctctgccattaagcacatgggtgagtagtttgtaccctgggattcagttgcccacctatattaaataaaattactttcatggttccagggcatcatttgtagatgagtatatggaacctggtgacccagaaatgttaattttcttcaaactggtgagtaggtaacttcaaagaatgattgacccagtatgacaaccagtatggttgtttaatgagctagtctctcatggggtacaaatttgacatttcggaaagctgwgcttttttttttttttttttttttttttggttaatactatgtgtggttgaatgaaatttgaacccaggcaaatctgaaaaaaattagactttaactatcaatgactttagacttccagacatctctagtcttctcccaaaactggcactattgtttaatctaaataaaaagtacaaatcttataaattaccactgtagttaacattctatagttgaaccataattttactagccacctaatgatggaagtttagattctttccaatattgctgtaataattgtgaaatagataaataatggcatgactctaaaccgtgtctttattttttagaacaagtttctaaaggcaagattactggattaaatggtatgaacaattatgtttctagatgataggaataaatttccttctaaaatcgctgttccaaggaatacctttgtaattgctatggcccttttccacttttgytctgtccatattttcagtgagcgatttttagtccactttcaaagtatattggctgtctgcatttcagcagtctttgggggttacagttgggagtcggtgtgaaatctcaattcatttagcctgagtatttatttagaacattcttcctctttgaagtgtcttgggttattgaaataaaaatattaagctctttgaggcatttttttaatttaaaaaagtttatacaatattttaaaaattatacgcaggataagcacataaaatttaaadgatggatggatggatggatggatggatggatggatggatggatagatggatggatgggcagttgaatggataaatatttgtggtggttagtaggtgacccagttgccttctcagaggactaaaagtgttaaagcatcttctagaaactccaagtttcaatggagatttgggggtgcaatattaaaatctacttttcatcctcttcctcttctgtcttggagccaagggtaggtgggattaattagagtagcrcagatctgtagggacatgcaaactggaactcatcaatggtgccagtttaaaaggagaagatatgacaggcagagaagagcttccctagaaccctgaactatcagaagagattaggacagtttagtgtttccagctgacatatcctgcaatgactaatttctaatcccttttcctattctgtaggattagcctgggtgaaactgacatactatgttttagaagtcaagaccttctggtcacttaataggatatagagggaaagttttgggtgcagttccatttgtgaacaagatgtatttttctgtaggttctctgaccccttctggggtcagagatcagaaacttggtragcacccaccaggacctacaaatctctgtgcactgtggaaaaaaaaaaaagcaaaagcagtctgattatcgtattgtacttcagctggcaacatgcttactcagtcctcaagcttcctcagcacaatttgagatggaaattttctgatcagaatttttcctataagtcttagaaacttggatttgagcccattatgtaagccagggttttttttttttttttttccaattacttgacaagcaggttgcctttgagtcactcatatgaatggccttgatgtagacattggcacatgctgaaaaggcaaaaaaaaaaaaaaatttacttttctttgaccctttaagaagattagtctgttcacagttttctcctgtgcttataaaccttcatgtttcctgcctrtcctctcatcttttaagtctctcctaattgatcttcaaagcattgaggctggcttgtgctgggtcctcactactccaggccattcctgcttccccttccctggtacytgcaaggcctgcctccagtccacattttcctgtgaagtttttcctgaattcctcaagttstytgatcaccacagcaatcctatgagcttatagatattttccccatttcacgaatgtggcaactgaggtccaagttcagacagctagatctaaagacacagatcctgcacgtcatctccccaacaagacagacactccaagaaggcagtgaccacatctttccctctagtttaccatacaaaggacagtagggttcttggcacacaggtgcttagtaatggtttttgaatttgatttcaatttgagagtagattaacagcatttctgtagttaggagagcagccagttacatattcttttcttgggagtttagacttgcaggtccctctgaatgaggtaaagccaggtcctcctaccccaactaaagtttaaagatgcaggggagatgtcaaaagatgtgatctgagatttctgcaatcacttggaaactgtactggctaattaagatcataatagattatttattctttcattcactcrtgtttatgcgtgtgttctttcactctttaaccattcagcaggtatttactgagcaactgaaacttcattcatattatatgagttattacatgataatatcaataagaaaaattatgtgaaagtttattaatattggctatgagggggatgaaagcagcaagccaaaaaaaaaaaaaaacaatgctgtattttaaagaaagtcaaaggtagcttcatccatgataaaaagggtatgtaaagtatgatttctcttatataaaattttatttgtatagacaaagaattccatggaaaaatggcaacaaaaatatattgataactcaggctgatgaaattttargtaacttctactgtttttatattgtytataatgtatgacagttttaaataaatatatacattgtttatataataaaaacagtaaggctgccattgtggtgagaaacaattcatggagtgtctgctatgtgactagtctctgggaattaatgtagcgaatattcacctgagttcttccttttactttgaagacacattagtttgacgacgggcgcggtggctcacgcctgtaatcccagaactttgggaggctgagctgggtggatcacgaggtcaggagattgagactatcctggttaacacggtgaaaccccacctctactaaaaatataggaaattaggctgggcgcggtggctcacacctgtaatcccagcactttgggaggccgagctgggcggatcatgaggtcaggagatcgacaccatcctggctaacacggtgaaaccctgtctccacaaaaaatacaaaaaaattagccgggcgtggtggcgggcacctgtagtcccagctactcaggaggctgaggcaggagaatgacatgaaccygggagtcagaggttgcaatgagccgagatcgcgccactgcactccagcccgagcgacagaggagactcagtctcaaaaaaaaaaaaaaaaaaarraaaaaattcagtttgaatgctggaagaggagtgataagtgaacactgtgactgtcagcttctatagcaagaatcctttttaaggtctgtcacctgaagatctgggtgaaaaggctttagcaatgagcctggcccttagatttatagcccctttggtccttatgtcttggctgcracaagaaagctaagactatatctctgatctcagccaatcattttataaggggactgagcaayggtctggatgagtcagtgaaaatcaattgcaatgatggaaaactcatctaagaaaaaatgtcctagagccagtgggtcagagccagcccctctgcacatgaaagatttcagtctgtgtttattgacacagagggtggttttaattaccctgaaggaatttctggcatgttttgccaaagccagttttaaaatgtttagtcagtggattagtgactatcggacctactggagaggtctgcatatggggcagcaggtcaagtgtagtgtatggcaatgaggctgttaaagacagagtatgggtacattttgtcagagaaacataggagaatactaccatccactcataagatgatcttgctttagaaagtgtggtgtgttttctgtgtcaaaggcttgatttcctttcttggtttcatgatctaagcaatctcatgacctctgtttttgatatactgaaaagggaacatgggtaagatggtctagagccagagtttgagtgattaatcaagcaatcagttcaagccacaactagcaacttgaaagagtgaatatgcttttctaaatttgataggcccagggaaaatgtatacttaaaatagcatgatggcttttgttttacctgtttgtgtggacctgtaaaacgttttaagatgagagctataaaaggaaaagcaggatggtggtgccacatcacaaagcaattttaatctgctagataccttgagaggaaaccatagtccaagataaaggtaaaatcactagaaaaattgttttcctgatttttgtgtttttgctcttataccttttggttgaatctctccaataagatggaaaaacacttaatagtgctwaataccatattttcttcatctctccaaggtaaacttcagatagaatttcttttttttccctacacaaaactgtccttcatactacctcctttccctgatgttctaatctatacataggccacgttctactctctgatgtagacaagcaagagacttggcaccttgaaatttgaatagaaacccaaagagcccatgttgttgagctgctatttatgtcctgttcatttacatggtagttttgtgatattccttgttgctttcacagaaaggtttctcaggctatttcataccaacatgaacttatctggggggtttgccacgcttactggctcttgactccctctttttttaaaacttttattttaggtttagaagtacatgtgtaggattgttagatagataagctgcatgtcacaggggtttgcaacatgcacattatttggttacccaggtaataaatatcttactccctcttaaccatcaaaacaactgatcaaacaattcagttgtctttggcactgctgatagttttcaactcttaagaattgccccttcctcttgmttttaaattagttcttcaataaaccaacttctccaaacaggttgatacattagcagctaaatattaggcaaggaaggagttatgtaaaatagtaatgtcatcttatacttgtgggaggggttttgtatttctgcaaagcattttcacagctcttatctactctgctcaacaaatataaagagtaaatttcctttattctcattttttcagtgagaaaactgagatccagtggagttaatcaacttgtytatgatcacatacctagtttatggtggagaaaagactgaggtttagagactgattcataaaaccgagctctttctatgatatyggaatatcagataaatcaataaactcccaactagatgaaatcttatagtcttggaaaaaagtgcatctgcttgctgactctctgtaagacactgaccactaacatttttagaacaaggttctttgggtggaacaacttggtgtgctttacacctttgattttggggcttgggcatgggttgtgtctcattcctaaagtcactcattgttactcttgccaagtggaagagtctctggaaccacattcctggacagtggtgcaagccttaaagcactagggtttggtgataataaagacatagagaagccagtggatttacttttatgtcatggctgtatattgcgctcaagtatctaactcacagatatctaccatttggaatgagcaagaaaataggtaagaaaaacaatggattgatcatcaccaacaccattctgatccccagaaactagtcactaatttactagtgactagtaaacaacatttactgagtactgtgtgtattttttttgcctcatttccattttattatgtaagcagtgaaatctttgataagaagatgggctcattacttaaatcctctaactgcagttgcccctatgtaaagttaagacaatagtagtaactactttccatggttgttgtgaggattaagtgagataatacttgtacatggctagttcagtccctgacacagattaaacattcagtgagtagttggttgtttttagtagttttagaagacttaagtggtcataagtattatttgcactggaccacatacatttttaccctcccaaccctagagtttagaattatatgaaaaaagtagtcaagaaaacagactctggagatgactgggtttgtatcctggctccaccacttgctagtccttgggcaagttatttaacctctctaagcccaggtgcctcatctgtaaaataaagataacaatgcttaacctcataaggctattgtaagtattaaaagtgacggtgcctgtaatgtgctcatgacagtcccaggaaaatagtaggtagtaattgctaaatgttaagctgtatttttattaatgttagtacagttggctgggcatggtggctyatgcctgtaatcccagcactttgggaggccaaaggcaggcggatcacctgaggtcgggagttcgagaccagcctgaccaacatggagaaaccctgtctctactaaaaatacaaagttagccaggtgtggtggcacatgcctgtaatcccagctactagggaggctgaggcaggagaattgcttgaacctgggaggcggaggttgcaatgagccgagatcgtgccattgcactccagcctgggcaacaagagcaaaactccatctcaaaaaaaaaaaaaaattagtacagttatgtatatgtcttaagatattaccgttagaagacagttgttttgattacaaaacagaggacaaataagttaatacactaaccttaatctttgatccagtatcagtactggctggtggtgattttatctcttttaaataatctgttaggttggattctttttctgaatatgaaatgaaacattgaggaaactaaaactcattatctactccatgcaccatcagcaggatatttaaggataataaatttaagatactaaaaaattaacaataatggactaattatgaaccttttgttctatattagtggtatgttgaagcttcccattaaggcctaattttttttaatcttacaygtttattttgaatatttcttcttatatcacctttttcatagtttctcgtaggatataacctcatacttctgaacgcttgcagagaaatggggccatttctaacgagtgaggtgacttacttctgctcctgaatagttcctattgcatagaagttgttckgcaccagagcattctctttcacccactgctcctagccctgcaccataaaaccctaccccaaacgctgagtatcctgtccacaggaccctactttggctatatgaagccagctctcctgatcactacagcctcttcaaaactccctagaggtcatacagcagctgttttcaaactttaacgtgcattagaatcacctgaagtatttgttaaatacaaggttccaggctccaccccctcaagcttagaataggtctataggcctgtgagtttgattttttcagtttcccaggtaatcctactgctgctgatgatgatcaggagcaacactttgagaccgtggctctctgtctgtcttctcaagtgagtaggcagtccacttcaggtcgacggggctgaggcaaggaagcttttacagtgttgattgtgttaccttgttagcctggattttgacaggcctggagcaaactctcccaaagagatggtagggggtatgtggaaagtatgtaaatgcacctgtatgttaccaaaagttgaagcatcactacctcctggagtctggatctgaaccccatgtttgtcacaggagccaagggagaacccaagacagagaatagtggcccaataatgaagcatgaattatccagatgaaaacacctatggaaataaaggtattcgtattattatttatacctactcttcttgataaagtagcagtatagaagtgttaaatagttccaattgcttaaaatttgttccgtgggacacaagttaatttacattttttaaatagttccagttgcttaaaatttgttccgtaggacacaarttaatttacattttttaaatagttattgtacataggaagcatagtttgatttactgttttaagaacaagaacatattttgaccaaatgtacatggggatgatataactggttataaaattaccaggagagagagtgttggytaaacaagaatagagcctgctttattgatgttaggtttgtygaataagctagagaacaaagtagatatattaactgctcaaacaaagaaaaagagcttggggtcaagacacaaagaaaaagagcttgggstcaagaggcaaagaaagacaatatgggcatcttactttgaatataacgaagaataaaaggtatcactgaacaggtaatttccaatgagaaaatagatctagaaatcactgtgtaggaaaaacaacttctcacctgtatcaaatattctaaagccctttmattattaactcctaagtagttacacttgatttggatgaagtagcatgaaggcttctgctaggcttttttattcatttctcgatacagtgtgtggtgaggctttagctttacagcctccacatttggctatattttgggataatggaaaataaaatttaatacaaaagaactgtattttgatttaagaaagagaatcatcagagattctctttagaggtggagtttgtaacagagtttgtatgaaccctgagagagatcaaagagtacaacattcagaagagaagagctccctttaataaaaggaacgaagagggaaaaaggctctagataaatattttatcatagagctaataaaatttaaaaggtggtcacagttcaaaaagggaagaaaacaaaaagcaggtatgtgtgtatgtgtatgtatactgtgtttgtgtctgtatgcatatatgtttgtgaatattctccatcagactatggataaagatgtgtgaggcatttgtgtcctaagggaactatgcaatgttagcattatgcatttatagagactccatgcaggtgatatttttaaatgtgtttttatataaaataataagagcaggttttgcttttaaatagtgttggtgatgtgaggtagagttcagctcttcccttgctattgaaaaattaccttttgctctctggtctatttgaataaaaggcttacatctgttgtaatttcaatgtacgattttttttccttcctaccaactaagtaacactttcagtgcattctaatataatattgattgggggtttgagttttatttggtttgcccttgatgatgttactttaatgagatgaaactgaatagctttgagtggatttccctggagcttccaacttttatgccccctattcctcctccaagatggagggagaaaaaaaatggaagtattttgttatttggtcaaattttacgacttgtgtcatatcagactcaaaatttctaaaaacataaaaactgcgagagacagttcagagtccaaattttaagagcttgtcgtgaagaatagccaggataaatacctgcttttcactgtgcctcatcaagtccaaatgtttctgaaaaatcccttcaaagtacaaagacagtgcccttctccaaatttggagggttggtgactatataagtattgtgcacagcttagcgatcagtgtgaggtacaaggtgagtgtgtgtctatacacacgtgcttgtgttttaatataatgtaagaatcacttcaaggtgtcattttcacaagtttagttactttcttcagaaattgaatctattagaatctggttaagactgccttgatgaaaagaggttggtcaatgggtacaaatatacggttagataaaaggtataaattctaatgtttgatagcagagtacagtgactgtagttagcaacaatgtattgcatatttcaaagaagccagaagagagaatttgaaatgtccccaacacatagaaataataaatactcaaggtgataaataacccgaataccataacttgatcattatacattctatgcatgtaataaaatatcacatgtaccccataaatatgtaacatattatgtattttaaaaattgccttgaatttctgacatgagattatgattatttaagagcagtataagacatgaagccwtgtagggctctctctgattttctaaaatccattccagtgtgaaataataatttaatgtgtgtcagcagattgggaatgaagagtctggcatccatccttttacttattaagtatttattgtgcacttactatgtgtctggtgctgtactcggtgctggggatgcaaaggtttagtatatagacctggtctctactgttaaggaacctgtggtttagtaggggacacatacaggacaacaggcaattataatgcagaatgagaggttctctgatggaggaagtacaagagaatgtgaaatgacataagagggctcagagcagggctcatgaggaagcagatggctaaactgagacctgaaggatgaggaggagggaagaagaatgaaaagtattccaagcagggagaatggtagtcaagatgatggttagtcccacctcagttatttagtaattgggtgacttcaggaaaaagtctatcgtagatattttattttccttattctgtggaagatggagatggtggccatagtggatactgctgctggtggaaaaaaaaaatgatagcagttaatatttattgagcactaattatgtgccatgtagtgtactaagccctttacatgcattagttactcaattagggttttgaaatcaccttttgaggtaggcatcattattatctgtttcacagataagcaaaaagaagctcagaaaggttaagaaatttgctcaaagtcaccttattagcagtagaaaagccaggatttgaaaacagacaagtttaacttagaacctgtgttttgcaccattactatactattcataatctaactttcataagctgatatagagatgagcaggataatggattaaaaggactttttaaactacatggaactctatactatcattatgcattttaaactggggcatgaatcacgtggttggtagctagtccagaataaaaagtaaaaatgattgcagcaatatatgggctgccatttcttgatttgttagcaatgcctctaattctatggcctcaacacattagtagtcaaaagtggcatttcctaggggacatttttttgaagcaacagaacattagataagttggaccatgggtttgctcctaaatggcaactgctatgttagaaagttctcaaacattcctgagatctttaatctctgttaatcactccatgcccctctgtgacgactgctcagcacaaaatgaaatggaggcttggcaattatccaattcctttgaagaatcttgcctcttaatgctgataatccaaagctctaattgcacttttaaaaattctagattatcaggttcactcaggtatacatactctctactctgcctccgcttttttgtcaaatagacctttttcctgtcacttctatgtttctgataattcccaatgtgctccctgcatttatctgtactctaatcagccatcgtattgtgaacttaggaccgtctatactattgtcacataagcaggttcatgttgctggccaacacattagcagtcattgggaattgttsagaatgtttggagagaggtggtcacacaatcttttggcacaaagagcatgtctccactacaaaggcaaagactggttctacagtaggcggaaccacaatgaaccaaaataatgaattcttctgcatcatagttcgattctagaggctaattgttaatttaagtcctgctcgtggcctgataacggggctttccttttggaaacttgactgagctagtgtgaaaggcaagactgttattcagatatactagtgaaatgcaaacagtttcacatattaatggtcactaatgacctgtaatcaggctatgatttgttaggttaaaaacaaaggcatgattagtttatttgttcaggagtgtaaacagagggctttgtcaatctgcagattgttcttctccattggagacagtaggctggagcattcctcttgagctgtggcatttagggactgcattttcttttcttgagattctcccagcttcctgtcccctcataagcctgcagccttaatcaaaatggaatgaagaggatgctgttattggtcccctttctctgtggctttggtttttgataagtgagccactttaattttaatttttttctttcagctccactctggtctcrtgcttcaaatagctaattttctcaaagcatcaccatttcttcagcaaacatttaacacataattgaggtcaaattatgctccaaatgctatcctagacctcaaggattttaatgattatcaagagaatcctaacccaatctgaaaaatttacaacttctccacagatgtcgtaagattttctgtaccactaacaactgcttgtaaacttatcactaaaaaaaaaatgaagactctcttgaaatgaaacagctgctctgttgagatatgcatcttaaagagcaaggcactttgatcttttggggtgcatcaaagctgacaatagagattttgaggtgttatagtgactccttagaaaaggtataccttgtgttttgcctacacttatttaatttgagaaagtgagtatatttaaattcttataggaaaccatggcattaaaacagaaaattctttactccttcatcaagtaaaaagaaaagactgtgatctacctggtaccacgaagcaataatgatgcaggttatcccagtgaggcatttggatcacttacaatcatgatgaagcaatgggcatgatctcactcacatggaacaggatctctttccttgttagcaytaatagcaatcagcaatcattttatttactcatttgtgtgttggttatcctctcttcttgaaggtgagcacctgtctctcttgcctagtgtgtatcccaggctctaacacagtgcctggaatctagtaaatatgctcagtaaatatttgttaaatgttgaatgaaatccaaggccaatgatgagagcttgagcccaatagtagcatttgagatattgtgaaataaagaaaaattacttaataaacagatctctgagggacaggattaggagatgattggcaccattgtgaacctttactgcatgagattgtttcttcatgtcctcttatgtccacttctatgtaatattgaataatattcatttcgatatgataaaaaggacctcatgtttatttggaaactaccaaacctggcagtgatgtttatttactcatccttggggtgaccaatcaaatttattatgtgaagtgacatattcttctgaatccaaagaggactttaatattctagaaagtctttacagcagtatggatagattgcgtggtcatttttcagacatttacttgataggtgtttattgggcacttattgtataccagctatggggttagataccaggaatatggagtgacaagaccctctggggaaatatattaataaagaataataaagataaatgtacaattgcaaccgtgacaagcactctgaaggagttagtagtactctgagagtgtgtaataagaggattattggacctagacagggaaggcttccctggtgaaagaataattgctaaatccgaaagtcataataagagttagctctgttgaagaggagatgggaagatgacccaggcagggagaactgcatgtacaagggctttatggtagtagcagtagagagagtgtgtgttcaaaaagtgaaaggtggccagtgtggcttaagttcccacaggatggacattagacagaagccacatcttgcagagtcttgcaaaaatatatgagccatttttgctttttatcttatgagtaacaggaagccatttaaatgcttaaatgtagggaagattggggaaagtgaccaagtttgcttttcaaaaatactatkctggctgcagtgcaaagaatagattggaaagggtctagaatagatctaaagagacacgtgatttactcasatgaaactgacacaaaatgtacataatatatgcccacgtgaagcagtccctgcataaagcatgtaccctggcaaaagattcaagatgagctcccccatggtataatatagacctcttcaaattcctctgtgtcacccacacacgcttacccagacataaattagcatcgttaatgcagagtgtcacattagagcccagttatacttccagctgatgcatcactttagcacctttccctttgtactttaccctccaccttcaaaggctgttctcaggtcttattttccttcctagaagtgtgagattggtttttctgctgtgctattggagtgatcctccacttagactctaatctgccatggctttgtgcctgtttgtcaggaacttygaggatgtattaagatattatacagggtagaagctctattttgacaatgattatgcctattatctattttaataaatgtaaattgctgtggagaaacaaaccattttatgccacttgaatccttttcaaggaagcctgaatcctttttgcatggcttagatgtattactgtcattttcccttcactgggttgaataaaagcacttaaatcagacctttgttagtgcaccctcttgtactgtttgccctaataaattgttgtgattttagtctttgaaatccgtattttgtaacatttgcaaatttatctgtagtcccttccagaattgagattatggagtaaattcaacagtaagtcaacatgtacattatatgtgccaagcactatacttgggatacagcagtgattaaagcactaattctgcctttaagaagcttacagtcatttctcactagtggagtgagaatttacagataagcaagaggaggatgttagaatgctacatgtggtaatgaattaaagttagagacatcaacaagaacccctgcttaactttatatattcacaagtgactacatatagaaatatttatgtagatatacatagggttatatgcacacatatatttctttctgtgtcagctgagagggcctaaaagaaatggcatcccagtagcaactagcacccagatcttgatttctaaaaccattctttaataaaaggaaccaggaattcttgaagaaatgtctgatgctactagtagcaaaggaagtatatgagtctggagcctcttatagaaccagaaagtaaagaagtactgaaaaaaaaggaaaaaagcctgcactgatggaggtatgtcaaaaggacaccgaaatcaactrgaagagctcctaatggccaaagtggaacaatccgagcaataaaatatagcattgaattctatcccaaagtataaaatcaatatgcataaattcatactggtataagtaaataattgaataaataggagaggaggagaaaatctcccatgcagaactccagataaattgtgcagataacataccctcaaggaagacagcaagttggcatagctccctaagccttaagggtgagctgtacatcatgacttctttctaagggtgcagagtacagtttggaggagaggggagtaactttacagtggagaaacctgacaaacatttcttcagccaggtgatcaagtccaacatgaaaataaggcatgttgatataggtacctttgattgaygtgataggatggaaatggyactttatctctgtggtcttcaatcacgagaaaaacatcaaataaattccactggaggagcatcctacagtataccttactgctattcctcaaaactgtcaagatcatcaaaggtaaggtaagtctgagaaactgccacagcctcaaggagcctgaggagccatgacaactaactgtaatgtactatcctgggtaggatcctagagtagaaaaaggacattagaaaattaagcaaatctgaatgaactatggactttggttaatgattacataccaatattgcttcattacttataaaaacgtaccacactaacataagatattcacaataggagaaatcctgcaagaggtatagaagagctctctgtactatctgttccatttttctgtcaatctaaatctatttttaaaaataaaatctgttaataagataaaaaaaactaaagaataagaaacatacagtctagtagggggagccagtaagttggtaggcgactgtaacgcaggtaaaatgacggagtatggacagctattgggaaaaacatgatgtggcatctaacttgtcttttaaatcctgatatggtgactttgggaaaattccctaaacttgctgagcttttgtttcctcatctctaaaatggtgataacacctgcacaagtcaacataggctgccaagccaagccgcaggagctcgtatcccctgctatggggctgggtgatttactaaatccatctgggctttagttccccatcaatgaattggataataagagaataatataataggaaaacagtaaatacctaccttagggagttttcctgaagcctgagaaaatatatttaaagtacttgaaacaagtcttggcacacaggacttaaatgctgctgctgctgtctgctcacaggtttgtggtgaggattcagtggcagaattgtggagagtgcttagtgcacgcctaggtttgggcatgtggcttgtgttctacatccaccaccaacagagcacaagccctgtggtgggttcctggaggccaggagatgctttcccttgcaaggcaggcacctatgtaccagacacacctgctgcttctaaccttaagctgagaatagagtagaagttgaccagataaaaggagagtaatggatgtgggttctgtaaaaggagcaaaatccaaaaaccaaaagaagcatggcacctttacagaacagtggagttcagaatgactggtgtgaggagcctaagaggaggaggaagtaggcaagaggaggaagtaagtctattatgtcaggaattaaaggctgaattgaagatttgaactttatcctggggttagtggacaactacaggcaggtcaagcaagaaggcagcatgtaagacttttacactgtctattgttggaaaacaatgagatagaggtagaagaccagttaggaagttacttcagtcatacagatcagttgagagattacggtggcctagatgatggtagtagctctggaagtagaattaaaggatttgaacagtagtgtaaataatgattctaaaattatrtgaagatgttttcccacccatagtctgatgtattatagtttatgatacttgaacaatgttctaagatctgcatgagataagaatactgtagaataacataagaatttaaggcagtggctttgagacttctaaatatttttcactctcaatatataccattataggcaggtttaagaaaaagtcataagcattaaaatcagattaactctgaaatgatgagagaatagaggaatattctagaccagcatcattccaagagatctaacataagccacatatgtaattttaattttttagtagctacttttaaaaaaaataaagaatacagataaaattaatttttttttttgagacagagtctctctctgttgcccaggctcgagtgcagtggcaagatctaggctcactgcaacctccacctcccaggttcaagcgattctcctgcctcagcctcctgagtagctggggttgcaggcacgtgccaccatgcccagctgatttttgtatttttagtagagacggggtttcaccatgttggtcaggctggtctcaaactcctgacctcatgatccacccgtctcggcctcccaaagtgctgggattacaggcgtgagccactgtgcctgacttttactattattattttttgaaatggagtctcactctgtcgcccaggctggagtgtggtggcgcaatcttggctcactgcaacctctgcctcccaggttcaagtgactctcctgcctcagcctcctgagtagctaggattacaggtgcacaccaccatgcccagctaatttttgtatttcttgtagagacgggttttgccttgttgcccaggctggtcacgaactcctgggctcaagcagtccactcacctcagcctcccaaagtgctgggtttacaggygtgagccactgcacctggccagataaaattaattttaatattttaatccaatgtatcaaaaatattattttaatatgtaatcaaaatgacaattatgagatgttacattctttttctcatgttgtcttcagaactcagtgtatattttactcttacagcacattgaattcagactggtgtcatttcaagtgagcaatagtggcccgtggttagtggctactstgttgcacagtacaggtctggagctcccaaagttagtcaaaaatagtttagatttacacttgctggaggaattctttttcaaaacaagttaatcaacattcctattctagtacatgcacatgggaaacagaatttagtgtacatactcaaattgcctatttcactccatgtatatttttcacgcactcactgtatggtcatggagcatcaactaygttagcatgagtgatggttcacacactggagctctaatcatgagctgaccacgcacagtgtctgtycttcagcttacacctttatggaggagacatgaataaaacagaaaatgaaatagtcataaattggccaggtgtggtggctcacgcctgtaatcccaacactttaggaggccgaggcgggcggatcacgaggtcaggagatcaagaccatcctggctaacacggtgaaaccccgtctctactaaaagtgcaaaaaaaaatttagccaggcatgaacctgggaggcggagcttgcagtgagccaagagtgtgccactgcactcccagcctgggcaacagagtgagactccatctcaaaaaaaaacaaaaaaaagaaaaggaaaagaaaagaaatagtcataaattatgctatgatgaaaacaaaagagaggttgagatactggataatgatgagatggctttagatgatttcagttgagatgacataagctgggagataaagaatgacaatgagccagccatacaagaattggtgggaaagctaatcaagtagaagaaacagcatgtccaagagccctgaggcttgtcgcatatgcaaagaatcaaaaagtgaacatggctgaaagctggtgagggaaggagaaagtggtgtgagatgaagaagtggccaaaagtgggatctcatggactttgtaagccgtggaatggagttggaatgttattctaagggctctgaaatctacagagctttaggggaaggggcttcttgattaggaagactgccttgacctcaggtcactgtgtaggctaaaggtaaaaatgcaataagtgaaagttggaagaaagttctgcaacctcacaggttattgagagaaagatagaataaggtagtgaaagttctggaatgacaacatattgatctatagatgcaaagtgctggaaagaaagaaagaaatggggttgctaaacccagctggctttgttgagctgctctttgtaaaggaagtgcatactttcagtgttcagggtgctttctgcatggaatcttaaatttgttttcaaaaaactaaattgcacagaatggatccgggcatgcaggtcttctgccctatctgtggtttctgattttccagataaatggttggctgttcttgaaatgaatgctcacaggtgcatgatgacatcttgctgagggtcctgccaacagtttgtgtaggtggagaaagagcaagaatccaaggaagctaggagagaagacagccttttatttgtctggcattttggatgtttcagtatatatttttttttaatgtttttttttttttattatactctaagttttagggtacatgtgcacattgtgcaggttagttacatatgtatacatgtgccatgctggtgcgctgcacccactaacgtgtcatctagcattaggtatatctcccaatgctatcccgcccccctcccccgaccccaccacagtccccagagtgtgatattccccttcctgtgtccatgtgatctcattgttcaattcccacctatgagtgagaatatgcggtgtttggttttttgttcttgcgatagtttactgagaatgattttacactgttggtgggactgtaaactagttcaaccattgtggaagtcagtgtggcgattcctcagggatctagaactagaaataccatttgacccagccatcccattactgggtatatacacaaaggactataaatcatgctgctataaagacacatgcacacgtatgtttattgcggcactattcacaataacaaagacttggaaccaacccaaatgtccaacaatgatagactggattaagaaaatgtggcacatatacaccatggaatactatgcagccataaaaaatgatgagttcatgtcctttgtagggacatggatgaaattggaaaccatcattttcagtatatttttgaaatcattatctcagggtcatgataactctgtaagatagaagaagcaagtagaaccattcccaagttatagaagaataaactgagggtttgagaagtgaagggttagtttgtggccaaaatagacagtgagatgatatcatctaatttgtacttttttctctggtgtgagagaacacctgtgactattctaatcctacattaatctgttacaaatcccctattttagcaatgtataaaataagatctaagctcattgggaataagttccctttggggctatttgaaaccttatctactctatcactgcagggtaaagagagggtggagttgttttatattatacattattggtaaagcaatttgattgtaagcttccaagtctggatttatgtacttcaccttgtatagtgctcagtaggctacaatgatactcacaaagtgtcattagatactgaaaaaaagatgtaatcaagacccaaattgatcattattcactgattctggcatctggataattttaaagtttttttgaggcagagtttcgccctcattgcccaggctggagtgcaatggcacgatctgggctcaccgcaacctccgcctcccaggttcaagagattctcctgcctcggccttccgaggagctgggattacaggcatgcgccatcacgccagctaattttgtatttttagtagagatggggtttctccatgttggtcaggctagtctcaaaatcctgacctgaggtgatccacccgcctcggcctcccaaagttctgggattacaggcgtgagccaccgcgcccagccaattttaaagtattagaacagaaaaaaaactgcatttcaaaattattttaatataatttactaactgagactgtcagagacaaaccttctaacagtatttagttgttattagcagataaggaggccgttatccctagcaaactgatgcaggaacagaaaaccaaatatggcatgttctcacttataagtgggagctaaatgatgagaacacacggatacatagagaggaacaacacacactggggcctaccagaggaggagaggtaaaattagatgaccaggaaaaataatgaatggataccaagcttaatacctgggtgatgaaataatctatgtaacaaacccccacggcacatgtttttctatgtaaaaaacttgcacatcctgcacatgtaaccctgaactttaaaaaaaaaaaaaaaaaagggcatggaggtatttttttgaagtatgtcttttttttttcctttttcttgaattatggttagagtatggttatttggaaatgaaataaatagcaagttgactgtggtagatttagaatataggctcttatacttttggggatgtgtgggggtgggaaggaatttgattaaagctctggctcctctccatagcggggagaatttgaagaaagctgtaaatgtacagcaggccatataattttggactatgaattcccatgaagtcgattcctcagtggctgatcaagcacttcagatggaagaaggtaaaggttggagtgaacaaatgtacacaacttagctgaagataaatgtgcagtactttaaggggaggatgttgtattccatgccaagaatggaatgtggttgttttggcttcacagtgatgtggctagggagtatggatgaatccctgtctcagagtactcacctctgaagtttgcccagtctaagtacaatttaaaattttaaaagatttctgatatcaaatctcttttttctttatattttcattatactttaaattctgggatacatgtgcagaacgtgcaggtttgttacataggtatacatgtgccatggtggtttgctgcacccatcaacccgtcatctatattaggtatttctcctaatgctatccctcccctagctccccaacccccaacaggccctggtgtgtattgttcccctcctgtgttcatgtgttctcattgttcaactcccacttataagtgagaacatgcggtgtttggttttctgttcttgtgttagtttgctgagaatgatggtttccagcttcatctatgtccctgcaaaggacatgaactcatcctttttaatggttgcatagtattccatggtatatatgtgccacattttctttatctcccatttctgggtagtaagaggggaagcatccactgtctgggttgtgattacgtcttgcccatagggaagtttgggaggtaggaatgaggaattttcacaatcagaaaatgcaaatagtgcattttctccctctcttcctttatttctctttgctttcttttgtgtgtatgtgaggcagtggaagctagttggactgaacagcgtctttaaaaactctacaaagatataaaaaccaatgaccttttacccaagagtagttaatgctgccttttggatgagatgggacccaagtaaaatttgtactagtgaataatgaagcagttcatgcagaactacatgcattcagaaagagaaggcattattatagctggcttctgctttgagttttggtgcatttgatctttatgcacaggaataatagaaggcattgaataatcctccataagcttcaagtgtctaggctcaaattccacttttttcccaaaaagtctccttgactttgttacctctcctgaatccctacattagagactctagttcaaaatttaatgcttgtaatacagcatattggccactaatgtttaatacatatttgtcttgtttcatctctttgtttagcctccctaaaggtagatgtatatctcccttcctacagagtaagctctatcagattaaggacrtgtttgtttcttttattagtctaataccatcacaatgtctcacacattacagacaatgaatagattgttttagaatgagcagttctgatactgcagcatcatttatatctttgatttctatgctacatatactatacttgctggctggtaattaaaatgaaaagcagtttatttttgttttgtataaaaacaaattggagtcaaaatagaactatttgaatggggcagtatctgagtctgattttttgaagtctgcctgtcacagctgatggacctccaaacccctttggrtattttaggagtgtctagatgtgtggaactgtctgttgattttatttttagtgatgtactagggctgtgcttttaaatcacagtttgactcaaaggagagattaatttggttattctgaagacaaggaaaagaaactaagatttattaagcaactactatatgctaggcactgggctttataactttagatatgtcatttcatttaattataagagccctgcatatagtattatattttcttttcgatgtaaaaaaaaagattccaaggggtaattaacttacttggactttaagctctgtaaggacaacgtgcctggcacagaggagtcactcaattaaatgtttgttatgtatattcaagggaactcaatcaggcagcaattgacaarcctgcatttgaayccaaagctgttggtacttaaagcccatcctgttttcactactgctgctcctttaaatagaaattctcatagaaaaaaacagaatcaacataattaacttttcattttagctctctgctcttttagctcagctacacaagwctcaagttttcaacatttggcctcaaacatcattttcctctgtttgtactatttgcccagaggtgatgctaaagatacacttgacttcctggcaacaactcagaacaattgtgttagaacatgctcttcctcataccctaaggaagtaaaaataaatgtttggaaagaaggatgaataaaattgtagaaatggtgacatttcgcattctattctctgcccctttagaaaggcagggaagttgtggctgtccaaacacagccaagaagtcagcaagttagaacttcatcatggtttttatcattccagttttcagacttgtttgtaatgtaaagctgactctccaagttgctgatgattttttgggatggtcagcagatttagcaagtccatttcttaagtaaaaatgagataatattaaattttatagggccaagccctggttcttatacttacctcccagatgacacaaaaacatgatttttaattttttggaaattgcatatacattttactatatttttgagatgggatttcgctcatcacccaggctggagtacaatggcgcaatctcagctcactgcaacctccatctcccaggctcaagcgattctcctgccccagcctyccgagtagctgggattacaggcacatgccaccatgcccggctaattttgtatttttagtaaagacaaggtttcaccacgttgcccaggctggtctcaaactcctgacctcaggtgatctgcctacttcagcctccgtaagtgctggggttacaggtaggagccactgcacccggccacatatacattttaggactcagtttgaatccatatgtatttgacttgagtattgcataagtaatgtttgccttcctgcctcccccacaagatcgaatagactaggtaggcacatgatatctgaatgaagaagagtatttaggaaggcacaattagaacaagcttctaattggaagttataaraagggaaggttggaaatcagtatgtggacgaattttctagtgttcagcctatcaaagagtggcagggactgtcttgggagatggttttctcacagggaggatggacattcacttttcagaaatgttgaagaggctgtagtgaggaagactgggctaaacctctaacgctgcttcagatttcccaaaataccctttgccttgggaaggcagtcatttgtttttgtttcttatttcaagaaaaccttgtcagaagaaacagaagagaggtccaaggtataatatatgaggaactatttaagatttgatggacaaattcgtacctattaatcattaatgtgttagcatatcactttcttaactcacttgtgtagctcacycttctgtctagtctatmctcattcctctttttgtatgctttccttcccattatgtaactctgtcccattcttctctcccttccttcttttttttcttttttttttttttgagatggaggctcactttgtcctctgggcaggagtgcagtggcacaatcttagctcagtgcaatctccgcctcccaggttcaagtgattctcctgcctcagcctccgaagtaactgggattacaggcacccaccatcatgcccagctaattttgtatttttagtagagacagggatccaccatgttggccaggctggtcttgaactcctgacctcaagagatctacccaccttggcctcccaaagtgctggcattacaggtgtgagcccggcctcccttccttccttctaagtctgtaaccttgggaaatcccctaaccaccctgtatttcacatttctctcttataaaatggtgatgttagtagctccttgaaagtttgtcacaatrtaagtattagagactatatgcaaataccaacacagggtctaccaagctgtagataactattttttaaattcttctttcatttattcattcaacatataaagatttctttaacgccataggacaggggcatagggggctcactgttaggaatatgaacacagaacctacttaccagggactcttaaaatagtatgagaagagacactgccatgtaggtcatggtgctagggaacaaacatgccccggaactcaactcagattcccaggtccctgcttaatcagtttctctgataccattcttctctaccttcatcaatttgagaagcaattgttcccccttttgaacttcctagaattgtgctattcgacaagatagccatcagaagatatgtgagtcttgtgcatgtgaaatgttgctatttcatttgagatrtgctgmaagtgtaaaatacacaccagatttagaagacttagtacaaaaaaatatataaaatatctcaacaataatgttttgatattgattacatgtggaaatggtattttcgatatcttgagtttgagaaaatgtattattaaaattaattttacctttttttactttttaatgtggctgctagaaaattttaaaccacatatgtgtctcacattttatttctattgaacagtgctgtcccagcacttcactgtgccaccttatagccacatcactttcttctcccacccccatacaactaacatactatacagatgctcttcaacttaccacaggtttgtatcctgataaacccatcattaagttgaaaatatcttaagtcaaaaaatgcatttaatacacgtaatcttctgaaaatcataactaagcctagcytactttaaatgggctcagaacaacttacattaaactacaactcatctactacaaaatcatytcatgcaaagcctatttttaaagttcgaatagctcatgtaacttattgaatactgtactgaaagtgaaaaaacaatgatcgtgtggatactcgaagtacattttctactgaatgtgtatcacttttgcatcatcgtaaagttgaaaaatcctaaatcaaatcaccctaagtcataactgtctgtacttgtggattatttttccttctaaattttaaactcttccaggatactatttatcactattattggtgctgctagttgttggcgtagcacctaaaaccaagtgttcaatacatatttgttgaatgaagaaatgaatggatggacaggagctgttttctgaggtattaggaacttcagaggaacataatcttccaatgattttgatgcagaaggcaagttccatggctgcaaattgtcaaaaagtcaacttctttcaccaagatagtatgcccattacattaaaaaagatctagccagaaagctaatcaatatgtcctaagactacatctgtgtctgtagctatctctctgaactttggcaatgacttgtttctacaaagaacagttctcagagtcccacaaatgtttgcattttgaaaatgacagagaccaggttattcattaggcaaagccacagaacctcaaagtctctgtctctctgaaaggtgagtccagacacagagagcagcagttgctaaagtattcatcccggaaaagcaggcaaacagcactcttytaggagctgagccgggtcagctcaactttacaaaatacaagtggagtccagttcgttgcaatttgggacagtgccatctcttaatctgactcagcaccttaaacaaaagaagtgagaaaataaatgcaattcttgccatccatcccaatactgaagagccttgagaagagtgtggtgagccacagccaaactgtacattgtaagtggtttcccaggagtttatactccaagtaggtgggggatatatgtgtggtaaggatggggagtgaggtagaatttttttcaaacattggaaaacrtaaccagtgacataccaactataataaatttgttggcagctgcatggggagggcatagtaggcagaattaytctgaagaccttatagggaattttctgttacaatttagcaaaatgataagataaagtaatatttattgaatatttattatgtgtcagatatatgaattattacatatatatatcaccaacaacccaatgcggttggtggtgttatcatcaccttcttacaaataatggaactcaggctttggaaagtttcataattggtcccatagcttaaatcggtggaactgggatgccaacccacttcattaggctctaattagcataatgtccaagatgtctttgatgcagaattagtagcatctgttttctttacaataaagtagtttctggttaacaacattaggaggagggaacattgccagccttatttacaaatgatgactcctttaccgatatctgtacagtacagtgtaagctggagaggaagcgtgggatagtgggagatggttgggctggctctggaacctgggtctgtctggcccaggcactgtggctacctttcttggcttcagtttcttcatcagtagactgtgagagctggaatacactgagttctaaggttttatgcagtgttctaattctctgagactggcaaacctgaggaaaaggaggggtgtgaagcagtgatctttccgccccaagttcagtatggacaggtgacaaaccaaagatgtacatgtttgctagaactcaacatgcttcatgagggtggggcccaggtcaactgacctgctgaagtgggctctatgcttcctcataaagtggtggattgggaaatcaaaacactccctgaaatttctgatttaacttggccatatttcataatttcagtatgtttcttgatgtatttttgaggaaatattttaatattttccctcaaaatataagtgaaaaaacaatataatacattgtttattattaaattgaattattattaagtcatcaaaatttttctgctacagtataactacaagtgaaaaaatagatcctcataaatcttcgagattatttttcattatgatttctgaaatccacctttaacacacaatccatgcacctgtttgttcatcacaggactattcataatagcaaagacccagaatcaatctaggtgcccatcagtggtggactggactaacaaaatgtggtacatttatactctggaatataatacagccataaaaaaagaatgaaatcatgtcctttgtggcaatgtggatgcagctagaggccattatcctaagccaactaatgcaggaacagaaaaccaaatactgcatgttcttacttataagtggagctaaacattgaatactcatggaaacaaaagaggggaaaaatagacactgaggactgcttgaaggggaaggatggaaagagggcatggattggaaggctacatagtgggtactatcctcactacttgggtgacaagtctcaacacacacaatttactcatgtaacaaacctgcatgtgtactcccagaacctaaacttaaagaaaaaaacaacaaaacacaatccaaggactctgaactttcataaaaataataaagatgtatgacttttcatatgggaaatgtagtcattatcactcagagcaccaatcagagttgtgatccttgataactgaacctgaatgacaaaggtgctagatgagttgagacaagtgaaatatttatagctaaaccaaaacaaaagtcatttgatataattcaacttgccaagaaaggcagtgtaaaggagtgtttaagacttttgattcttggttcagacagaacaattctaaattccagttctgccactaactagttgtaactttagtcaagtcacccattctatcagaatgtcattgttctcctctacataaaacatgagaaataataatggtacttacctccatggacttactatgagaatgaaatggattatgtatataaagcacctaggaccttgtctagtatggtgtatgccctcaatacatgttactatttctattgttaaaagataagtaatttatcataaataacaagaatcctttttagcattcaaggtatcataaaagtatatttttccaaagaatcattagacaatccatagtttaatgtaatyggagaagcagtaagaacatttgccaaggacattttagagccacgttaggtaacccctaggatgkgcatggaagtggcagtcacttcttaatcataaagagagaacctgattcacatgatgagttatctttaatttccctgcagtgttatgtgaaaacaaatacagctctgcacattgaatattatttgattttgggggatgccaactattgattgttaggggatgaggggatcagtaattaaatgtttgaagttgtcagctgtgcagctgggggtgggggaggaggatgggatggggaagggcagggggagagagacagaaaaagaagagacacggcccgcctgacactccaatgaccatctcattaatacycattcaccagagcttaatatgaaaatgcctcagagaatggagaaactgtttcaacatgtcattcccacagtaggtgaggtgtcaagatttcataaccacggaatgccctgaagttagacactgccttgtcacattgaaagtaaagtcaaggtgaaaaatgccatgttttcattgccagtgttgaaataggctgggggaatttagtatgatggtacagacaggttttgtttcaaggcagcctaagagctttgtttgcttagatccttgcatgtactcttgctgtgactagtgaaaggcttaaagatgacaatgawattattagtaaaccttccatgagaaggaaaggagcacagcacaatctctcttctacttggggatgtagataaaaattccctttgtagaaagtgttcacttagagcctcacacactgcacaaatatgtaagatgatctgtttgatgatgggcttgatatattggcattaaaggcattttgaagtgatgagctaatgtggaaatttcagaaatcataatgttagaaactaagtaaaaaatgaaagcagcctgtgaagtttcagctggaagtatgtggaaatattttaagttggtggctctctgatattaactaaagcatgaaaatgagaatgaaataccttccctatctagtttgcaaagggcttgtgatattaatatacacacagtcatgcgtcagttaatgatagggatatgttctgagaagtgtgccattaggcaatttcatccttgtgtgaacaccagagtgtacttacacaaacctggggtggtatagcctactgcacacctaggctatatggtataggctattgctcctggactataaacctgtacagcatgttactcttctgaatagtgtaggcaatcataacacaatggtaagcatttgtgtatctcaacatagaaaaagcatagtaaaaatatgatataaatgattaaaaatggccgggcacagtggctcatgcctgtaatcccagcattttgggaggcygaggcaggtggatctcctaaggtcaggagttcaagaccagcctggccaatatgaaactctgtctctactaaaaatacaaaaaaactagctgggtgtggtggcaggcacctgtaatctcagctacttgggaggctgaggcaggagaatcacttgaacccaggaggcggaggttgcggtgagccaacatcgcttcactgcactccagcccaggcaataagagtgaaactctgtctcaaaaaaaaaaaaaaaaaaaaaaaaaaaaakattaaaaatggcacacttacttgtgtagggcacttaccatgaatggagctttcaggactgaaagttgttctgggtgagtcactgactagtgagtgaatgtgaaggccaaggacattattgtacactgctataaacactgtaaacctaggctatgctaaatttattttttaaaagtctttcttcaataataagttaagcttagctgactataacttttactttataaactttttaatttttttaactttttgactgttttgtaataacatttagcttaaaacacaaacacacaactatgcaaaatttttatctttctgtatatccttgttctataagctctttcccattaatgttttactttttaaacttgtttgttaaaccttaagaaacaaaagaacacatgttaccttaggcctacacagggtcaggattatcaatgtcactgtcttccacctccacatgttgtcccactggaaggccttcaaaggcaataagatgcatggagctgtcatcacctaaaataacaatgccttcctctggaatacctcctgaaggacttgcctgaggcttattcttttgtcaaagacgaagtctcactctgtcacccaagctggagtgtcacccaagctggcacaatctcggctcactgcagcctccgcctcccaggttcaaggattctcctgcctcagcctcctgagtagctgggattacrggcatgtgccaccacgcctggctaacctgatgcttttttaaattttttattttaagttccgaggtacatgtgcaggatgtgcaggtttgttacataggtaaatgtgtgccatagtggtttgctgtacctatcaacccagaggcttttttttttttttttttttttttgagagatggagtctcattctatcccccaggctggagtgcagtgccgcaatctcggctcactgcaacctcagtcttccgggttcaagtgattctcctgcctcagcctcccgagtagctgggcttacaggcacctgccaccacactcggctaatttttrtatttttagtagagatggggtttcgccatgttgcccaggctggtctcaaacttcttaccttaggtaatccacctgtctcagcctcccaaagtgctgagattacaggcatgagccactgtgctcagcaacccagagactttttaataaaggttaactttttttttataagcagaaggagtacactctgaaataatgataaaaagtatagtatacataacgagtaacatagtcatttattatcatgattgagtatcacatactgtacataacggtatgtgctctacttttatacaactgacagcagagtaggtttgtttataccaccatcaccacaaacacctgagtaatgcattgcactctggcattatgatggctgcaacatcactaggcaataggaatatttttagccctgttaaaatctcatgggaccaccatcacacattggttcatcataaactgaaacattgttatgcagtacataattgtaccacaatcgctttgtgaaatgatagtatggtagcaagtcacctaatgaacttggagactggtaaatattaaagctgatatagaggttggatgcaatggctcacacctgcaatcctagcactttgggaggccaaggtgggtggatcacttgaggtcaggagctcaagaccagcctagccaacatggtgaatcccatctgtactaaaaatacaaaaattagccaagaatgtttgaacccgggagtcggggattgcagtgagccaagatcatgccactatactccagcctgggcgacagagtgagactccatctcaaaaaaaaaaaaagccaatatacagaagatactattggttaaaaatactatgtgatacatgcaggtggctaaccaagatgcaggaagagtgaggtaacatttaaggttcgggtactgttggttgggctttatatacattatcacatttaagtgtcacattaaccttattgagtggatatgactacgattgaaatcctaacagctagttttttataggcattagcttgtgtcagatactgtgttaaacgtgtggcttaaattatttagtttacttatcacattcctatggcatatctatgattagccttatttgacagatgagtaaactgaagaagattcatcatggtttctcagccagaagtcaaacccagatgtctctaatattagaagcactttacatatagcagtaatgaagtaaaatgtaaataaataacaaaaataagaataaaaaagaaacatctattgagcattgactgtatactagccattgtactatatgttttgcatagaatatcttacataatcctcacaatcctatgatgtaggtattctcacaatatctattttacctctgagaaaatacaggcttaccaacttcaaaagcttgcccaggtttacacaactagtaagaggcaaacatgaaacacaatgagtgtgactctagaacctaaactactagccaatttgcctgcaatgaaaatagattatcaaaattttaggcctgttttttacttaaaaaaaagtccttcctacaaagtaggggtagttacgtgaaaaaatggaggtctgtagggatagactttagattctttggatagtttgagacatcctggttttcttacccacctgtatgaaaccttaacctgcgcctcttttacataagtcagttttgctttgcaggactctttatatggtgtctctatgaaatrggccactgcaggtacttaacatacattctctgtttgccagaaacttccttaaagcatgacagcagagtgytccccatcacagccccaccttatctgtgcctcttgcctttagctgtgcttggcttcagaagaacaatgtgattttactcatgttgcaaatgaaacaaaatatgctgaacacttacccattttttaatatcatttttcattgcacacaagcatgcccattaatatttctatgcttaagcatataacccacatttctttggcaacctacaattgtactcccaccaaaatataatttagccattcaatttaccaatgagtcacagattaaaaaataggtttttttcttatttacttagcaggatattataattttttaaaaaacaagagttggtgttctttggcccataagaatcattcattaatgtaatgacattaaatatggtggtcatgtcacccttgtcttgcagtataattttcttactcttaytagaataaagatgaactaaagccataatcactctaaatcacattaagcaggtttttttaaaaaattttttctttccataaaaaggtctgtattattcagctcacttacccgttcttctctatgttaaggaaaatattcctgattcggaaggctgtcctgtatcaaagtttatttttccttgaataatagccaaattgtattattcctgattttctgtgtggttacttggtatcattttactaaataatggttgttaactcatctggatgtttttggttttataacctgtgtaaggagttatttgaacrtcagaaacagtgataaatcaaatgtgatttagaaccagacctaagaattccaaagagggggaaaaaaattcttcagagagtttggcttgcaataaaacaggattgtcatgtttttagtgttgtctgttttgtgttggggggaaaaagatcatcctttttgtccatacagtcactctctggtattatctccatctggctgtctctacagccttgggcctcttagctctgagtaagtgtgtaccagcagctattaatagctgaattctacaacattctgctgtcacagatggaatctgagcttctgaacactaagaccataaaaactcattacaaagaaagcagtacattctttggcacttaatgcaattaagctgtctataaataaggaacattctgaaagcaatgcaccagccctgattctagtttgtagatctcacccactgatttggtcattgatacagaagtttctcttttatgatgttaaatggatctgagtattaatctaagaactatatgtgaaacagcaagagaatgtctttttttttttwwaaaaaagtaaaagtaatattttagggtataatagaaaattccattacaacaaagaaaagggaaaataaaaccttcaactagagaatgtgcattatggatggtagaattcatgggataatgcatgatcatgcaggagggggctgctcctaacctccytgagttgcaactattgcagcagccaggacgccaccatgaaagaaagcrtacatgattgtctgtctctgtctctgtctctgtctctctctctctctctctctctcttcaactaggccatggagactcccaattctttttcccctgagcaaggcagagattgctctctttctcaaggaactgtcttaatattactaaagtgtaggaagacgacrgaaaaagggcttaatgtctatttctgggccctctttctccatgatcccctttccttcccagtatttaccgacagaattaaaggatttattaaatcagattaactgcttgtgtcatctcttctaccctcagtaatatcagagcagcaaagccaggaaagtgaaacccaatgctgtgcatggagtcgatactttatcaatacttattatataaatgaatgggagaaatttcctttattttctcattttgttagaatgtggattctatgagggcaagactatattggttttgttcacttctctatccctaacatctaccacaataaacattcctgaaaaatacataaataaatggagttaaggcagcttgcaagctcttgaaagggttcatgcaaatttcttctcagctctgtgctgaagcataatgcctcagtctttacataagacattttgaaaawaaccgatgtgttctgggtgctctttcccttttattcgtattgtattttaccttactctatgccttgatctatggtctgtgctacattttttgttgtagctgagaacagaatttacaaacacaaatctcccaatggtactttgaaagtgattctcatctgaaataaaataaattcacttaggagcatagcttatctccttgaactagagatttgaaaatttctcctaattccctggcaattcagctaggtcatatttttattactgtagttattccaagcatgcacataagcccctatgatatccttggtcccaaggatacggtattgattatgacagaaaaagtagccatacctttgtggacttaaaatgggggaaaagaatggggaagaagcagaaacttaagcagtttcaataaaatgtaagtgctaactttagttcaaatatttattgagcacctgtgatgagctagtgttccagtaaggttgaaaacataaggtatagattcgaaaagccaattaatataagttagatagcaaggtaaaaaacagatattccagggcaatagatgatttgttgacagatgtatggtgtaggcagaagtgatatgtatgcagagaaagattaaattactgtaagttggagccatctgtgaatgttcttggagggaggggaatatcaactggatctttaagaatggggaggatttaaatggatgagaagtaatggcactaaatgcaatttttaaatggtgtaattattaaagttgctgagttttgaaaacgccaccagaatgcattttaattgaatttctttatgctgcacaaaaagtaagttctagttggttcatggatactgacttggtaaattggtaggtggtaagttagtgttcttgtgattccagcagcttgtgcaacctctggtttgttacatcatggaaactgaagattatcttgggttagattcacaaagcaaattttcccttatccccctcctcctaaaaaagcttattttcagggtggtctctaaaatgctagacttaggctctctaaggttctacttcagaataagggatccaagaagttttggccagctcctaatttaacctatacctagaagactcatttagatttagaaggctgtaggcatgatggttgagaatttgaattcagaataatccgatgtcaagttttgtctctgccaccctttattatgtygggcaggatatttaattattcctagatcatttaaagagaatgtgttcagattaaatcatgactggggcatttttaaaaaagaaatgccaagtaccgaggaagtggcaatgatgatgagcctagagatgactgagactttgggtattaatctttgaattatttaccggatataaattttacagcttctacacttctctactttctttcaagtgaaattcttcttatatctataactcataagattcccctggcatgagatggatccttcattcccataggcctgttctgaattggaggagacaacaaaaacttcaattattaatgctattaatgctctgtcaagaatatcttactacatgtgataccaacaacaaaaaaagtggcatgataaatgcttgctttcatagcatgtcatagcacactgtcatagcatgtcacagtttgcaaaatactttaaaatatagcactgcatactttaaactacagcacttccaaaaagttagtggctttcaatcacctctttttacagttaaagaaactgaggcagaaaaagtaacttgactcaaccaggttatcagctaataggtggaggagcctaaatttgaattcagttatttcaatccatccataagtatttctttaacccttacacttatagtctgtttggaaagaaaaaacacttatgatacaaatagaaatgcaagcaagtgcaatgatagaaatgcaagcaagtgcaaattcatgtacctcaatgtggttgttaatatctgaagggtaaaagagtaaaaagagatactttattgaggtagcctaaacaaatcaaagcttgttaggaaagcagaatactaggagatactatgtgttttctttttccaaataaacatggaagtgtgggccactgcactgtgagataacacatcatttctgaatgtgtgtctcctgctgaaccaaagaggagaaacagctgctttcccagcaccatggacagctcagcaaccctctgaagggttgttccatacacagcatgaacaaagtcgtgtctatgtgataacgtcggctctgtgaaacccaggggaactgacctgaccttgtaatgtgaggaacgtaaatttaaaatatcagcggagttgcattaaatgctttttcaggaggtttcattaatgtcaataagtatgaaacatttaaaattattgatttttggctgggtgcggtggctcacgcctgtaatcccagaactttggggaggctaaggcgggtggatcacttgaggccaggagttcaagacaagcctggccaacatggtgaagccctgtctctactaaaaacacacacaaaaaattagccaggtgtggtggtgggcacctgtaatcccagctactcaggaggctgaggtggaagaatcatttgaacccaggaggcagaggttacagtgagccgagattgcaccactgcacttcagccccatctcaaaaaaaaaaaaaaaagtattgattcttgcatttttctcaatttaggactaagagaggcttaattaattattatgaagagttttcatacagttttctttctatctctgttaaagcccgtttcaaaaattaccactctaccacagtgtgtgtcatgagtctactttttctagtgcatactcccttcctcttacccaatgctttcccccaaaactcaactattctatgtatggccaaccctcttctgtgatgataagaaccaaatgaaaagcaatagatgctaattctatagctattgaaggtaccctagggagccaaagagctaactcacaaattggaaatcatataacatggctgctctaccagcagtatctgcccttattggcctgaaaactagagatggtcatgaggaacacaaattgaggcaaactcactaccaatgtgaacatcttccctgtgattctttccatgtcatgaatctccatctgatttttaaggctgggttgggaggatgagactgactctatgttctaggcttttggaatagaaatagcctcatgttcaataagctttctgctcttcagtaaattatgttgccatcagatttgacataattacatatatacatttcaaatcctactttgtgtagcttcctgtgacatctgatagaggggaatttgtggcttagctgcttataagtgaagaagatgacagtggaaacctgttgggagagcacttggtgtttgtacctgcattcactttgcatgcacatctactaccagggatccaggagggaaatggagtgctacccctaagctttcagatggtacttgctgacttgtaagcaaggaccattacagcataagtttggttgagccaacttttctttttcaaattaacttgaaatgaggcaaacagggacttctgtttggctatgttttgcaaaaatcactgttaacacacaggtgggctactaagggctgttattttttcaagttattaaaaggaaaattcagaaagttagggagaagaattattttatacttctgcttgagaagaacaacatatgtttgtcatggatgattgaatccatttccaagattttaaactttaaagtggacgtggcactatgacattaggaatgaggttaccagataatttttaagttaattctcgaaattaaactacttggaaaatctgttcttcccatctcagtgcacgttctgctcgttatgtggtgtgccgtctaagtaaactctgggccaggtgcagtggctcacgcctgtaatcccagcaatttgagaggcygaggagggcagatcacgaggtcaggagatcaagaccatcctggctaacatggtgaaaccccgtctctatcaaaaataaaaaaaattaggcgggccttgtggtgggcgcctgtagtcccagctactcaggaggctgaggcaggagaatggagtgaacctgggaggtggaggttgcagtgagtcgagatcatgccactgcactccagcctgggcgacagagcaagactccatctcaaaaaaaagaagaagaagaagaagtaaactctggccacagagcaagtccaccataggtagtgatatgcaggctgtcagatgaaatctccagattgaaaccagaacagggggctgagctccaaactggagaagaagcatgtgtaaccttttggttcacatggagggagtgtctccaaacagtcccttttgccaaaagactcagctttccttaaatataaagaaaaacaaaagtctttttttctcaaggatgtaagaatgatgtttgcaatttgctcacttcttcctacaagttctaaatttggggactgcattgcttttagttttaaggaggttatataaatctagatgacaaaggcacggaaagacttatcttggtgctttagtggtgataaaagaagcttatttcttcatttagcaaatgtttactgaatatctactatgtatcaatcactgtttcatgtgttggtcataaagaagtgagcaagatcaagatttctctcttttctaataataatctgtgggaggaagaacccacaaagcaaatgagaattttatatgttgataaatggtatggagagattaggacaagttaaggatatagagagtgggtggtaaacaaatatattagatggagaagtattcttgacaggacaacctaaaaagcaaaaaaaaaaaaaaaaccaaaaatgaagaaaatttagggaatgaggacttcctggagagaaaatagtaaatgcaaaggccctggagcagtaatgaatgtggagagtatgagaaacagaagaccagtgcaacctgagtatgatgactgaaacagacaacagtggtatgagagttaggcaggatccagaccatatggaggcttggaggccatgaaaagatgggtgattttatttggagagcaaggagaagtcactggagggcttagaagcaagaaaatgatgtaatctgagttatgctttccagaagatcgctctttcaaatgttcatcctcatttgcaaggctctgctctaaattgaggagccagtccttcttctggcatcttaccaatttgttattttacgaactttcttttcttgtaaaataagcatatttaggaaaactacacagcatagtacaaaggattggacagctatatcatttttagatggactcatttttgaaatgtgagacaatgttttacacggaaataacactcaaaggctgagttctagtcttacttgggccacggattcactgtgtgttctgaacacagttacttacgttgtcagtgtgtattttgccattggtaaaatgtgaatatgaatattagtagttcctttgcttactttgcataaatgggaatttacaatgtggcatcatacttgaatatgctttttatgacactgaaccagctgaaagttaaatccattcatgtaattaagcttttttttttttggcagagtactaggcacatgaggtctaaatagttttaataatagttgccattttattgagtcttaactgagtgttagttagaattttttcacttatttctaatttcaactctattatctttttttgaagtgagaaaaaagggggcttagggaatttactttcccaagctagtaagagatgactgaggtttcaccccaactctgtttgcccccaaagcctgtgctgttaagttctgctgctttttaggactccagggctaagcctagaggcagggctagcaaaccttagtacattgtgatatacatccacaaagtgctgtgacaaccagagaagggagagccatgcttagctgtttcatgggagggtgggctcatgctttgagcttgatctacaaggataaatcagagcttcaagggggcattaatgggtggtatgayagtgaagaaaggaggtctcagaagataaaaatagccttaagagacatctagaaatgggagagaagagtatggtattaagggatggcaggtgggttgatgtatttgaggatttgtgcaattgtacatgtgtgtaagcacatgcatgtgcacgtgttgtctgtggatatatatataggtgttggagattgtgtattgtgtgtgtttctctgtggatattttttagtatgtgagaaggttgtgttgtgtgygatgtgtggtgagtgacctggtgagaagccagggtgtggctgaatgtaccactgtcaaggaggcggaatgatggaaggagggaggcctattagaaggcgatgcactaatcttggtgagagatggtatggcccaggactagcgcagtgcagagggcatggcgtggaaaaggagatttatgagagggatattttgagatagaattagtagggcttctatctaggtcaatggtgcagctgagaagtgctcagaatgaatcctgtgtctctaggttggcaatttgacggatggagtcctaggaacttaaatgaagaaagtagcagcagaggaagatttggagaggggaggagacggaggtcaatttaggactcagtgagtttgagcagcctgacgttccacatggagatatcagtgttgcaagtggatttggaaatatggtctagagctcagtagaggtatagcctagaggaatagtaatgggaagaaaatatccccaaacagcatggcgttttttatatataatattgcagtagtgtgcttttgtgatcacattgctcttttatattgcattttaaaattccactgaacacaggaggttttctgaaggagtgttttctgcccctgggaaactattggccaattctcaattatccacaaatgagaatccatgccaattgcttttattctttaactggctgctccattttacctagcatggtttttgttttgttttgtgtgtttaaaattttttaatgtttaattgacacaaaattattgtacctatatgggtacaatgtgatgttttgatacatgtatacaatgtataataatcaaatgagggtaattaacatatcacctcagacatgtatcatttctttgtggtgagaacactcaaaattcctgcttctagatgttttgaaattacaatatcttattgttaactatagtcacccttctgtgcaacagaacaccagaacttattcctcccatctaactggctttgtacccattgaccaacctctcccaatcccctatttctggtaaccacaattctactctctacttctctgagatcaacatttttagattccacatatgagtgagattgtgtgcctatttgtctttctgtacctggctttgacttatcataatgttttctgggctcatccatgttgctgcaaatgacacaatttcattttttatggctgaatagtactccattgtattatacattcaattcttatcttggctattgtgaatggagttgcagtaaacatgggagtgcagatatctctttgacatactgatttcttttccttgggatatataccaagtagtgggattgctggaccatgtggtagttctatttttaatttttgacaaatctgcctagcatgtttttaagggtatctctgtaatttctttaaaaaaagcaaattcattttaatatacattcatacaaaaaaacatagaaagctaaatcttatggaggaaacgataactattccaaagctagatggagctagtttttaaatagtacattttctggaattacctttttcacttccttattcttttgttaggaaggtcaggagttgacactttgccatctccacattcaaagagaggtgccatgttgtattccatttcagctcttctgttctgtggttgtgtctctctctgcatactcccatcccaccccagtgttctatttactccagatgatttcttgagaatgtgctcwtccttaggttttgtagtattttgcagagaatcttttcatgacaaaaggagaactctccatgtagcccactgagaaactgttagtgaagaaaaaacatctttatctcacaacacagaagatgcaggagagcagcagcctggtggtgaaagtgatgaatcagctcagatttacagattcttggccccaaaatagttcattttcaaaatatattattcagagcaaggcctgagcaagagaaagaattagagctgattttcagctggagattttgtgcccgagaagaaagcctgcactgatttgtaggcataactgaccttggtaggaatgtttgattttcaaatgcagagaaggccatctgttggttcttgagggtaggggaaagaggcataatgatcatctttacagcatgctgtactttatccttggtcagaaacttttgcaggccttgtgccaattcttcagacactatctttacatcggggagtcaaaacttggaggttaaagtaatggctcaaggttacccaaggaattcatggaagaagatagactaaaactcacatctcctcatgtccaggccagcatcctttctattaacctgttaatgtcaaatccctaccattacttcctctatcatcttagccaagctacttagtctctctgggtctcagatttctcatctgtaaagtagaaaaaatgaaactatatcatgggtcactgagaaaattacataacttaagatgcaaggggatagaacccgcacatggtaaggtgctcaaaatatgtgagttccctcggaacaatggggtgaatgttggtgatgtttcttcaatatgttttcaagaagagctcagtggcttataaatcttggggcagggatggggacatcttatcatatggaataagagtgaggagaaaatgcccatcaaccaccaagttagagggagcagagattgtgttgaagggattataaaaatcctcgtgatttttttttttttgcagtgaattttttttagcatagatgaatgtctttgcaatttatttcattaattattcaacaaatatcgtttggctgtcttatgtgccagacacagtactaagtgctatggccacagcagctatcaagacagctttccatgccctcgtagagtttaaaatttggcgggaaagacgtactttgatcaaatagtcacaaaaggagtatataaactcctagcaggatggctcctctgtaatggagtcatcataggctgtgctgagataacctgacccagtcttacaagatcagggaaggctgccctgaagaagtgatcttaaagttaaggtttgggcatagggcagccctgccaggcagacaaaacagcataggcaaggccatgaggtggaaagggatccatgactttggagaaaaggaattggtgcagagcagtgtgagcaaatgggaggatggtgttttatgggagccagagtcatgaactgatttgataattttaaattggcatcagaataaattgttatgaaatgggtggcagaaatatttgaccgttggtcaaagaaatgaaactgagcctagatgagagatgtaaagtggcgcataccactaagttgtgaatagtgattgccttgggaaaatgagcttggaaatgggggagacttttattttacgagtttccataaatttttgaaaaatattttacaacaagcctatgttactttagtcattaaaaaccctagttagagacttttatgcaacaaattggagccttttcaaatcctgttccaggatctacattaaaagggaaaaggctcacaataaaaaaaaattgtgtgagatgayggaaatatcaatttgcctgatttaccatttcacaatgcacacatatattaaaagatcacactgtacactataaatatatgcaaatttatttgcatataaatacatttatcatcaaagttttaaaaatggtggtggtgggatggaggtagcatctctgtcctaagtggtgagcatctaggccaggtgtccaagtcagtggggaagagaaaaaygtcttaggctttctggttgatgacattgggaatgtttaycttgggaaagaggagatttgcataagtaccttaaatgtcattctgattgagttttaggatgagtcacagctggaaggaggaggcagaaaagaaagatcttgacactcyagatgatgggccaaatgtagcaacatgaattgtgtggggatcaatgccagtatctttcctgaggttttacaaagccacctgcctgcatacagggaggggagtagccctcaagagcaacgctcatcacaacaagcctccagggtcttggttaactccaagaggaagtcaaaaagtcatgcagctgccaagaaaaggtatatgttgtttgacagcattgatagaaatctgtctagtttaattcttaaccactggtattcatcaaaatcacctgacagtctttttaaaaatatgctcaggccccacccaaactgactgtattcaaatcttggggagaagggataaggaattagaacatggattttggaatcagctcctccatatgggtctctgaytttaaaaactgacaaaagactcttcaatgttaaaggagctacaatcttaaatttttaatttctgaaatcatgtttaataaaaaacctgtgtttttatttgattattgaagtaatttttggacaatgcagtcttcatgctaagttttctacttactcaaatcagttttaaataaaattgaaatcatgttgaatgcatcattttgtaatgtgatttcatttaatattctgatatggatatttttctatgctctttagcataatgtttaataggcgcataaactctattatagaagatgaccaaaatttactaaatttctattgtcatatatttggatcttttccaaaatgtttcagtattgttgtttttggagatagtctcactctgttgttcagagtggagtgcagtagtgcaatcatggctcactgccgcctcagcctcctgggctcaagtcatcctcctagcctccctagtagctaaaattacaggcttgtgctgccatgcccagccaattttttaatttttttgtagagatggagtctcgctttgttgcccaggctggtctcaaactcctgggctcaagcgagcctcctgcctcagcatccaaaagtgctaggattacaggcatgagcccactattattaataatactgtaagtgtgtgccactacactttggaggggaatattgatatagtggagtggtcaagatagtggaggtttcataatcttgatattaggaacggctgaaagaactttaatctggagcagacttaggttggaggagtggtgaatatcttcaaatatttgcagggaaatcaaacagaaaagaagtcaatttgttttgccaccctcaaagggcacgactaggagcaattgggaaaaatttcaacaaagcagctttcagctcaaagtaatagatttttaaataatgaacagttttgatgatcttgctttccctatccttagggatgttctgagcatgagttagcatttgtaaagaatataattgagactattcagattcctaaagtgtgtgtgtgtggaaaagtggggataggttaaaatggagtcacaaaccaggagcccgcaggctgcaacccaacagtaaaagggtctgtccagctaatcaacccttctaaacaatttgaattcaaatgcctttaggcagaacattcactcctcaattagccacaagccacgcccttcctcttaagtatttcacttgcgtgcactcctgaaggcatttagtttaccacccctagtaggtactctaaatcctttgattctgtgaatatcatttattcattcagatgcttagtgagcacctactgtgtgtcaagtattgtgcaacctgctaagataaaaattaacctgacagatggcctctctgctctcaataagcatacaatgaaagtgtgtgcaggagtgttgaatgaatatacattggaagaggaaatccgggttttgtaattaactccagaaggtcttaagaccagtgatgatgttaacagcagagagtgctttggcttgttaagaggaggaactttcataatccagttcacaaggaagagaatggaccttgctggaagcattggatttcccccagcagactagtgtaggcagtgccagcatgcacatccttcagggatgatatgaaggagattccagctctgcagaagtaggatagatggcttcyrtgtctccttctactgtaagtgttagcagcggaacgtatctgagtcacgtggcaccaaagtatgttaccagaggcaaatctgtacaggtctacagcaacctcaattcttgcctcctcagaagaaagaattcaactgaggggcataagacagaaggagagaccaaggcaggggtgaaaggaaggaaagtgcacttggaagagggccaagcagacaacttgagagatcaagtgcgcagtttgacttttgacttggggtttttccatgttgtcatacctctggggtcttatgttctttcctgattcttcccttggggtgggctgtctgcatgagcagtggcctgccagcacttgggggggaccacatgtgcaatgtgtttactaaagttgtatacatgctcacttgaggtgcttttccccttaccaatccagtgttccagagggaggtaatctgccattttgccttagtgcgcatgcttgagcccattcacccaactcctgagatcttatcaggaagctgctgatcaccagtttcagatgtttctgtctgttgggagactttcccatctattgggtgcctttccctggcactggccatgaccaattattattttagagagacagttaacactgcctgaccatcacctgatggtctcctgacattcctggtgtgtgttgcaggggaggcctctcctactctgctcatttctgaatagctacctactgtaacataaggacctgtcatctttggatttcatgtagaagagctacaagggaagaaagcagcgtttgaagaagatggcaaattagaaaactaacattgtctccccaaaaaagagaaaaaaaaagaccataggatatggagggtttttttttttttttagctgttttctctaccttcagtatttatttggggagggagtgttttacccccattctgatgctcataatctattataaagcatttactgagtgcatactttgtatgcacagttttcagtccctgttctatgtgtccgaagtcatggctttaactgccacaatccactgccttactgatattcttcaagtgagagggtttagcaattttacttcccttttctcctgccttctcctgagtgtggtgttgtctcttctctgttcttrccacttcctgtcctggtctaaactgttgccatcttgccaggactcctcctgcttgctctctccgtttctgtcccatttattcctggattctcctcctcttgctgcctgtcaaccctttctttctttcaccagttttccttcctgctgcttaagcaagtctcctcatcttttgattattcggctatttgggaggcaaactcgttcagacagcaggtgttctaataactgaaatagcagcggagcagagcagtggaaaatagaaggtttcgactttgaattaagagatggagctcttaaaaaggaggtgttttattgatgctaagaaactttaaaaattatcttgccatgtggcctgcttcagctcactgaggacccggacagctgccagtgcctacttggatttgtctccatggaaccgagcgacacactgattcatacctctaagygttgcttccacttgacttctacaaagaagggtctgttggttttggaggggcatactatttggtacaaagtttataggtaactgtgcttgaagaagctgctcctgaggttgggcatgaggtaatatttattcttagtgacattttcaaaaatatgcatccaaataatgtaactccaaaattgttggtgtagaagttgaattggtatgtgaggtatgtgtgtttgtgtgtaaagagaggggttttttttaatgattattaaaaggctaagatttattaggtgcttcctatgcactaggcactgcttcatactctacatatagcatatatacatatatatacacacacacactatatatatagcttcattcatagtatatgtatatgtagatatatatatgtcctggctggrtgattcaccagatgtgtgactttgggcaaattacttgctctatctgagtttccccatctggtatggtttggctgtgtccccacccaaatctcatcttgaattgtagctcccataattccctcctgttgtgagagggacccagcgggatataactgaatcatgggggtggttttccccatactgttctcatggtagtgagtaagtctcacacaatctgatggttttataatnnnnnnnnnnnnnnnnnnnnnnnnnnnnnnnnnnnnnnnnnnnnnnnnnnnnnnnnnnnnnnnnnnnnnnnnnnnnnnnnnnnnnnnnnnnnnnnnnnnnnnnnnnnnnnnnnnnnnnnnnnnnnnnnnnnnnnnnnnnnnnnnnnnnnnnnnnnnnnnnnnnnnnnnnnnnnnnnnnnnnnnnnnnnnnnnnnnnnnnnnnnnnnnnnnnnnnnnnnnnnnnnnnnnnnnnnnnnnnnnnnnnnnnnnnnnnnnnnnnnnnnnnnnnnnnnnnnnnnnnnnnnnnnnnnnnnnnnnnnnnnnnnnnnnnnnnnnnnnnnnnnnnnnnnnnnnnnnnnnnnnnnnnnnnnnnnnnnnnnnnnnnnnnnnnnnnnnnnnnnnnnnnnnnnnnnnnnnnnnnnnnnnnnnnnnnnnnnnnnnnnnnnnnnnnnnnnnnnnnnnnnnnnnnnnnnnnnnnnnnnnnnnnnnnnnnnnnnnnnnnnnnnnnnnnnnnnnnnnnnnnnnnnnnnnnnnnnnnnnnnnnnnnnnnnnnnnnnnnnnnnnnnnnnnnnnnnnnnnnnnnnnnnnnnnnnnnnnnnnnnnnnnnnnnnnnnnnnnnnnnnnnnnnnnnnnnnnnnnnnnnnnnnnnnnnnnnnnnnnnnnnnnnnnnnnnnnnnnnaacaaacagataagtactacaacgaagcctccttagatctactaggctccagaatcttcatgctgaagagaaactttgttattttgaggcaaatgagataccatccatgtgtatagttcttatacctttgcaagctgtttcacatatatttggattttattctcaccccatgaggtcagagtgccaggtttcactttcctctgttttgagctaagagggaaactaaggttcagagaggtaatggaaacttccacacgtcacagaactagttagtgacaaaagtccaaagttaactcagagctcttgggcccagttccctgtagcatgccaataagaccactaatccaggctcctgatctcttagattaaactgggcaagtctgtatctcaacttccccagtgagtaggagttcatttagcaaatatgcatcgagatgtgatgaatgaacagtgtgtcaggcatagtgccaggctttagtgtgatagtgacagataatacatagttgattctggctgggcacggtggctcacacctgtaatcccagcactttgggtggccgaggcgggcagatcacgaggtcaggagatcgagaccatcctggctaacaaggtgaaaccccgtctctactgaaaaaaaaaaaaaaaaaaaattagccgggcgtggtggtgggcgcctgtagtcacagctacttgagaggctgaggcaggagaactgcttgaacccgggaggtggaggttgcagtgagccgagatcgcgccactgcactccagcctgggcaacagagtgagattcyttctcaaaaaaaaaaaaaaaaaaaaatacatagttgatcctatgttcacagagcttacagtctattgggaaaaatcaaatgattaataaagaaattgctataaagtttaatgtgcattaggatagcaaatggcaggagaatagaaaccaaatctaagattctaaggaacaagaaggagtagccagatggagatgtgggacaaggttttccaaaaaagaaacactttcagcggagtgatgagccaaggaaaacacttactatagactaatagagataggagccatatggctggacgccgtggctcacgcctgtaatcccagcactttcagaggccgaggtggacagatcacaaggtcaagagatcaagacaatcctggccaacatggtgaaaccctrtctctgctaaaaatgcaaaaattaggcatggtggcacatgcctgtaatcccagctactcgggaggctgaggcaggagaattacttgaacccgggaggcggaggttgcagtgagctgagatcgcaccattgcactccagcctgggtggcgacagggcaagactccatctaaaaaccatcattctcggcaaactatcacaaggacaaaaaaccaaacaccgcatgttctcactcataggtgggaattgaacaatgagaacacttggacacaggaaggggaacatcacacactggggcctgttgtggggtggggggaggggggacggatagcattaggagatatacctaatgtaaatgactagttaatgggtgcagcacaccaacatggcacatgtatacatatgtaacaaacccacacattgtgcacatgtaccctagaacttaaagtataataaaaaatatatatattaaaaagaaaaaaaaagacaggagccatagagactggaagtcagtgaatgagaaaacacagtcatgaggcagtgaaggtgaaggaaagagcatacatgaactttgctcatagacaagcgttcaaatcctggctggacgattcaccagctgtgtgactttgggcaaattacttgctctatctgagtttccgcatctggtatggtttggctgtgtccctacccaaatctcatcttgaattgtagctcccataattgcctcctgttgtgagatggacccagcggaatataactgaatcatgggggtggttttctccatactgttttcatggtagtgagtaagtctcacgcaatctgatggttttataacgggaaactcctttcactcggctctcattgtcttctcttgcccgccaccatatgagacgtgactttcaccttccaccatgattgtgaggcctccccagccacatggaactgtgagtccattaagcctctttgttttgtaaattgcccagtctcaggtatatctttatcagcagtgtgaaaacgaactaatacacaatctgtaaagggagatgttagtaacaatacctgactttcacaaggctaattgtcaggcttgcaaattatgaatgcaaaaccagttctggcacacagcaccactacccaccagcttctcaagcctgaaacttgagagtcatctttgatttctgattttccttactctacccccacacaacagattggctagcaagtccttttttgtactcccccaagatatctcacagatttcttcacttatctctatccccagtactaccatgtgagtctaagccactgccatttcccacctgcactacagacagagcccctaccgggtctccctgcttccactctctgctccatgtaacctccaatccattcttcacactttagctagagtgatcttctaaaaacatgaagcacttgtcagcctgctgcctcaaaccctccaatcatttcccgttgttcttagtagcaaacgccttaccaagactcacctcgcaagatctggtctctgtgtgcccacagcctcgtggcccactccttgcttactaagctctggctgcaggctagctgcttcgtccttccagttttagctgatacgtcatttcctcagagagggtcttctctgaccactccctctaaataaggcctcctttcttcattgctaccatagtgccttatttttttcattcccagccattattataattagtcaatatacatttatttgggtgcttactagattaaatacctaccttcctcattgggttggctgctctttgagacccagaactattctagtagagacttgatgaatttctaaattagcagagaaattaaagttgggcttcaataaatgataactattatttattaatacctgtcagagagacagttgtgaagtgtctgcttgtgagcatttgccaagaatttctgtctccattatttgccttaatttccaaagcagaaagcctgacggccacatagaaggctttaccctggcggagaaagggaaggtcattctgtctcagcaggtctactagagaaagctgcccccaaagcccctgacattggatccatacaatacataatttctaggcaagtccttggtatgtctttttgttgctgttggaaactccaggacccaaggacattcatcactggagaagtgggtgcgcgcrmrcacacacacacacacacacacacacacacacacaccagtgttagcagctggcatttctgcctcgaggattttacatttacaaggtaataataaaaatggtattagaaacctgcagacggtctgtcctatagagataaatgtkgattgcaaactccaacatgaaagtagaattgactagaagagttaccaggtaatttaaggcccaacagttgatgtccctgcagataccttggcaagtcaattctgttttatttcagagaggaaataaaacttgcctgattggactttctttcccctgatagaaatgaggagttgtcacagtgaaccatgagagccaaggctggcaaggctggcaacacacgccagagccccggcttctaggatgctgtctttgaacttgaagtcagggtcaagttttaggactcccagtttgttggctattcaggattggtcagttcttcctttccagacagcctcttacctcttagtgaatggggctctgaggtatcttttctaaatgtgtgcatttaacagtagagctttcaatactgagaagcagtgaaacacagaacaaggccagtgatagagtgatgattttcagcaattggattctctaaaacaacactatgcaatagaacttgctctgacgatggaaatattctatatctgtgctattcaacatggtagccgctaggcacatgtgactgttgagcccttgaaatgtcatctagtgcaaataagaaactgagtttttaatttaaatttgaatcactgtatgtggctactgattaacccattggacggcacaaacctaaaatattgtatgactgggtttgaaatagcaagaatgatgtgaggacacaaaggtggagtgagaatatttaagagaagatagctgggtgcggtggctcacgtctgtaatcctagcactttgggaggctgaggcaggcrgatcacctgagatcaggagttcaagaacagcctggccaacatggtgaaaccctgtctctactaaaaatacaaaaaattagctgggcgtggtggtaggcacatgtaatctcacctacttgggaggctgaggcaggagaattgcttgaacccaccaggcggaggttgcagtgagctgagatcgtgccattgcactccagcctgggcaacaagagcaaaactgtcttctcaaaaaaaaaaaaaaaaaaaaaaagaaggcaccccaggaggtttaaccaaggagttggagagggcatatccctggtggttaagcacatactctggtgtgagtcagatctgtattcaaatcccagctctgtcacgttctggcttggaatttgggcaagttacatctccaagatccacatttctcatctgtgaaatgaacataacaatagaacctactcccagggctgttttaagtatgaaatgaggtctatatgaaagtacttaatactgtgcctggcataagttattatcttagcaactttgacattatcttttaatatgaaatatgatcatcttgtatatctaaacccacaactggatagcagtgttggtgagctttgtgatcagagagaaaaagatagggaagaaccaagacaaacttttcctctgccagaactgactggtctcatgtgactgtgctgaagtacacctataagcaaaaacatactgccatgcctccttagccatgaatagcaagttatgccactgtctcatgaaatagatgttctgtgacagtgcactacactggaccacttatagtataattatagaatgaaaaatctggaagagatcttgaagaccagtgattcttaagctttcatgtacaaacaaatcatctgaggagcttgttaaaatgcaagttcagattcagttggtctgggtggaggccaagattctgcatttctgccaggcccccaggtctcccaaaggctcctagtctaggatccatacttagggtaacaaggtttcagagcacctaggtcataagaccaataccctctttttcagatagggaaatggagacccacaggggtagacctaaggtcatgggacaatgagaagtagagccaaggctaaaactaaggtcccctattgcctgctcccctgtcgggggcacttttatacttcctcaggtggcggcagtgtcttgcattacatgacactcagcagtttgcaaaacgacattctgtcatgtcctttttccatttgtcagccaaggataaaaaagggcagagattactccactcattcatactatcctggttggtgactgctagttaagctgcagcaaaaattccagtatgctgactcttctcccagagtaccttccattatatcacagcacctctgttgcttcatttttaatgttgggaaagctccaggctggatatgatgatggccaacaacataagactttataaggactttggggtcagtctgcatagcagaccatgcagcaaaagcatgaaggaatggaaagagtcaggtacctcttttttttcttttttttatattacaagcaagattctagaggcattttacaagctgagcaataccttaaaggttatacacaagctatttcctggaggtatgttttagtcctaggcaacctaaaattaatgacagctcttattaggaaaggtggaaatgaagcatcaaactatcagggaraagaatacatttccttggtaggcctgagatgcacagtttcttaaaacaacttggtgggagagattgaaacttagcacaattcatagccctatcactgactctaggtgaccttgcataaaggcgtgtttctgcttgtgcacatgtgtgtatgtgcgcatcacacacactgtctccctagcttcttcatatgttcagtggcacactcagttcattttgtcatccaccaaattcacaaatgtattttcaggatgagtaaaatgttatctgcaagcctcccagaaaattctgaaagagttggcctttttcttgatgttacttctttattggctttattcgccaaggtagggatttgacacttttctaggtcttttccatcatgtgatttggattctaggaaataaataagaactaggaagtcagactcatcgagctgccgataattaagggaatttggggcctctgcttgtcaggtgtagatcacaggtgaagcaacatatttagagctcccagttggcaaacacagccttccccttaagccacatcccctctgcatagtctcaacttgttgggatgcctggttagccagtaaggtatcatttacgtaaaataccacttttaaaccactccatttttttcctagggtgcaatttgtactacaggctcatctgctttaccatattccattgctatcaatgaatttcttcataagaacagtgcaaacacagactcattgaataaagagggctttggtgagagcaaaaattaaagcatgttagacaatgtcactccatcttctgctcaaatatcttggataaatgaggaatgatctatctgctttccattttcaaaaccattgatttttgttgcaattagacaacaaagagctagaccaggcaggatcctttctctacttttgaaaacarcattcaaggatcccagctgttttattgactttctctaatgccaagagttggggggaggggtgaatgttccttgagtcagcatgccatcattgctgggtaaagagaaggatgcttctgcggtctagggaaaggtttgcagatgacttcatgcacaaatggctcagggtccccaaatggtttctgtgtcctcaactttctatgtaataagagccatggatatttctgagcacagtttgacctgcattctattgatctaagcatttggctaatcactctctgcaattaaatccttctccttgcaataaagttaatctcttcccagcacataaaatctgacctcacagcttgaggaggagaattgccgttgtttatggtgccatcttgggacccaacagcttttttctgaaggctgaagcaactcttggagtttgagaaattatattcccctcaaattaaattattagaatgcttttcttcatttctggatgtgaaccccacataggctgccttgtttctgcccagcctcatttcttctccaggactcatcatggagtgtgaagcattaaacatatgcttctcctcaggcgacctgctcctctttgatttcaaggccattggcacatattttgcaattattctgtttaccagtttttgttccagtttgaagagattcatgtctaatatataataatatcagaaaatccacagtctccatcctcacttcagtttaagctttctaagggactcctcattgcttctaaacagattctgattttgtctttctaaacaacatcagaagagtcagtaatccatccggcraatatttattgagtgacaagtcacaaccctggctctcaaggtgtttatgttgttattgaaaatatagtcaatttaaaaggcaatggatcagagcagggttagaggggatggaggggagagggcaggcaacagaactacaaactttgtacacagatggccttgggttccagtcccgggtctgccagatgctagtagtgacacctggagcaagtcactggtcttctctaagcatcggattcctctcatctttaaaaacagagatgaaagtacctacttcattgggttattgtgaggattaaataatgtatcttaaaatgcctataacaatgcctagtgcataggaagtagtgctcaataaatgttagcaataattataattatataatataattttttttttttgagacagagtctccctctgtcacccaggctggagtgcagtggcatgatctctgctcgctgcaacctccacctcccgggttcaagcgattcttctccctcagcctcccaagtagctgggactacaggcactggccaccacgcccgtctaattttttttatttctagtagagacggggtttcaccgtattagccaggatggtctttatctcctgaccttgtgatctgcctgcctcrgcctcccaaagtgctgggattacaggcatgagccaccgtgcccaaccagcttaactatataattattacctgatttcctcacaacaactacatgaagcaagcactgttatttctccctactttgcagatagaaaaaccaaggtctagagatgcaaaataatttgccaaaaaccacatagtttataaatggcaggctttaacccagggatgcctaacttggtcttgtattccttaccattaccccagggtgactgggctaagctttccttatatttttaggagctgcacatgtcatagggctttgaaaaatttaacttgctaggcctgctaatgatgacttaaataaagctgcatgacttagctagaatataatattttcaaatattcattctattgtgtttttttctcctgatacccagtatttcttttaacataaataaattttattaaatgccgaattaaaactggttagattctcataacagttctcagttctgaatttaaacttaatgttatgttaaaatattaatgacctttatctttaaaagtgtctaaattgtactaaagttaacaaatgtggctgataatccccagcactctcttagaacattccctgacatgaggcatttgctggggcttacatagttctaatgtcgggtttcaggcagcactgagaaatacaaaatgtggggaaattttgcattacaaattgcctggggatttgatctcctaatacttaaaaagtgttctaatttcagctaaataatagtagctgtaaagcatttaggtgtggatggcattaggcatgcgctctatggaataaacatgttttggagagagaagtagcatttggagcatatgaagggaacaattcataagctgaatttcactcctcttgtccctgtgtatcctgctttctctgacatgaacattctttatggctctggttccagctccttgaacattttattaatgttgatagtgaggacaggagtaaaatttatccgaagcttagttctaatagccaggttggactccttccaattccccagaagtcctgtgggttcaaaatacttgcataactaactagtgctggcttctgagccttggggcacaagttaaaggcttgatctccttttttgtaaacatgtcctttatggaaagacctcactatatacttatcccatccccaccatgatatggagtgtccaagctgaggaaaaactgtttaccaacctgctgacaaaaccctacttgtaggaaatcccatgtcttatctggctaaataacttagaccatatgttcaggtcccagagcctgggattcttcagaacaagctgaaatgtgcctatttgcatcacctggggatactgaaattccaagcacaagttcattttcacataactcattatgctcccttggatttggtgcttaatgtgaactttgacaacagatggaatgagatgatgcttcaggagcacttactaattcttttgtgctcacaaatacacacaaatagtgataatatgcactcaaatttccaaagccaggcagtgccctcaggtattcatttgccacccccctgttgagttcttgggtagaatttaattatccaacaaatttggagatagctatgccagatgttaggtactgacctagacatttccaatggaagtatccaatgcattctagagagagcagggaaagcaaatttgggaaataagactctggatgcgagaaaagggggcgtgaaactgggactagagcatgaaatttgtggtgacttcctcagtcagattgttactccttaagctccaagaaccattgggtgtttgtgtgggtcattcaggaaggtctgagaatatcacctctgcctcagttagtcataaagaatctcatcatttggacccagccgaggacacagcttttgtctgttcacaataaaaacagaattaccccattgatttgaatgacagacacatgcagctgctcctccctttcattccagcatggttaagtggggccacttggagcactaactcatcttcgaatttgggcttagctctggagaagttgttattgcaattataatttgttattaataaamtgtattamcgggattmtgataatagccagcatttattaagtggggattctgcaccaggcactgtgctaagcatttgtmcatccctttcactctcatagcacccttattaagtaggtaattgtaatatttccattttatgggtgagtgaataaagctcagtcttttaacataagtgcctaaggtcctacagccaataagaggcagaggcaggcggcctgaccccacagcctgtatcttcccatcaccctcagcatgaactgtatttactgatggtgatttccccatccaagggcatcttctgtgctccagtctccacttaaaaggttataaaggggccctattctttttctagttttattgtatatttgacagttaaaattgtgtatatttaaggtatacaacttgatttgatgtatgtgtcataaaatattagccacagtcaaattaacatatatatcacctcacatagttgcctctttttctgtgtatatatggcaagaacacttaatatctgcccttttagcaaatttcaagtctacaatacaataatgttaactatagtcacattgctgtacatcagatcttcagaaattattcattttgtataactgaagctttgtaccccttaaccaacatgttctccttccccaccccctcaggccctggtaactgctatcctactctgtttttatgtttagctattttagattccacatataagtgagatcatgcaatatttgtcattctgcatctgacttatttcactttgcataatgtcctccaggttcatccatgttgttgtaaatgccaggatttccttccttttaaaggctgaatgatatcccagtgtatacacacatatatatacatgtgtgtatatgtgtgtgtgtgtgtgtgtgtgtgtgtgtatgtacacataccccacattttcttcatccattcatctgttgacagacatttaggttgcttccatatctggctattgggaatggtgttgcaatgagcatgagaatgtggatctctcttggagatcctgatttcacttccttggagagcccccctattttgaacccctagtcattcctaccccatccaagcacagctgattagaccgaagggcaggagtacagaaaggtaaccaatcgatagatgggcttatgactttttatgtgacctagtccacccccccaccccccaaaaaaaattagctgagtctatcagatttcttctcttgggagttgagaccagaaaaaaataccatcagggtatttagctctgagaacttaaggtgaaatgagactatgagagcaagtctgagctgtgaagtaatgaggcagcagtggctatgaggaagcagagaaaattaatttggtagagacagcattagagagtgccctccaagaagaagggtcttgaggaggaaaagaaatagccagcagcctgggatgcccctaaccttgatgccattctggtaccagtacccggggatccttacaatacacagttgtgaggatgaagtgagataatttatataaattacccaccagaatgcttgatccatagataggtaatcagtacaagtcagtaatattatgtttattattattatcttttatttatatttatcttttatttggaaattacagaaaatcctctcatttccaattatcaagatgcatggacctagagctataaaaatccatattatttctttcatsattgaattgacttccttaattgttataataattcaaatttcagcttatgattatcgtcttaggttttttttcagatcgattccacacccactaatgaactatcgtgttgagcaatgggagagcaattcccataatctgtttccctgcaatccctcttctgatgctaatgagaagtaccatggagacatcagccgttagtatacatgggctggtataaatcatggactatggatcattgtgcatctttgttgtaaaacaaatggcctgtggtcagttaatcatacaaagaaacatctccagggcctcctggctttactcataacccctaaattcgtttgcagttttataaacagaacatctgttaaaatatgcagaaattacaatcatagtcattagcagagagctatatagctttggcagattttttcctaagcttttgatggtgatctcctctatctgtgattcatgcttcattcccagtcttgctgaatctcttttgttcacctctgttcttttgggttgcagcacttttaacccaaaactcatgagtggacatgtgttgtctcaggctagattggcaccatgccattgtgcagcatggcagagtgactgtagcctgtcgatacctccttacaaaacygtatattttgggtgtgcaatatgcatatcttccagcagccagaagctgagaaaccctaattggtttcacacctcttttactgaccttggactcttacagcactggcatttaaccaaaagtaaatagagctccccactatcaccagcagcagcccaaatctttcatattcattctctttctgtctttctgttaaaatttgtactgtgttaacaatttaaattaggctagtgcaaataacatctaagtcaaagacaaggagaaatatgttcatcgctagaaaacaagatttgctctaagaacctaggttggcctcctcattgtttagtgaagaaatcataactccatctaagaactggggagtaagtaaactttctttggccattgctttgttctggctgccccggaatgggaatcagaggatattttctacagaaattaaaaagtcacctcggagtattcagtgtatctgtcacctatttttatatatatggttttataaattctcaaagtcactctggttgagcctgactagatccctttaaacaggctcacaaggaaaaagaagacagaagtgaagtggctaagatagcaaattctgaggtcagacagacatggacctgattcccagatctactatttgttagctgtataccctggagaaagttaattcctgaagctacaattcccttctataatattagtgcctacctcatcaagttattgataggattcaaagagataatccaagcaaagcatctcgctatgtgcctagagcattcttaagtgctgagtcaatattagttgctactgttgataattttgtttgttctcagtgttaatgcactgttagattatgttaggtgttgattttatcattggtaaaacattctttttgtaaagtacttataatatttaaatgatagcattcatttgtctaagaataatttaagctcctgctctaggctcagtatgctggtgagtgctgtatggtgtgtgaagatttatcttctgcatatgcctatcaatgggtataaatcatcttagaatgtattacagagaaaatccaaaccaagtactgtggaagctgtggattagagaaataaattaccagctggggaagccttcatcaggggaaggttaaggaagtcagggttaaggcaggcttgacagatctccagtgatacgtgagaggagagaagagggtaagtctccttggaagatgaaaaacaaaatgaggcaaccgagtgaaagaaattgggataaagtagacaaggaaagggccaatttgccttctgggtgaatgaaaaagaattagagggtaaaagccaattagaggctcaaaaccagactcaccaagtccccaaagatactagggataaaaatggaaagctcctgaggaggagactaaaaataagacaaatgcctgtctcggatggagtagttatgggaagggagactctgaaaggagattgacggtttgtttgtctatttctcagcctgtacctgagacaagctccagttttctgccgtattcatggcacttactggcacttgtggctgcacagctccctgccaacctctgaactccaggagctaagccagctgtctttaggcagccgctttcttgctttcaaaaggaaaattgcagttgtgcgttggagtcctgagccccaattaacatgtcaggctctgaaacaaacaaatacagataacaaagagggagataatgttttaaaattaggttctcaggagtcccccattaatttggagctcaccagacagttactgcatgttcaataaataccatttgatgacaataatgtgcttagctgctggtagtcggagatgcccagtagataggtctctttaagcacgaggttacaaatataccttgttatatcatattcagcacagatgcagagtctttcagctttacagcttttgtgagtattaatccctccagaggccagaaagatgggtgttatcatcctcctgctaaaaataaaagaaagcaggcaagttggtttgaaaaatccagatggtgagttcaggatacatggactcactgtataatgttcagtacacacaaaaccactgcataatcaaatatgctatgtaaatacccagaggttgtttagcagggtagcttgtggaaatgaaaaaattagcaatagtggcatggattttttaaaaagcaattatttgctttatgtgatgacaagaatccacagatggtgcatccttaagttcttgagtgtcttgaaagctaaagcatgattgtagtcacactacaaataatagctgaaaaggggtatgtaagagccctttattctgttgatttcagtggaacagtgcctgttattgtatggatcatggtggagcactttcatgctgtgagaacacagtgggaacgttgagagctaacaaagggtcaactcccaaaacttttggaagagtttagctgatttactacttccaccttaaaaggtggagaacttatgggatggagttacaggctggtgaaatcaagctgattcttctcattgccaatggtggtatattaagtcactctcactactataaaagttcagagtggaccttaattagtagcaataatcacaaggtgatggtactcactaagaatcaatggcctaactaagaaaaaacatgtgcttcctggccagacttagaagctacaaaacaaataatggtttttggcagtggtaactgggaacagagacttcctaaatttggcttgattagtttccttttctaccctaggtttgtaaataggacttcccaaattgtacatttgttcattcagcaaatccttattaatcatcaattatgagccaggtcctctgctaggtatttgttggagaaatagtatattctgtggcttatctttagctcagagattttgccttatttgccttacctttccccagggcccttggcacagtatatggcacattgtgggcactctgagtgtaaattaaaagaagaagaatgtttgccatttgtagctactagagcagtcagatgccacggaagtggtgttctatctcataataacttaaacttatcacttggtaaaaagtgcattgcacataggccaggtgggtggttttaagttctgctcactctgtcctttgtgatgacttctgtttgtgatgactcgaggaacagatatgtatacacttggacgtatgggagcatacgtggacctatcatgaagattctcattggtttttttcattgcccaattggataagaacaagatgcttctgcattttaaaatcctcctcagatgtcatatcattgcaatgacatttttatatgggtgttttctgttggtgtaccattgtttgagtcagcagcaaaacacactgaatgcctacagtggaagaggtgaaacagagatgcttattaggcagtaactaggcagctgagttcaatagtgacaaaacgtagggatagtctatatgcaggcatgtttatacccagttgagcatagataaaaatgtgcatagataaaaatgatagtcactaatgatgacaaagaatttttatcatgtgccagatactacgctggtcattttatgtgcgttattccatcgaatcttctgttttttagtcatgcaaattgactttttcagctttgagatgtaattgacaaaacagtttgtatttaagttgcacaacctgacgttttgatatactatacctagtgaaatgagtccacaatcaagctaattatctatcacctcacatgcttatgttttgtggttttttctgttttgttttatgcatatgtgatgagaataacatctactcttagcaaatttcaagtatataacacattactaactgtagtcaccatgttgtatattaggtctctggaatttattaggccaacagctccccaatacctcactcctcaacccctggtaatcacccttctactctgtttctatgagttcaacttttttagatttcccatataagtgagatcatgcagtattgtctttctgtgtgtggttcatttcatttggcgtaatgtattaggttcttccatgtggtcacaaatgggagggtttccttttttaaggctgaataatatttgttttgcatgtataccacattttctttattaattaatctgttgatagacacttaagttgtttctatatcttatctattgtgaataatgctgcaattaatatggaagtttacatgtctcttcaagatagtgattttatttcctttggatatatagtcagaagtgggagcctatctaatctccttaacagtccttatgaggtgggtactttcaccagccccattttatagataaagaaactgataacctgcttatgaccattgcaactaagaacccattttcttaatcactacactaaattactatgtaagtatttaatataatgtgattaagaaattatttctcctttgcccccatattttcattttgcacaaaaaaaatagggggcaggaggaagacaccactattcattgtcttgattttcctgttttagaaattagtccagtcccatttgattgcctcccagtggaaccaataaattggatgagtcagtggttctggaaaaattcttaaaataaaactgcaccatattaatatgattagtcatatcactaaaatagagacaattcataagggctgttttcaaaaccctaagtaaaaacataaagcaataggatgtgcaaacagttggtaatggcatttggtattgaaggaaatcatttgtgcagttacctttgattcaagcaaatatcagctcttttttccatgtttttctgggcttactcaactgtagaattattggagttatatgcgcatttctgagaagctctgtacttgtctatttagtcagaactaaaaaggaagtgggcattcatagcaacccattttatttatagctctgctgtggcagtttattgtaagtacagtcacttgttagcataagttaaaagctattacactttgattgcaactatcattaggtaaagttatctgaataagcttgggtctccactgacaaatgaaagatgtaaatttctcacacrcttttaatgagtaattagtgcaaacctaccatttgctctgcaaagttcaaggttattttatttactaacatgactaaataaaagatcaatttcagttcaagtaggaaattgattatgattgacaaaagaagactgaagaccttcataaagagtatcaaactattttttcaagctaagctgtagtcattagccatgtacagatatctttcttcagtcacaatcctacttgtgaagttaagataaaggccagttttattggtctttgggaatggagagttattggacagagtcaaactaagtctattttctataatagcatttctcaaaaagtgttcagaatttcctgagatatgtgtcaaaatgaaatttctgagctctactcaatatctactgaatcaatgtctaggcatggtcacctagaaagctgcatctagtgaatttgactaagtgtggggaccactgagcaaactggtctccctgtgtttaratacctcagcccttacctttgtctcagcattgtagttgcagctcagtataaccctagagacagggaactgaattcttttggctctgttgcccacacttaggtcctttatattctcgttatttctaaccctaaacatgtatcagctgatttaaaaattccacttgggaataggcagcaatattgggtgacaggaacacagactctagagtcagactgcctgggtttcagtcccagctcagctatttatgtctttatacacaggtgagcatatatgctcttggccaagctgttgtgtgatcttaatatccatgagcctcgatttccttaattataaaattaggataaaaataactgacttaacaaggttatagggattaaataagtgacttaaatgaattagtacttggatccactgttatgtacaattctccctttattatttcatctactcttgtgacttgaaatagtatctatatgtcagcaactcccaaattcatgtttttagtccagtcctgaattccatattttcttatgcaactgctgcttcaaaatttctatttggatgtctaataaaatatcgcagacttaatatttccgactgaacttctgatcatctcctgaacaaacctttttcacctacaactgtcccttcctcagttgataacaacttcatccttctagttcttcaggccaaaaaccttgcagtcattctttattcacactccacatgcaatgcatcagaaaatcatattggctctatttttaaaatctacccagaatctaatcttttttcatcacttccactgctaccgtgctgatgcaagcaagtatctaacatactttgttgtagcagttccctgcttccacttttaccactgacccccaaatctcttctccacacagtagccatattgattcctataaaaaattaggtcagatcatgtcactcttctgttcaaaatctttcaatgactccccacctcacccagtgtaaaaaagggcccttatgatggcctgcaagaccctacatcatctgtccttcggtttattctctaacctcacttcctactgctttctgcctgtcccgtagccttcttgctgctgcttgaactccccagtctggaaggccttaacattggcagtttcttctacctgggctgctcttcttccagacatctgcatagccaatttccttacttcttcaaggctwtaagtgttgccttttcaatgaagcctttcttgagtacctatttgaaattgaagtccccttgcacctttagtctttctgatctgcattaacctattctgctttcccatagtcaccttctaacatactacataccttacttatttattgtttgttacatatctccctccaccagaatctgtgttccaaaaggacacttgtttgttttgttcattgttatacccccaacatcctaggacagtacttggcatatagtaagtggtggtcaactacatgttgaatggatgaatgcatgaacaatgtggcattgactcagaagatagtttataatttcccacaggtttttggctgggctcttgaactatttaacattttgtcactgtattggccagtaattttttggttaaacaggctaaaaaatcctactaaaagtttgcttaatcaaaaattaggcacacacaccttaaaagatctaaagaacactagttttgagtaaggcttgatctagagcctagctatgttacccgggttcaatagtctctgtcctctgctttctatgtagacccagcagctgttccagcctctttgtggtagaaaattgtctgccatagtgcagggttccacatctccttaaatccttaggaaacatctcctaacatctcattagctctgtttggattctgtgcttatccctaaatctattccctatattcagtaagatggaatacctgatgaattaggccaattagggcctcactctcatgtggcgggaggaatcagcacctctcaaattttacttgaggataagaaaagggaaagtcaggggattattggcagaagaagaaaagaatgggttgctgggagacagccagtggtctggtataataaatagtagtgagtgtgtgcttattaaattaaatatggtagcataaggtttggggattcaagccaaaataacatatggaagaactgatggatttcttcattcattcaagaagtggaatagcatctgcaaaagcacagaggtatgaaaatgtttgacatgtttggagagctttgaggagtgagtgtgaagagagtaaaagtaatatgttggaatcttctcaatgtagcagtgaaaatctggacctaactctcattggtccaagttggatttttttttaatgcctgaaccaatcactgttgccaggggcagggaatatgccgattagctcagacctgtaagctgtacagacgcacacgcacacgtgcacacaccacacacacatacacacagcagattgggctgaaaaatgaaaaataatattttcttaatagaaaaaggggggatcgacactgaagagttataagaagcagaaaaagattggcaaaatatctcagaatagaccaatggactaagatatagcagtatgatagttacatgacattgaacgtggtgctaatgtaagatatggtgtgacagttgtaaaattccctgccacttttcaaaaagacccgcaccattctactccttactttttgtgttatatatatgtccttccaaaggacacaagaagagaaacaggtcctaaaagataggtgactgggcatagttgagtccttcctttgcaggtagtctctctttgccttttcttctttttcatcttcctttggggtgttttgaatggagaaaaagaaagcctaaacattgaccgatttgcagcattcgttgtgacttttgtcctttctgctccacttgtgtatctactctagtatagttcagaatcaaaatgtgaaggtctgactgttcctcaagagttcattttattctgtccccaaaacactgtcccactttcttcctcctctcttcaatgctaaatggaatgtggacaatcataatataatgcttcactcttcctgccattgtaggattttcagagaagaaaatctaggtgtctgaggcaagagaaggagagtgtgaggtttatcacaggtggatttatccttgggagggatattaggcaatgctgccttatggctcagtgcaggtgtgctcagaggtgaagacagacattggggtatctttctgtacttgttccaagtccccatcatatgctcatccccctttgtgcactgatctctgttgccttgctggcgtaattaagcgctcccaatgctactgccccagtttctagtctgtgggtagaaagagctgccctcacccgtgccaaccccccagcatgttccctcattaaatcatgcatatgctaatgaagtgtgaaaatcagccaaataacaactctttctaatcacttaaggtcccaagagcaaagggcttttttcctgttctcttaattttggggtggttgttatgattttcaagccaatcggaagcacaattctctggtgtttctcctctcccagttcccttccacagaaatgagggtaattggcattttcacttctatctcaagtgagaagagtcttcaggaaaaccagtgacccactgtgcccttttcatttgcatctggggctggataatccctagttttacattcatacacagagcagtcccgaagggcaattaactagactacattatttcctgccccctggagggctagtgtttgagaacatttcccccagagatggggcatgtcaaggcccttgtgttgtgattacattttacctctgcatttcagtcaacttccctgagactttgcccctctacccattatccytgcagacctagttatgttctctgtctccctgatctggcccctgcctgcctgaccatctgctacatccggccatttgcacatctctcttttttcttcttggaaaggtttatccacagacattcttatgtctggcctctttttatccttcacatttaggctcagttgtcactcctcagagaggtcagccctgaccacctatttaatattaaatccaatccattatcattatcttataccacctcctctttattcccttcagagcccccatcactgatacagtcctatttcttagatgtattgcctctctctccttgagggcagggaccatgcccgtgactgtctcgtttgccataacatcaccaggcccatagtaaatgctcagtaaatgtctttgcgtaaatcaacagtgttttccaagtacctttgagtgattttcatgttgaagtataaggttttatttctttggctgtttcacctgagactgctccagagattttgttgtatttttgtatttatatttgcttctctatgttaagcatgtgtgatarctatattattaatactgaccatgttactcgattctaaaatcattgatgatagtgaacatgttactgaaagttttatggagagactgaaagggttatgtcacatacccaacatcttttttcttttccaagtcttacccatttgccccccaagtttttggctattttctcttgcctttccacccacatattcactcagaaatcctccttcctactcttttgtcaagacacaatcagctgttgccctcggattccaccctacagagcaaaacaaaagcctcacagtgatctcaacagtggccaccttttgttcctggagcacgctccttagggacctgagttcattccaacatatttgaatgaataaatcactgcatagatgttatcttggtcccaactgatctgagcccttttttcattttattcatttattcaacaaatatttaccaatgtttgtgccaggtgctggggtacaacagtgagcaagattgatttgctgatgctaaggtctctggaagaaactgagagggatgaatgaatttagaggtctgtgtgagtcaaaaccccaaggcagagagttttgtttctgttgttgcagagtgtttaagtgtaacccaaaggattatatttaaagagtacccttcaccataatttttgttgttgtgttgttgagatagagcctttctctgtcacccaggctgaaatgcaatgatgcacgatctcggaccactgcaacatctgcctcctgggttcaagggattctcttgcctcagcctcccaagtagctgggattacaggcatgtgccaccacgcctggctaatatttgtattttcagtagcgacggggtttcgtcttgttggctgggctggtcttgaactcctggcctcaggtggtctgcccacctcggcctcccaaacgtgctgggaggcrtgagccactgtgcccagccccaccgtagatttttaaagtaattttccaaattacttaatgttaagattgtaggttgctctgtccaacctaaacctccctactttggaggttactgttccctttttttttttctttaaaccagggtgtgctaaagaaaaaaaaaatgtggctggtgagtgtggaatttaccattatccccaaaatttgggcagaggagattgaagccaagctatattttttggagtctaatatggatttatttttcttcctcctccaagayaaaatatagctagactcagtagaagacactatatatccgaaccacatgagaaaactggaggcaacttgcgcaaatgctcacacaacggcatggaggaggcagagggagggattctcatttccagctggaaaatcaggcttccaccaagcctgctcagttttgactttgcctccgaaagcagacatgagaaagacagtttgtcactcaactccttaactatagtagagagacagagaaatttaaaagccaaagatgcagtgtttcattgaagcagcatgttattatcacacctgttaagatttgagcctaaagaaagaaagaataggctggacatggtggctcacgcctgtaatcccagcactttgggagtccgaggtgggtggatcacctgaggtcaggagttcgagactagcctgaccaacatggtgaaaccccatctttactaaaaatacaaaacttagccaggcatagtggtgtgcgcctgtagtcccaggtactcaggaggctgaggcaagataatcacttcaatctgggaggtgaaggttgcagtgagctgagatcaccccattgcactccagcctgggtgacacagtgagactccatctcaagaagaaagagaagacaagagagaagggagaggggagaggcgagaggggaggagaaaagagaggagaggagaraagagaaaagagaggaaaggaaggaagagctctggtggcccaagatctgaactctccctacagaaggcttttgttcagccagttaaaatattttaaatgagctgccaacatttgaaaaacatacaatttttaaatgttaaaaaaatctatgcgtctatcttcccttgacaaatctgatcctgtggccacagtgtgtacatacaaccttcatgaccacagttagctggagttggccaatagtgatcaccctgtagatcatgtaggagtattccaggttgccatatttcccttccagcctgctcccctcatggagattatctgcctggcatctgagtttgcaaccctcaacaaaggccatggcaaggaaaataatagggcagttgtaagcactatttttgtgtgtgtgtttgatttttgacaaatctaaagttaaaatcccacatctgctactaaagatccacatggccataggaaaatccttaacctctctatgcttcagttttttatctgtaaaatagggatttattatgaaaaatgaacaagataaaccctaaagccttatgcatttgactggaattattataagcatagataacaagagttgttgttagcttcgttataaagaaaagcttcctgagatgattgaattaaagaaaattttacaggcctcacctttttattgctttcaggcaacttyatctttctctaaagattgatctgtaataaaaaggaacttgctagattacatcatacccaaatgtgtcttcatttttttccctaccagtttgggaggtggggagagccagagagaatcaaaccaatatcatctctttccaaatgataccaagaaggattaatatgggcaaaggactaaaagggtttatacacaaacagaaaggagttataaattaagagctcggagaaagcagagggcaatgtaaatatcttaaattgtctggaagtaacctggcccccatgaacagcacttcagtgatagttggtggttgtcaggaggcccaggtgggtacagccaggggtttcaggaagtggcagcatctgtcttccttatcaggatgtgggataatcaggaaggtgccaacttcataattggcacctggctgactgtctccaggagcrcttcacttggcaacctgggtgaaccatgataatgcatttaaagtagtgtttcctgatgtgtgtatcacagaaaagtggggtgggggacagtgtctagagttatcctaaagctcagaaatgacctttgaaatgagtccttctcaatagtattctacatatcttgagtgattctttttttycttccrtttattatagttttattgatatatagtaattgttcatatttatggggtacatgtgatattttgatacatgcatacaatgtgtaatcgtcatatcagggtaacttgggatatccatcacctcaaagattttattattccttcatgttgagaagataccaaatcttctctcttagctatttttaaatatataacaaattattgataactgtagtcaccctactgtgctatcgaacactagaacttatttcttctatctgactatatttttgtactcattaatctacttctctttattctcccctcccctatgcccttcccaaccactggcaactgccactctactatctacctccatgagatcaacttttttagctcccatgtatcagtgagaacatgcatatatcactatttcttgatatatacatttaatatatttctattaactcctcaactgtgaaaaataaggatttacttccawaacttatctgactttttaaaaattactccattctgatttttgctagttattattttagttccgttgcttgcctttgtaagtttaaatgtcaccatgaaacttctatttcttgtttcaccaacttaagctattaagttgtttttgttttttgtttgtttgtttttgagacagggtctcactctgttgcccaggctggagtgcagtggtacaatcaaagctcactgtagcctccacctcctggtctcaagtgatcctcctacctcagcctcccaagtaccagggattacaggtgtgcactaccatgcccagctaatttttgtatttttttgtagagacagcgtttcactatgttgcccaagctggtcttgagctcctgggctcaagcaatctgcctgcctcggcctcctagagtgcttgggttacaggcatgagacacggtgcctggccagctattttatcttgacttcccactgtgtcagatgagaaagttagctcccacttccttcctccttttctatactcttctccttttatatcatcagggttgattgtgtttatattctcttttgtaaccactattaaggttgagggtttattcaatgagttatctcataaagttgaaaagcaataaataatatttaaacaatttactttttatttattgctaagtaaaatggagtgctacrattgtactttattctccatgggtgtgatgcactcttgggtgactcttattttctgtttgcttttttcttcgcaatcatatattccaaaagttgatactccatctattttattcctttgtaaattggtatctaacttaygtatgtctaatcctacaatttcatgattctgacaagtcaagtatgtctgattctgaactcaccaggaaactgatattctgtaaagttaacataatagaaccttcttttctgatgtggaaatatttatttaactagaaaaatggacaatgttttaaaatcaacacggcagtcatccttctgaagagctgagagccacacaaaaagaaattgtattgatatgtttaccaacttgaactagcacttttaatagtatatttaagagcaacctacagactgtatatattatatacattacagattgtatatatttagaattccagttctaattgatattcattctgatttactattacgagaaggtatgatatttactgaaggtgtgaataggataaataagattgtagtggggtaaaaatatctaataatcccaaggaatgttgtgttgaatcaattttcccatcagtgttataagtgccaatatatttcttcatcacatctattttgtaggtaatatggaaacatccttgactttaaaataatggctacatttattttttaaatatgtaagaatccaatccagtcatttagaggactgaggctgtcctcttctcacacttttagttgtgactaaatttttgttttgttttgtttctatagctgtttattgagaaaacttctgcatatcatgcatgctatttacagaaaaaactagaagttggagaccattttggggaaaaataggctgaaacattcaatgttattattcacaattaaagagagaaagggtaaaatgttaaccagctgaggttctttttattgcataagattttggggtactccagtcaatccttcactatttcggtgcttctgcttcctttgtgtgccaagttttgtaggtctgggaattacgtgctaagctcatatagacaggtacacacacaaagatatatacatactctgatcttccttgatattctaatrtgataagttaataacatcattctccgaggcagaagcacagccttcttgctcttcctatcccccgatcagacagtagcaaaatttctgcagtgctctgggatggaattgatatttagtgattcaggtccttgttcctcagaggcttcatttctggttcatgggaaattctcataacatctgccagagacttacaaatgcgttgtctgcaatcttgtatctgttgaccattgcaaagacaagcatccacctccaagaagttccttttgggtgctttgtgttagaggagtgtcttaaaaaaatttacagcctctgacattaattattttttaaaatagcatgatgtttaactgattataaaagttgtatggactttggaaaatggaaaaagcataagtagaaaaattttaaattgcttatgctatttaatcaactaaagagaaaatgacgggtccagacagatgcttaaagcacccaaaggtaggttttatgagcatttttgtggaaattattatctctttattcaatgcatatatcttttaaatgaaatcagggcttatgctataccacactgtaacttatgcagaatttgtaatgttcacagcatctgaaaatcttcattttagtccagctgattatgcagtgtaacctgggccataaattaaacctggggatgagactatgaccatgcatgcttctgtattaggaatagatcacaaatatgtcatcaaatactcttatatcatgtgattttcagtagtttataaagcccatgacattaatcttaatttgtttaacctatcctttattctcagacattttatggtttttagtttttcaatattcttaaaaactcttcctatacctacttactttttcatatttgggggaaattcactaaaagcagaatttgagccagtatatgtgatagcaggttaaaggattttttttccatatcgattctatgacacttttgtatccacatttctagccacattcccctttctttctctctctccttttctgcctcccttccttccccctctgtttctctctgtctctcctctcttctttctttttccttctttcttctcctgtttcctctcccttctctctctcacccttcaattaagttcaagcattttacatattgaaataaccaagaaaagtacagaaaccaaggtggtcaccatacatgaagcatagcttgaaaaactatggatcaactctttaaaaaaaaatgggcaaggaaaaaaacaactattgagtactgaggtattaggtttgaagaatattatatcttttgcaatgtatgatgtgacttgtgcaagaattaaaaatcaagagagagcaaacagaaaaatttgctaataactggaggaatcaggtagtcatcactcaggctgaagtgaattcatgtgggccatctctttgggctttataactttataaatttgtgggtacaccccaggaacagatgctttaggggaaacttagatgctgagtttcctggattaatatagaaactggcatattctaaatgtaaagttggttcagaatggtgtctttatttttatttgaaacaacatgttaagatcctcaatagctataggagagttctggttcaattatgacaatggataatgtaatagatcgttcctgcattgctataaataaatacctgagactgggtaatttataaacaaatgaggtttaactggctcacagttctgcagcctgtacaggaagcgtgatgctagcatctcctcagctcctggggaggcctcaggaaacttgcagtcatggtggagggcaaagggggagccagtattcaaatcgctggagcatgggtgggggaggtgctacacactttcaaacaaccagatctcaaaagagcttattatcgtgacaacagtaccaagggaaatggtgttaaaccattcaacagaaactgcccccatgatcctatcacctctcaccaggccccacctccaactttacggattgcaattcaacatgagatttggtggtgacacagatcccaatcatatcagttggtgatgaatctggattgatccaaaatttatttcattcctagcgtctttcttcctttatttgactttcagttggatttagtctggttgtaatatcctgaaatatactgttttcataaagtatcacattgggacaactatgattctgtgaaatgtggtggtgggctacaggaaaattcatttttttaactggtattgattaagcaatacatactttttgtctaaaattttgtctcttttttttttttcttggctcagatctcttatgttctgttttcatgaaaaatgccttgcctgagtattatatgaagctaggaatttagatgagatttgaaatgcttgcttgagcaccacagtttttcaaatatccagatttttgtgttaacgtaaactaaatatccaggtggtcgagtgactacacaaatttgggtagttggcatcagacaggcaratggaatattcaagttgccttcttcaaggatacagttcaatatacacactttcacatctgtttgtcattagctgagaattatgagagaggcaggataatgtagtggctaagagcaaagatttagacttagacctgggttgatatactcacactactgttatgatgtgatttggggcaggtttacttagtgtgtctgttttagtttcttcacttatatcatgagaataattttataattttatatatatatatatatatatatatatatatatatatatatatatcatggtggcattatgtatgtaagtgaaataattatataggaagaagttaacatagtccagagcaaataataaatgctctgtcaatagtgttaactgtattaactaatatcatcatcatcatctgaaatgtggatgagaattggaataaagtggcttgctttggcactgaaaactgtatctttacaaagcatagatattcttctacttctatgcagttctatcatgtgatgccttagccattttagaaagaggtgtgagatatatacaaatgagtgactgagtgatcaaatgacacaaataccaacaatgcacttctatattctagatggtgtttgaagtagatcttgaagaacaggcagagagaattgtcatggactcatggactagcaactgaggaagaatatctaactagaggggtcaccaacagcaaacagcacagggattcctagtgattagttttctttttatgttatatattcaacaggtatttcagactctattctagccaggcactagaacaaaggccatctaatttggatatagcataggctggaaaggggaatatgccaaagataattgtagaaaatgtaatacttagagtttgggcttgactctggcaagttgagggagtcatttttgctatcggacagtcagcctttaaagtctgaatcagtattcactgctgtattctctgtattcctcgtaccgcagggcctggatggaggcattcagcaaacattggttctcaattttaggaagatagcaactatcatttttaatctactttattattacttttctgaccatataaacattgcccattttaaaaaataatttaatgtataaaatatcccacaatcaattcattgactcatgcagtcaacagatatttattaaacatgtactacttctctgattttgaggcactaatcccagagataattgaggctttttgtttgtttgtttctaccacagctctacaaagtgttggccacataataggtccaaaataaattgtagtcacatacaaagagacaagtgttttactgtagtggagaaaaatttaaccccacgttacatcattgttttgcaattttgtgtttctaaaaacacttagtttgagctactctatggaatacagaaaaagctacctaatttagtgtccagaatctccaaatctaacataaaccaaaattcgtcccctatatgtaactcaaaagcagacttcaccttcatccccagcttcatcatatgtgtattattaatccaggaaattatactatgtattacaggcattaaactgaacagaagggagggaggcacaccctaccttatgcagagtctattttaaatgttttcagcatctgaaaaccttcatttcagactagctaattatacagtgcaacctgagccataaattaaacccggggatgagactatgaccaagcatgcatctataatgtttatgagctataaggtcattgcagagaacagcaaggaacatagttgtaatagactgttggcctctaaggaaattattaattaaattttatcttctccccagcatgcttcagtggtaccactatgagtctttagacctggggaaactacacctcggtaataaccggccttatcaccgggccggcagtcatttaatatgcttctttgtctgacaccaatcatgaactgcagtgtgggatgtcaaggcttctgcaaatgccaatcgcacgcctcactgtacatcaggcccagggttcagatcttatgataggaaatccaagaatcaaccgcyagcagagtaatccgttttctggaaacaagatgtggacagtctcgtttccagcatccagccccttcagtctcccatgttatctctgaaagagttaaaatcactcttaaaagaccaaagtgaagagactcaagtgtcactgtatttacaccatctagatggagtgctatttttgagtctttggcttaaggtgcagacttgactaggaaaatcagagctgaaatgtcatttccagctactttctttgagagatttcccagatggattggctcagcccacgaatcaaatggcatttttgttgttgttgtttctaactgcttgctgtgtcaaccagctgtgttcgtcctgccccacactggatcccccacattaaatgttttctgatcagctggcagctgttctgaagacacacaaagcagattggagtccggctctgtttttccatagatgggcagccctgccccactaatggggatttaagcatcttcattttaggcaagacagcaggtagagaatataaagcacagatgtgttgattagattctgagttttccaaattgttacttaaatgtgccttctgtggcccagttatgtattctgatgactgtgtcatttacccctgctttataaatttgagtcactgacccatctcctctcttcacaatcccctttgttatcaaaaactcatgataacaaaggaaatctaggaagagtgaaaattcaactcaggagactttgactgaatgcctgaaagatggtactgtggcaccatcagtgagaccaagaatgaataagacacagtccctaggatgaaaaaatcaagaagtgacaacactggcaatagctatgacaatttttacccaaattgcctctgagtaggctgcatatttgaggttgacagcatgtgtggaaattacactcacatctttattatggccttgctacttatgtcatatccctgggtgttctccttggaaacacttttgtgaagacaattagggttaggagaactttattttccatatwacaatttcatagaggaatctgttccactctgaatttttaaaagccattttaaggtgatctgctttatgaaacctgataagctctatggaaatttcaggcaagagatttatagcaaagaatattttcagtagagacatcaccagacaaaaacagtaaatttttatcaggaatgccggaacccaaattgccattttccattgcctctggaaaaaggaaaattatttaaccttgggaaagtttctagttgtacacaattctcatagaactttaaactcttaaaaagtggaaggcctttgagaccctcatcttgtctaacatcctgccatgtgtataaattccttctacaatttccctgctgggctaccatacaattttttattagtatcttcagtgctgggaattttactccctcgtaacagtgcattcatctttttaaacatttatagacatggattaatatgtttaggtagaactgatacaaacaatttaaccaattacattttgcctgttccagctatctggccaaaaatatgtttaagttccagtttataagggccacttttccttttctcaattgtgcatagaaaaactgaatggttttgtatatgtcatagtatggtgccattacaaataccaacaatgatgtttataatagacttcttaatttacctttttactgtggtaaaatatatataacataaaatttaccattttaaccacttttaagtgcatatttagtggcgttaattacattcacagtgttgtgcaattatcactattatttccaaaaatactcattaccccaaacagaaactgcacccattaagtgataacttctcatttctccctttccgtagtctctggtaacctctactatatattctatctctatgagtttgcctattctagatatttcattcaagtagaatcatacaataattgtctttttgtgtgtaacttcattcacttagaatgtttttgaggttcatccatgtttaccatgtattagaacttcattcctttttatggctggataatatttcatttacatatgcgccacattttatttattcgttcttctgttgatgagcacttaggtgtttctaccttttggttattgtgaataatgctgcatgaacattggtatataagtatctatttgagtcactgttttcaattatttggggtgcatgcctaggagtggaattgctgggccatatcctaactctgtgtataactttttgaggatggaagctgcattattttacattcctccagcaatgtgtggggattccaatttttccacatccttgacaatacttattttcctttttaaaaattatagccatcttagtagatgtgaagtagtatcttagtgtggtattttttgcattttcctaataattaataatgttgagcatcttttcatgtacatattggccatttgtatatcttttataagaaaacatgtattcaattcctttgcccattttttatttgggttgtttgtctttttgttgctgagttataagagttatttttttactctggatattaaaaccttaccaaatgtatgatttgcaaatttttttcctattctgtgggttgtattttcactctcttgatagtgtcttttgatatacagaaatttttatttcggygaagtccaattttatatatttttgttattgttacctgtgcttttggtgtcatattaaaactattgccaagtctgacataatacacatttgccattatattttcttgcaacagttttatagtttcagctcttaaattgaagtttgtagtttattttgagttaatttcttgttcatatttgggtagggcccaacttcattcttttgaatgtggatgtctggttttttcctagcaccatttgttgaggagagtattctttcctcaatgaatggtcttgacacccttgtagaaaatcatttgaccatagagatgatggtttatttctgggctctcaattctatattgttatataaaaccgttgttatccctgtaccacatcattttgattaatatagctttgcagtaagtaagttttgaaattaggaaatgtgagttctccaactttattctttttcaagatgaattgactattcttgtattcttggtcctctgaaattccatatgaattttagaatcagttttcacatttcttcaagaaacaccattaggattttgatagggatcgcattgaatctgtgtgtcactttgaacagatataccacattggggcagcattatcatcttaacagtattaagtcttcccatccatgaacactgaatgtgtttccatttatttttgtcttgcatttctttaagcaatgttttgtagttttcagtgtacaagtcttgtacctccttagttaaatttattcctaagcattttattattttttatgctattgtaaacagcgtttttataaacttccttctcagagtgttcattgccagttcataaaaatacaacttcttttgttgttgatttgtattctgcaactttgctgaattcattttattagctatgacagatttgcgtgtgtgtgtttgtgttcttaaggtttttaaatgtaagatcatatcatctgcaggcgaagatagttttacttcttcctttctaatttaggtgccttttatttatttttcctgcctaattgctctggctaggtctttcagtattatgttgaatataagtgataaaagcaggcatctttgttgaatataagtgataaaagcagrcatctttgtcttgttcctaatcttaggggctacatggcttttatcaaattgaggatgttcccttctatttctaatgtattgagggttttatcatgaaaggatatttgttagattttgtcaaatgctttttctttgtcaattgagacaatcacatagttttttcctttattctattaatgtggtatattacactcattgattttcatacattttaccacttttgcaatcctgggataaatttcacttgctcagggtgtataatcctttcaatatgctgttgagcttggtttcctagtattttgttgagaatttttacatcggtattcataaaatgtgttagtttatagttttctttgcttgtgttgtctgtctgactttagtatcaaagtaatgctggtctcataaagtaattaagaaagtgtttttgtttctgtgtttttgttttcgtttttttgaaagagtttgagaaggattggtgttaattcttctttaaatgtttagaattcacctgtgaagacatctagtcttgggcttttctctggaagatttctaattactgatttcatttccttgcttgatacaggtctacttggattttctatttctccttaagtcagttttggtaatgtctgtgtttctaggaatttgtccagttaatctaggttacccaatttgttggcatacagttattcataatattctctctcttttcttttttttttttttttgagacagagtcttgctctatctcccaggctggagtgcagtggcatgatctcagctcactgcagcctctatctcccaggctcaagcgattatcctgcctcagcctcccaagtagctggggctactggcatgcaccaccacgcccagctaatttttgtayttttagtagagacggggttttgccgtgttggccaggctggtctcgaactccagacctcaggtgatccrcccaccttggcctcccaaagtgctgggattataggcatgagtcaccrcacccagccttataatattctcttacatccattttttttttctgtaaactcagtaataatgttagtatacaaccccccactttatttttgtctctctcatcattagagaggttttccttgatttttactaaaatctggatccaagaacctttctgacatttggtcctggttctcagactttattattttttggtcagtttaagacaaaaacacattgctgatagtgatgataataatgacagcaataacagctcccatttactaaatgctttccacatgccaggcattatatgtgaaatagcttcctatatcatctcactcaactcttaaccccatgagttaggtattatcatcttatcctatcaattttcagaaaactaaaacacaaagcagttaagtcattcatcaagttagagtatccaggaaaatcaaagaaagatttaattttgattaggattagtccaaggcttataagtccacagaattcaccaagcctacaaaatatacagttttctctcttgttttgcttatggatactaagatattttatttccttctgtggctgacattacctattacgacgggttgcagtgggaatgtttacagrtaggagaaacaaggatgaggtatttgggagaagagatggtctgtgaaggtaggctgtcaataagtgctaagaaaaacagattaattatataaataattcacattaaacaaaaaactcatggcaattaaaattggcctctayggtaaaaatatttcaggaaaagatggataaattgggagactattttatctgaaatagctgttgagttgtgccttaatttaaacatgcagaaaaaaagagaattctcaaaccctgctgctcaggaaagcaagctgaaagggaaggtggcaaaagaaggaatgaactttgattaccttcaggctctgtatcatccaatccactcaccctataatctgtcagacaatgtttatttttgtagataggccataattcattattttgtgcatgtgctaatacaatggagaatgcattctgtttcaaccanatactaaaagtggagttgtagaattgtgaggccatttccactgctttaattcaaatctagatcataataaaccacagtctgaaagaagagcatgaagcctggctctgctttgtgcaagccttttgaaaagatgaaatgaaaaagtcaaaggagaaaagacaccagctccccagaattatatcagacatattaatcatggaaggtccaaacggaattcctggaatgcaaacggctrtgcagtatggccatttcccataatttccaagttgctctccatcagctggataatactgtttaatcccttacgctgatttaaaattccatcagagggaagtaatgtgtttctgttctggaggtttactatggtaaatgcattactggattaactttatcttcactattacaggggtcttttaggtgctaacacaattttaaaataaaacaaaaactcttctatttgagaatgcattttccacatcagaactcatttgtgatgtttattgagtgctatttgacatctgaaaagcttaagtcttgtcctttacaggcagaggagccttagtaacaaaagagctagacaatcaaaacccttaaatgatatgggattagtctagtgttatgcccaagtgagatttctatccatattcctttgtgtattttaattttctgattatgagcaatgttggctgttcttaaacgtttgtggccacagaaacctttgatcaaaagaaacctcacttatgggcataaataaataaagcagatgaagacaccagttgaggaaaatggacacattgttcatccttctatggtggtggcccttgaggagttccatggctaggcccctgaagagcagtttttttggttgcattagtggaatgcattccactaaaaagaattcaaattcacaaatgcattcctataaacatggaaacacagaagaatatagacaaaraagttgttatcccctctttgaccccactcccctctctagagattaccaccatgaacaatttggtgggtctcattctggatcttctctctgtatttagaaataagtatatatatatatatatatatgcacaagttattaactaatatataattttaggatgttaaaatatacattctacgtgctcataagttttatataggcaaggatttttgtctgtggttcactactttatccccactccctaaacagtacctgacatataaatcatcwataaatgtttgctgttttaggggataaattatcctgcagcttgcttttatgatcagcaataggtcttggagatctttccatgatagcccatatagaacctttttaaaggttgcattatgttttttagtatggatattccagaatttgctttaccattttcctgtagatgtaattcaggttgtttccaattttctgctagtataagcaatgctgcaacgaacacccatgaaaatgattctctgtgtacatgtgcaagtgtttcagtaaggtggcttttttgaaatagaatttgtatctctgaaggtacacacattctgatctcctctaggtttgtggattcctttctcttctcctgcaagtgaaaagagcwtggaatactttttatgggccaggatattgggtatctcatccccacccacattgcattggctagaaattagtcacatgccctcttttaactgcagtaggggattgggaaacacagattagctatataccgaagaaaaatagaaaaattgtttggagagtttctcacatgtctgtcatagcaagagaagctagcaaatgttctacctaatcatgtgcccagctaaaactttcttattgttcaagaagggcaggactgatattggtagacagctcatcatctgccactgctctattgacacttgagtttgtaactcttatggaaggcatctctggggcaatcccatctatttaaatcacatgtacccttctcaaaactcatattttactgaattttagcccaatctgagtatacctcaggtcaacaggctcacttgtagttgatctgaaaatgactgacagcacaagatggatctttttaaaaaaaattagtagcacctgttcgcaagggatttattgtgtttagtgatcagaagctgagactttatcatctgtctccagattgtcaagtcacttaayatggcctttgaaatttctgtgctggtgctgagtgatgaacaagcatcaaagaggtatttcactgctcattcagtcttcttggccactgatgagagccagaccatgggattaggcctgcttctagaattctggcactgggagctttgggtctaagatataaagatatatcctcctccttctcccatctgatgttatctcataatcagccaaagtgaaacgttataatttctatttatttgtattattctttatgcagcaggaaagctgtctgtggcttttcaaaatgcgcctggtagagcatggatggcccatcatgcataggtaaattctgatttttattaaaaaagaatgtcactgtccatatgaaactttgttttcttttgagaaagtaaataggttgttctctgtaaactaaatttggtggagagctgcaaatcccctctgcaactgcttgagcctcattgagctatttcttggcccccaaaggcactcagcacttccctgaatcctgctttactgacaactcttcctgataacagctcccatgcattctcaagtcccaactcagacgacacctcctgtgtgatgatacctcccaacccacatagcagatttacttgctccctcaactctgacttgttgcccttaacatttttctcttagtatcatagtgcattgcaaaacatttggaaataaagagaagcataaaagtagaaacgttaaattacctgttatcataacacctagtaatttctgttaacatttttaatacattttcccaatacatttatttttatatagaattaaaaactatattatatagtttcttacttagtagtatattgtgaacaatttcacatcattaaggattctttttaattgcaataattttttagtgttctggcctatgtctaggataatttttgaattcttcattcytttttttttttttttttttttttgagacggaatctcactctgtcacccactctggagtgcagtggtgtgatcttggcttactgcaacctccgcctgcctggttcaaatgattctcctgcctcagcctctcccgagtatctaggattacaggtgtgcactaccaagtctggctaatttttgtatttttagtagagacggggtttcacagtgttggccaggctggtctcgaactgctgacctcaagtgatctgcctgcctcggcctcccaaaatgctaggattacaggcatgagccactacacccagccaaattctccattcttttacatttaggttatttctgattttttttgctagtataaataatgctgacaaacatcgttttgataaatctgtgtatgcatccctgggttttttttagaattaatttttagaactagaataactaggtcaaagacaagtacatgtgtatttttaatgcttttggtaggtttttctaggccttataataacacttatcagaataaaataattgtgtatttacctgtttttatctcacttgtctataagttctttcagaacaaggacttgctcgtgtttgtatttatagcatttgggatagtgcctagcatattacaaatgtcaataaatgttgaataaatgaatggaaagaaatattggtaaggtggttcacggcaattgaagtttagccataagctaatatagatcctatgtaaagcagtattttccaagatatgttccgtgtcattcattcattcagcaaatattaatcagcctcagatattgtcttgtacctcaacaatgattgctgatccttacagtgcttgcaaatctagtgagaaaagctaaatgcattaaataataagaagaaacgattatagtttacgataaacatgtaggaaataaacaggatactgccatagaactgcgcaaactttagcctgtatcagaatcacctgaagggctcgctaatacacatggatttgccacaccccagagtttctgattcagcaggtctagggtggggcctgagaacttgcattcctaacaagttcccagatgttcctgatgctgttggtttcaggaccacattttgaaaactactgtgatagggagtaacatcgagaagggcaagggagaaggctgtgctttaggtggttacaaaagctttgcctggcctgtaatcccagcactttgggaggctgtggcaggcagattgcttgaggccaggagttcaagaccagcctggccaacatggcaaaaccctgcctctactaaaaatacaaaaattagccaggcatggtggcacatacctgctttcccacctacttgggaggctgaggcaggagaatcacttgaacctgagaagcagaggttaaagtgagcaattcagcctcagcctcagtgagaggcagagtgagagactgtctcaaaaaaaaaaaaaagtaacaacaaatctttgcctgacgataagatagttaagctgacacctgaaggattaagagctgtaaaaagtctcagaaacactaggcagatgcgacagcaaatctccaggaacaggaaagagctgggaggaggccagtgagacttgcagttaatgaggaagaaaataatagtcaaagttggagatgtgggcccaatgtcagatggtgtgggcccagcgtcagatggtatgggaccttatagatcatgggaagaagtttggattttaccttaatgcagtggaaagccagtttatattctaaagagatcactctgtgttaagaggaaaaaggatgcaaaataagcaggaggtgaatggagagaccagatttggaggccatgacagtggacagtgagagatgaggttggtctgagctggggagtgacagtggagatagtgagaagaggagggaataaaactgttaaccatttcacccccaggaatttcttgggaagcattggctacaacaaaattacaaccagttcttaggacttgcatggtggctctttgggactttgggagtccagggcagatggattgtttgagttcaggagttcaagaccagcctgggcaacatagcgaaacactgtctctacaaaaaataaaaaaattagctgggtatggtggcatgcacctgtagtcccagctactcgggaggctggggtgggaggattgcttgagcctgggaggtggagactgtagtgagctgtgagtgtgccactgcactccaacctgggtgacggagtaagaccctgtttcaaaaaaaaaaaagaaaaccaattgttaactgctagagttttcagatcctttcaaatgacaatgcttattgtgaatctctaataagatatttttccccagaggacctcaggtaattgttttaaaaaatatatggctctggaaaaagctatagagacagtcaaaagatcagcagttgccagggtttggggagagggaggagtgaataggttaggcacagatcatttttagggtggtggaactactgtatatgattctatagtggtagatacgtgtcatgctacatttgtccaaaccctggaatgtgcaatgcgaagagtgaaccctaatgtaaactatggactttgggtgataatgatgtgtcaacagaggttcatcgattgcaacaaatgaaccactgtggtggaggttgttgataatggggaggctgtgcatgtgtggaagcagggagtgtatgggaaatctctatagcttgtactcaatttttctgtgaacttaaaactgctctaaaaaagtctactaaatatatatatataggtgtgtgtgtgtgtgtgtatgtatgtrtgtattggagtcataatttaaacatcagccatttcaaagcttcttgccttgtgttggcttcagcagcatgggaacttgttagaaacacttcctactgaaagattcactctataccacggaagaaccagctgcagagtcagtgacagtcttaggaatatggtaccaggagcatttctgaccatggactgctaaccccaggcaaagtatgaattaaatgaaatttgcttacagactaaatgactgatgtgtctgtgaattctttggactccccaaacaggagacaaggggtgggcctcggggttcaaattttgaaggatatgagccacttttatatattctcaagtattcctgttttgtgattttcttcttggcctaaacatttagtgaagtctggatatatgcaaggagaaactaatgctacctaagatattctgtgctgttactgtctctgctgagcctttttttttttttttttttttttttgagacacttctatgcccaggctggagtgcaatggtgtggtctcggctcactgcaacctctgcctcccaggttcaagtgattctcctgcctcagcctcccaagtagctgggacaacaggcatgcgccacctcacctggcyaatttttgtatttttagtagagacggggtttcaccatattggccaggctggtcttgaactcctgacctcaagtgattctcccgccttggcctcccaaagtgctaggattacagacatgagccaccgtgccccaccttctgccaagcttttttatggtgccgtagggcccacggtgttgtggtagcattcactgttccagaagctaagacaagaacttgctgtctgtgagactttgagaacttaacctctctgagcctgttttctcatttgaaagtataaataatagaaatcacctcatgaagtacttacaaggattagtgaaattactcagggaaagtactgagcacaacactagctataataatggctgctrtgttatcagaaggaattatgtgttttttacctcagtcttggtcagactttaacttggttcttttcacctgcctggagccttttcccactccccactcactcctggcttaggcatttagccacagttcttcctccggtttatttggggtggaatattgtagggagtgatatctctggaaaatggtaattcatctcaaatgctaatttagagacattttctcttttttttcccagacatcttttttaaacctaaaaatactggaataaatttttgtgggaagaatggaatttgattctttatcatcagcaaaatacatcaaagactactaagtatgtggtacagtaacttttcatgagctgttaaagttagcaaagacatctttctgcatttaagctaggagcacattacagaaagtataatgagggcttttcaagagatgccattggctcctttttcctcaaataattattaatgatttaatgatacttattttcctttaaaagaacatgtttaggtatcaccatcttaattctttaatcaccagatgataataaatggagagtctaaaaagttctgtccaaaacaaccagtctaaacactttcccaaagtgactattttccgggcttgaaagttaccagcatgagaaatcgtgatccagtgaaggcatacgtgtgtcagggtgacttaattaaagtctctctgatggctgtttgagaaaactaatgggtttctttgtctaaatccaaaagctcctatgatattaagtttaccccaatcacttcctgtggtgtgaaatatgcattaactatcttctctacaaatctgatgagaaaaccaagttctaaatgtaatgtgtgtcatgttggaagaatctggataaaagtatttgagccagtgtagtagatgttaagaaacaaagcatggtcttgattatttcacattgcgcacagtttaactatttataatttagagtggcaatttagatgttaccaataataagtcagatgctaacacaaagggttttggccacttctcataatatgtggtttatgttgctccttccatgttctgggcactgttcttcaaatgcaggcttaactttgaggctcagaggaataaggaaaaagagatagattttccttatttctcatatgttgttaaagcccttatgaaactttcttaccagaatggtaatgactctgaaaattaccctagtacaaggtgtgaaaacacacactgcctagacgtggatttcctgtgctcagtctagctaagggatgtgaaagcattcagatatcatatgaaaactacatcttataatgtatgaatgtgaaatatagttattatttacatctgtgtttccaagcaaccttttaaaatttgatatcacattttctatagcatataagaaatcttcactgatttggaacttaaaaaagaagatacatttgtcataaaatagtatgtatgacacacttttaacaaaatctacttattcttctgaaacctctatgtgttttctaccaagagtttaattattggccttattaactctttttatacctgaggataattaaattcttaattgtactgcaatgacatatgattcaagtagcttaatattttggcaataactaggaagatccactaggatggtttagatggggcagagtacgtgtgcgtgtgcgtgtgtgtgtgcgtgtatctctctctctctctctcgggatagagatgttccataaagagacatctcttggctagcaagatcacctcttgagattagaaggacttaaattatcttaactgtagcagccaccaaaaggcctgggacctgtgacattcccactgaggttgcctatgactgaatggagatgtataatggagagtaatgaactcactcttgcaggtgcagcagaagtagacaagtatgtgatcaagggataaggactctggggaaatggagcatgagagctgagagatgcctgcttaaaacattttatccattaggggaatgattctgggtccaaaagttatgtttggttgtataattactgacttgagccatccagaagaggcaatagacttgtgtatttgcttgagttggaaaggaatgaagaaatagcgccctaaatactcctgcgaaataataactttcattccaccctaaagccaaagtgatatatccaaatgtaaatctgttcctacttaaaaatcttcagtggctcctggcttctcagggtaaattccttcaaaagtgggcccacaaggcttttgtcatctggtgcctgcccacccccctccagactcaggtccctacagcccacagctggagtgccccttccactttccgtcatggggctggctccatgaagtccttcagactcaaaccagcttccatcttctctgtgttgagctggttgcccctctctgtgtgttctgccacctgtacgtttctcttttctgtgaaattccttttaataattatattaaaattgttgccaggatcagtggctcacacctgtaatcccagcactttgggaggccaaggcaagaagatagtttgagggcagaagttcaagactagcctgtgcaatatagtgagacccccctctacaaaaaataaaatataaaaattagccaggcatggtagcacatgcctgtagtcccacctacttgggaggctgagacagtaggatcacttgagtccataaagtcaaagttgcagtgagccatgatagcaccagtgcattccagcctgagagacagagcaagacctttggaaagaagggtccttgtcttaactcatttttgggtcccagtccttaacatagcaggtggcacatgacaggtgcttggtaagcattcttttaacagaactgtgggaaacctaaattgctgtagcttttatttctgtggctaataaattattttcactgcatttggtcttgcttacctccttatgagcagcagaaaagcagttgtaataagctaccatttattgagcaccagccaagagtcagttcgtgtgttgggtatgtcacatgcattaatgcttactgaattgccaaaagagtcataccactcttgggtaagattatcatcatcatcatcctttccaaacaagaaaccagaggctcagagaggttgagaaacataccggaagatcctcaaccagcatttgaaccagctgcgttatttctatcctatacgctaggaagctgtcccttggtgggttcccgtttatcaaatagcacatttccctgtctgtgccctggagctatttccatttcctccttcatgtttgcttactagaccctgagcaggtcgtggagcaaaagcactttggatgccagtgacaagggtgtgattccagagttgaaggctgatgttttaactgtgcgttcagttcaggttgttattgatttctctcctctccactttgttatggccaagtgctccaggcagaaatctagcaaaacaggctcacagagctgctcttggagccaggcgggtcacaggtcactccactgatgtgcggggcacattagccaaatgacagaggctcaactagagaactcaaagtgaccgtagtcagatgttggtgatattccacacatgttccttattacctaccagcctgaagcagggcagacctggacttggtctggtttgcttccaggacaatgatgctagtcgcccaggccttctatgaatccacagcctcttgaccacaacaattacactgcattataattacttgtctaggtgcctgtcttcattcctatgagtttcttaagcatgatggttgggtgccgtgcatccctatttatttattcaagtcacaactgttaagcacagactgtacttcaagttctgtgcctgactctggatatatggagatgaatagaatggattagaccagaaatctgttcccaaagagtatgtagatatgtaagaaataactactaaaaactgttgtgagaatgcttagatatttttcatctctattacccaaaatcttagcacagcaccttgaatagaaagagtagtgaacagaactgagtgctgactgtatgcctggaactgtgttatgtgttttatattcactatctcatttaatcctcataactgccttctgtgcagctttcggtactattttcttctccatttaatagatggggaaactgatgccttcagagaatgctgaagtgagtgaattcaagtgtagtcttcccattgagtccacgttgttcataactgcttattgttgcttcctaaaatctatgaaagattattctatattctgcagtaaactgttcttttgttttagccaatatcagtaacttttttctttaacattttgtccattaaaggaattctaccagtcccaagagcatgttgtatgaaatcatatcattccattatgtttgagtggccatttggagtcagagctgtttaagaaatactgtcaggctaagatgctaagatgtcttcaggctggaaggtttaggtcccaagacagattggaaatgtagtgcttgtcagctcctcctacagcccttctctgccatcattcccacatacactctgcagagagctcaatgcggtttgctatctgacaaacatcctagattagtgagtcccatctttttttatccctcatcaagccagggaaacattactaaattatcacacattaaacatgttacacaccaggcaccatgctaggtgttttacaaacatctcctcatactgtaattattattttccatcttattgatcagaaaactgaggttaaaaaagaaatgagacatggccaaaatttcagctcaggcaatctgactacaaaatccagacagttacaaccctcaaatattttcttttttttttttaaattttattattactatactttaagttttagggtacatgtgcacaacgtgcaggtttgttacatatgtatacatgtgccatgttggtgtgctgcaccccccacttcccacaccccacaacagtccccagtgtgtgatgttccccttcctgtgtccatgtgttctcattgttcaattcccacctatgagtgaaaacttgtggtgtttggatttttgtccttgtgatagtttgctgagaatgatggtttccagcttcatccatgtccctacaaaggacatgaactcatcattttttatggctgcatagtattccatggtgtatatgtgccacattttcttaatccagtctatcgttgttggacatttgggttggttccaagtctttgctgttgtgagcagtgccgcaataaacatacatgtgcatgtgtctttatagcagcatgatttataatcctttgggtatatatccagtaatgggatggctgggtcaaatggtatttctagttctagatccctgaggaatcgccacactgacttccacaatggttgacctagtttacagtcccaccaacagtgcaaaagtgttcctatttctccacaacctctccagcacctgttgtttcctgactttttaatgatcgctattctaactggtgtgagatggtatctcattgtggttttgatttgcatttctctgatggccagtgatgatgagcattttttcatgtgttttttggctgcataaatgtcttctttgagaactgtctgttcatatcctttgcccactttttgatgggacaaccctcaaatattttcttcaatacccctggtaaacttcaacagcaatttttcaactatgcgagtcaagggtgggtgagagtgaagtttgaaaaagcacccctcccctcagccaggtatttccaatgcatccctcacccacaaaatcacagcagagcatgcagaccatactaataattccaggtgcaccttaacttctgaggtctcttctgacttgcagctcctcagtctcttcctcctttaaatctagagcatatttgctttaaattgttyagtttgataattcatcacatacagtcttatcacctcacatcttccacttgggtatcttgcctgtcttttccagcaagagtatgagttgctggagagcagagagttcatttcatcccataatagcacatggtggccacaaagacmcttaataaatgctgcttgtttgcttaaatagaggcagtatagtttgctgaactctggaggcagacaagcttaattttctacttactagctatgcagtgaaaattataaaaattccatatacttcagttccttcatctgcaaaatagagattaaagcaataccttatagggttgccaggaatattaagagggtacatataaagcacttggcatagttcctaacacataatatgcactcaataaatagtaattattgatgttattacacaacagctgaatttattcgtgtttactgtgtgttacatgctgtgctaaatgctttgtatgcaattatcatttaatttttacataatataggaagcagatttagcttctaaacaaacacacctttcttgttacccaaaagttatttaagattatcagatgctctcactgtcttcagagttgtgtcataggatgggaaggcacaaatatgatattgtaatacactattggcacatcatataactgtaagacatcacaataactactaacaacaactaaagcactggagttgacaaatgttttgctcttttatataaattaatatagattcaaaataattatgataccagcacttcctgttcttataccctccgtcacaaatgaaaaaaaaaaaaagggaagaaatggatttgccagtcagacccacccatatggacacttcattaatatatgttattatgaagaatagggtgtgtatagatgaagatacctgcagaggatgttgagagtgcaacaggaagggatgcacctaattcaacttggaaggtggaggcaaggagagctttctagaggtgatgcctgagcagagtcttggaggataagtaagagtttcttaagcccacaggggaggtgggggtgaaggtggggacagaacaatcagaattctgttgctgattggctgactctaaacatgtcagtaatgtgcctttaaactcagttttagttttctgcgatggataattcctttttccctgagtgttatgaggttggcttaattaatgtttgcaaagctttcagtaatcttcagataaaaggtgaggtagaggggaagtatattacttattatcatagctttaccagcatctgatcacataaggaaaattccctgaaaggtcatttctaagaagcaatattattagtctggtggttcttaagccttatgtaacttcctggaacaatgcaatagcaagggagaaaaatgacatcaacatggagataataatgaatttaaatcataagccttatttccttactgcagctgctgagtatgagacaagcttgaagcttctaaacttaactcagccactgcctggaagcatctaattaaaagttttcaaataaaataagtaagtttttgtagataaaagagcagatggcttaagaagagaactgaaagactgcattaggaaagtattaggttttaattccatttgggaaaaaaaaaattccatgtaagagagggcagggattggaagtaaaaaaacctaggggtctgtagagacaggattagggcctgtgctatcataaatgtagctgtgaaattttagtttgtaggataactaaatttttctgttgctcaggattattcctatgacctacagaagatattctctgtcttctgcaaaccagtgtccttccattccccagagtggtttctgttcattcttcctttctttcatttgacccgtaggtattaagctcctactaggtactggtacttctttagatgctaaggattcaggatggggaaaaatcagacaaagtttgtggcgtctcatggagccaacttaatggggaactcattcattagtgaattggctaatgaaatatagctcgtgaaaatatttaaatatttttaaatgtcatgtaaacatttgctgttatttcatcatgatagtgccgtatttgtattttattaatttaataaaatacttggacagatgtcataatgaatcctcataacaagcctttgaggtaatgttggtaacttttagccaagaggaaagagaaattcaaagaatgagggttcttgccccagatcacaaagctgtttcatggtagagctgagactgaaacctagctcctctggtgctagttcacctgttgcttttgctgctacagattgagcctttggggcaatcattgaaattttggttatctatcatttgtaaatctctaagccaaggagaatgcttgtatgagtaactccagagaaagcagacatcactgatgttaatgttgagaggaaggggtggcctgtcacaaagaatatcacataaacagaaccataatgtgagcaaaatcaactgaggaatagcatcacaatgccaagctccatatctggacaggtctgagtagctgagaggtttcatgtccttccttggttgttttcctttggacatctccttatgtctactcagcttcatttcaggcgaccaagccttcaaggtgcatggaagagttccgcttggcctcaaagctttgtggaaaatggaagtttaaaccctgtaggttttcttggccttcaaaagccaaggtgatgtcagggcaaagggttccacttggatgcagatcaagtcactggttatttctggaactttcttgcagtttggttccacaggatagtctaagtaccagtgtgatttgggatacaagcaatattcttgtattctttccttcccccatatcgcatgtttgtacagatttcagagatccatatattaaatttgggacactccagggaagacccctrtgtcctctgtgcaagacacatagcaactagtgaggccatctatgttttccagacacccctgcatgtccaaaacaatgtcctcttcaaagtcacctcaaatggggcttccatctctcgccttccacccattttcctttaaactccaaagcagttgtagttctctgctggtatgtgtctctttcttctatttttgtgttcctactgtggtccctccgttccacaatcctcaccctacatggcagccagtactatctttaaatatgtgtatgcaatagatatttatatgtgataccattatataaagttttcactaaatgtcataaatttatataaaaccatgttcccgctctacttctaaaccttctgtggcttccctttgtacacagcacaaaactgtcacattccaccatggcctgggcaacctgcctacctccctccctctccactcagcccccaattccattgcctgtcagttcctcacacttgccatgctctctcctccttcaagccctcactcctgatcttccctccaccaggactgttcttccccatgtgttttgaaaggctggcctttcacatcctaaaaacaagaaaaccccactctcactcagagcttcattctctagctccactctccattgtctaccctccttaatcttaatttgtctgcctcctccaccagaatgtaagtgttgcaaggagaggaaccacatttgacatatccttggagcttcagcctgcctggcagagagctgtgcagtaattgaatgaatggtggatgtgccttgttacccatccagcctaaaatgcagctcactgcacatacaaacaacagtcactgaatgttgactatgcatcaggcattcttttaagtacacgacatgaattcactcatttaattctcatggaaaccatgtgatgctggtactattattatcagccccatttttcagataagaaaactgataagttaaagggttttaaatatctaacagaaaaataatttgcttaagactttgcagccagaaaatgacagagctaggattcaaacccaggcatcccagaggctaccttttaactttcctgtcttcctgcagaaaagattcacatatacttttcagttaatcgaaagaaacttggaatacacactgcagcatggggaaaatgaagaaacctcacatctgccgtagtgtattctttcccaggctgaggaagctagcatgcagtatcattatttctttagtgtgtccatatgaaaggaaaaccagagtaatctctgcagatgctgggattgaaagaatcattgtcccctcatcagaaaggataattaagagcccctctgcccattaaatgaggcaatgaatggtaacccactttgtagggtataaaatgccctataaatgttagttattcttattcccaagctctatggaacagcggcttatgttacaaaactactgattcagaatctttcagaagtactaaatctactcagtagtcaagagaaggaaatgcctctggtttgttccttcccatcatcctgaaaattaaacagcaatccattcttctcctgcatttccaaaatccagggtcagagatatgcaaatgtaagtatgcaggctgcttttaaatgatacatgaaagggatttttgaaatgaatgtgctgtgattgaatttctggtcagtcacccagaaggcattttgcagctaagctctggacccaattccactgaaaatgcataagctttggtgcctgcagccagtctagccacagacgaggatcagggtccttgccttggaactgctattaaatgatgcagacccccaggctcgaagttgaaaaacaaattagcacaagcctaaaagaaatccaatacaaagtttacttttaaaataccttttccataaccttacctgacaacaaaacctctttgattttaaaccatttgatgaaaccacagtgcattaatatataacttggctttttcagtagagcttatctttgtcattttcaaaataatttggatgctctttgggaatacaaatattgccaattggtgttgtccaaagaaaggtctctttgacctgctttaataatagataagaaacatgagtaaaaatgatcatttattatatatgacttatgctaaggtgatttttaagagtaactgacaggagttggctttcttaagtaggttggagagctccgctgataaccttgtttattattaaatgagtttgctaagcaacccttttacttgaaggtgatcaaaggtaaacctcagctttatctgacttgccatgaaattccaaagtagtagaattttacattgtatttcttcccttttagtgctttctaaaattatgtcagtaatgcatgtatgaatgcatgtataacaaaaatagagacacaacaggtgaagctaatcttatccccaccctccatccctctcctctccacttctcagaggtaaccccttcatcactatggcacatctcctgccaaacctttctctaaacatttgtctccatgtgtgtattgttaagttatttaaaaatttatgtttatataaacggtgtattgttgtcaattgctgccatgaacagtgacttgaaataacaaatatttactatctctcacactttctgagagtgagcaatccaagggcactaagctctggggggttctagttcatgatctctcctgaagttgtagtcagggtctaagccaggactacagtcatttggaagcttgactgggactggaggaagtgcttccatcatggctcaccaacacagctgttgcctggagtcttctgtccatcactggctattgacaggaggctgccacatgggcttctccacagggttcctggagtgtccttaaaacacagtagttggcatcctctagagtgagtgatgggagagtaaaagaatgaaagagagagatcaagaaggaagccacaatacctttttattacctagtcttggaagtggcaccttgtcatttatgccatattctgtccactagaaatgaattactaagtctggcccaaactcaagtggaggcgaattaagctgcatctcataagggaaagagtatcgaagaacttctgtatgtattttaaaaccactacatatggcatagtgcacatatgcttctgcaaatttgcttttttcgcttaacaatcttagttttccatgacaatacatgggggtcaacttcattctctttagttgctgcatgctattccactacctatttaatcattctcctcctgatgagtacacctcgagatcgctcccagactttcacttctgcagatgacacagcaatgggggtacttgcttactcctcagcacatgtgccaggatttctctagtaaaaatgcattgatgcagaattgctgagttgaagggtctgcttattataacagttatggctaaattgccctccagaacggctgttgtaatttccaatcatccttcatctgacacgtggcgggggcttgtggcagaactttggtgggcaaaatatcttggggactttcagattatttttggcccttttcaagcctggatttatgatgagaaattatcctgtctgacacccactttgctcataattgcaacctctttcctacaattctgcttgatttaagcaaaaatccagaagctcatccctcaggagacagggaagcttaactgctgtttacaaaggacttggaggttttcaggtacaagttgcccctggagattcaggttgattagtgttaattcaaaaccacttcctctattatggtagcagctgagaagtcacatgcacaaatcaagcatgtggatttcaatgaaaaggaaaatgccatttcagtagcagctattcccggactctggctgagccttcctatggcaagtattattgatgcataaaatcatcgaatcctctgggtcctcccacttctcacttatctttagtttaaaaccgagcatcagaccgaattccttacattcaagctgccaagtgtccttggctggcaagaatctccctccctgtaatatcaataattaatgtcagctaccagtcctgagacagctgacaaaaggaactggcctagttcatttctacttatttactgtgtccatctttggtgaaaatgtttggtcagattcaaaatggtgtgtcaccaaggcaaccagcacttatttattcaatacaaacttattgaggtcctgctctgtgtaaggttctatactgtctattctctgtgtgtgggagagtattcacattataccctcacaaatttgaagtctgatgataattattaccaagtattttgcacttcttgtgtaccagacactgtgctaagcatttcatggacaataacttttccttctcatagcagccctgttaagtaggtagcattccctttttacccacatgtgtcatgataaatacaaaaccctagttctgtcatggagcagctgctcatcttatccaggttctgaacccagctaagccccagtgcttgagaaggttgtactagttctgcttttgccaaaatgtgtttctttccacaagaagctccatgaaaaatttgaagtcatagccacagcatctatgcttctcagagatccctgaggcccacagtggcttctcctgtggatctcagctcagagaagtttcacctgtgttccccgaagtgatcagatccccagataatacactttcatacctccatgtgtctttccttcagagtttttagcacagtgaaagtctgttggtgagattatttactatggctctgccaggctgctggaagctccatgaggctgcaggcaatgctttttttctgctcatttttgttttcccagagcctggcacagtgcctgccacagataatcaatactatttaatccattaactgattgctctgaaaagaactacacacacacaccccaaaaacctggggacttaacttatctcacacattgcaaacctcattcagcaaacttttactgatcttatttcaagatccaggcactgaattaggtactaaagatattgcaataaactaagcagacatggcacttattctcttaggtcttgcatttcagtggggaatccggatgataaatgagtcaaataaaatgaataagataatttcagatatgtgttaagttctgagaaataaaatgagcagcrctgataggatgaggggtggtcagggaagatgtctccaaagagaagacattcgatggagacctgaatcatgataaggagccaacattgtgatgttacaggcactgctttttttcatctcaataaatgtatcactcagaacaaaacccctggagtcatccttgactccttcctctcatactccaaggcaagtgcaaggcaaccctacagtatctctaccttgacagcgtctcaagctgatcagcctctccccaccctcactgctaccacactagtccaagctgccaccatctctcacttggacttttctaataaacttgtaacagatttctatccaccatctgttctctgtaagtcaaatcatgtctctgtggctcctccttacactgagggtaaaagccacagtgctaaccaaggcctgcagtttcacatgatctggcctcctccctacccccatttcctgccactcttctgccctagcacactccccttcttgctacccacaaataggccaaatgtgctcctgcgtcaggctctttgcacttgtagttttctctttctggaaaagcccatgtgcttttgtgttgtgctccatcacttcattcaagttcttctcatatgttcaccagaagacctgcccccaccctctgggggcaatcaccattattccctatgacttaactctgtttaatatttcttcatagaactcatcacacaaggcaggatattatctatgtgtgtcttcctcctccattagaatgtaaactccatgagggtaagaactgagttgactttgttcactgttgtattcccaatacctagaatatttatttctattcaatcaacagttcttgaataaacagaagaataaatgaaagaatgacaaaatgcaaaggccttgagtcatgatatgctgcaaagacagaaagaagacaggaataaggagagaagaggaggctaaagaggcaggcaggggccagaccacataggtccttgtgagtaattagaaggggctctgattttcttccaagagcatcagaaaactgttcacctctggaaagctttagctttgcaattcccaacaggtgacataacacttggagaaacactgaactctatgacctcttccccgctatgttctgtgatgcccggaagtagagctctgcactgttatttaatcctatcaatgtttgctctggaggcaatggattaaatagcacatgttgaatcatcaactgaattaaccttctcaagagtacctcatgccacgatttggattctctggaaagtatcccttactctttcctaatgtgcttacagcttggttccaaatgtctctccttggagttgctgtgtaaatccacttctttggggagccatccctgacctcccagggcagagttcaggatccccctgcatgctcttcagctcctactgttgagagcagaacagtgctgctttgtggtgtctctctgctgctccagctggagtgtatgttccctgagggtggggaccttctttgttgtctctaattctgagaccacagagaggctgctggatccagcgtaccaacgtgtgtatttgaactgttttattttatgttaattcaaagtaggtgccaacattttaggttttttaaaaaatagatttctggcttatgttgaaaatatataagccatagcaatgctgtgcccatgttcttaaccatgagaagacttgggtagcaactgctccattcataggggacatggctttcctccagcaagccacaatccccaccattccttattatgtttctaatgctgagctcaagtgttcctggtcatttaacatctgattgagttattgttttcttacagtacagaaatattctgtatccaatctactatcacaagaagcctgcatgttcttaaacctgatacatgcggcctcttttgagcaactgaatttgttaccctagttcgtcctaaaataaaaaagtgtttataaaggcataggacttgtctacccaacgaggcaaagatgttaattcttcccaaattgatatataggtttaatgtgatygctatcaaaatcccaccaagatttttataaatacagatctgattattctaaaatgtatatggaaaaccaaaggaaccaaaatagctaaaaatcatttttaaaagaataataaactgggaagaatcagtctccttgattttaagatttattatatggctatagtatgaaagactgtgtaacattaacagacagatagaggcatagatcaatgaacagaataaagaatccaaaaacaaacccacacaaatatgttcaactcagtttgtttgtttgttttttacaaaattgcaaaagcaattcaacggaggaaagacagcctttcaataaatggcactggtgcaattgaactcccataggcacaaaattaatctcaacctaatcttaatgaactcaaaatggatcacagacttagatataaaatgtgaagctataaaattcttagaaaaaaaaggaaattggccaggcgcagtggctcacgcctgtaatcccaacactttgggaggccaaggcaggcagatcacgaggtcaggagatcgagaccatcctggctaacacggtgaaaccccgtctctactaaaaatacaaaaaattagccgggcatggtggcaggcgcctgtagtcccagctactcgggaggctgaggcaggacaatggcgtgaacctgggaggcggagcttgcagtaagccactgcactccagcctgggcgacagactgagactccatctcgaaaaaaaaaaaaaaaaaaaagaaaagaaaagaaaaaaaggaaatcttcaggatctaggctaagcaaagagttcttatgctatatgcactgtgatcaaggctaagcaaagagttcttatgctacatgcactgtgatctaggctaagcaaagagttcttatgctacatgcactgtgatctaggctaggcaaagagttcttatgctaaatgcactgtccataaattgaacctcatcacaattaaaacatttgctcagccaaagattctgtttagaggattaaatgacaaactacaggccggaagaaaatatttgaaaaccacatgtcggacaaagactagttaccaaaatatataaagaactctcaaaacagcattaaaaaaatgcaattagaaaatgggcaaaagacctgagatatttcaccaaagacratagacagatgaccaataagcacagcaaatgatgtttaacactatcagccattaaggaaatgcaaattaaagcacaatgagatacatatctatcacagtggctaaaatgaaatggtagcaatacaagtgctggaatgcagagaaagtccatcattcatatatttttgataggaatgtaaaatgtaccttctgaatattctagggaaaaaattctggaaaacaacttggcaatttcttaaaaacctaaacatgaaactataataccatatgacccaagaattgcacctctgggtatttgtctttgaaaaataaaaaaaatgtatgtgcacacaaaaacctatatacaaacctgtacacaatgtttatagcagcattattcataattaccaaaaaactggaaacaacccagatgttcttagaygtgtgaacagcacatcaaactgtggtacgtccataccatggaatactattcagcaattaaaaaggaatgagctattgatacaatcaacaatctgaatgcatctccagaaaatattgagggaaaaaaaagccaattccaaaagcttatgtactactggatgtacctcttcttaaccccaggtgaccactaatctgttctccatttttatgatttcatcatttcaagaatgttgtagaaatggagaacagattaatggttgccaggggataaggaaaggatggggactggagggaaactggtgtggctatgaaagggcaacaggagagatttttatagtgatggaaattgtctgtatctccactgtatcaatgtcagatcctggctgtgatatagtcctatagttttgcaaaatgttaccattgtgatggggggaactgggtgaatgttccatagtaactctctattatttcttacaattgcatgtgaatctcaaaattaaaagcttaatttttctaaaaaaaaaagtacaagctttggaaatcaaccagccatgggtttaaattcctgctacgccacttactagctaaatgaccatgggcagcctcttggggcctcaggttactcatcggttaaatggggatcataaaagacccatgctcacagtgctctggagattaaatgaggtcatgcagttacaatgcttaagagcttgcctatgtttggccaagagctcagtagatgggagctgcttttgtggctgtcactgtaccacayagagaatccagaggcaggttcagccctggaacatctcgggttaaaccatgctttgtgtagaacagaggttccccaagtacctcagttcatatcacccttcgtatcgtcctaatttttttcatgctgytcttgggccaaaaaaaaattcacaactgttctgtttactaagtagttaggttcaaactacttaataagtrtgtttgcactaacaatgtagtaactgtttgaaacatagtaacataaattgaagaaataattttatttcattcttaactacaattgcttacaatggaattatgtgtccctaatagtctgtaccacttcccaaaccttggaatcagattgaatactgtcaccttcattatctgctccacattgattttgatgcagtgcttgtttttaattatattaactaccaaaactccagctttgcaaaaatactttgtaattaaggggaatatactatgtactaatgttgaagtggtaagttccctcatgctattcattctcacattatctgacagaggtttaatatcactattrttcactcaaaatttaaaatatcctgcagcatccctgtgagtatgccatgatgccctggagtgctttggtgcataaattgggaattataggttgaacagttcattttggcctcttccagagcaaagcaaagtagactaaggcccaaagctgctctactgggatctttccagttgtcatgatccatctgcttctatctacacccatgtccccaggatggtctcacagctaaactgcctaccattgggagacaagagccattttttctgactcagcgatagcagaggatgattaggaatggggtactggaccttttttttcctggtattctaaagatattaagcaatttgggaagctcctcttaaaatttaattccacattaagcacctagaaggtgacaagcactgttgtaggtactggagccacagaaataaattgagcctagtccttagcccttgaataatgcttcctccacagatgatatgcagcacgatgttatagaaaagccttggagccaagagacccgaatgaaaattcggactcgccatatgaacttgttaggttggccttcctgagcctcagttttggtatctgcataatgggagtttaaatatccctacagcacttttatctcacagcatttaataagataaatgcatgtaaactcagaatgttatgattaatgaatagccaccatttagatgtgctgctttttaaaatcactaattatcagttcaagcagctttgcccaagagtgaaagaaatccaaacaacaaaatatayttctcatgcttcttagaagaaatggggatagcaggggtagcgcaaggaagaaaattccaaaagattttataattgtagtgagaaattgaggagcagacagagtcgtcctggaagccctgttctccttttgcaggctagagaataaatactttgagagctaaattgatctgctcatcctcctgttcctttctcctctggaatatgtcacttgaaagagatcaactttctggcctctgattctggctgtcacccagtggctgctttgtctaatgattgctacatatgactttttttttttaaactcccagtccaaaagctgtttcaaagtcaaagttaatacagatgttgtgtcatcccatgcgccagtgataggtgttgtttagtcaaggtggatctgattgggatctctctccaagaaagtgagataatatgagagaccataaagcagcagttaatttccctttcaaagtgaggaggattatgcacagtggtggaaagccgttctctgggtccccagcctaattgtcttgattaacacgctgcatggccatcacaggtgtagcacataatagcgctataaggttttcatagccaagccaattaaagtctgtcattgagccaagaactaactgtgtgtgcatcataatgccaaaagtcaaaatgagttctctagataacaattgcttgcatttctaggacaatttatcttttttttttttctttgagaccaagtctctctctgtcgcccaggctggagtgcagtggcrcaatcttggctcactgcagcctccgcctcctgggttcaagcaattctcctgcctcagcctcccaagtagctgggactataggcatgcaccaccatgcctggctgatttttgtatttttagtagaaatgggatttcaccatgttgtccaggctgctcttgatctcctgaccttgtgatccacccaccttggcctcccaaagtgctgagattacaggcgtgagccaccaccacacctggccgacaatttatcattttaaagcatactttctttacctcattttctcttcatgccagaaggcaagcagtttatgtggggaaactgaagttcaaagagattcagtgacttaccaatctagaggactctaataattgtgccaggctgctcatagtaagttcttaaagatttttctcttatccctatgacaataactaacattcgtctttcacttaacagctgacaaaatgctgatatatttattttctttctagatcttccataacaaccctgcaaatcagatcttctttagatcccatttttatggccaaaaatctcaaaatcttggaatattgattgaaatcctgccacattttagagttgagagcttgttcaagggcacagggttaccaagtggtagaactagggtaagaactcaggcccactggctgacccagtgttcttcacatcattccatgcttatagtctctttctctctctctctctctctctctctctctctctctctctctctctgtctttctctgcacgttttagagttgggggaaaatgagtcaagacaactgacactgagctgcaaagacacaggtttcttctattgccacagtgcccagctttgagcaactaaagggttttggtcaattatctattttcccattgaactgggaatggacaatttatattctaaactgaatataaatttgactcttggtctcttaactgcctgatctctatggtgtgtttgataaaagtatttttgttggtttacaggccacccccagaggccctgagcaatgcatttgaaagttctgggtggctgtgaatgaccatgaaagtaggagataaatatcttagctggctaggcagaataagaagtagatagcctgcttaaaggaaaagcaagctctaagctattctcaataagatccacaaacaatttcttgcagtaaaatgtgttgttctttgtttctcasatatgaggaatgaggaggaacccttcttaggctcttctgatgattttttaggttaaggctgagtccctgagtacaaatgattgcctggctcatatcccagtgctgatggagcacacaggatggttccctggtgacacatgtgagggtaggagtggaatttcacatttctcactgctggaagggcagtgttttccacccattgttcattctgaaagctctcttcagtcccagcctgtgtgttgtcactggaggaggaaagagaatgaattctgtgttccccatggtgcactgaagcctaagggccaagttcctttcatctaaaaagccaaaaatgatgatttcctcaagagcaaatagctttcattgcttctttggctgcggagacatatctgtatctgctctgccactccatcctgaaatctggggtgtggctgaagtagccatgttaagagcattcacaaataacctcttttatttaaaagggtgggggcaggggatggtgtgggaggaaatgcaggaacagccttatgttctatattttatttcagatttttaaatattatgaaaaggaggaaggagcaagcatctatgtactttaaagatatatttgtaagttagtatgtatactacgtatagttaaatattttttgccactttataatttccaggcatggtatgaataaatctacacttggcttaacttaatgcagttgaattgatttctgcctgctaacctgtgattctctctcagtgggaaataatcaataaggtcagttgggcccacttttgcacatcattggtcctagttttaatcttggtaaccctggctgtaaaccacccactatggaggcagattgattggcagcaatatttgctcaataattttgtggccatatttgaggcacattttagcttacgacttggtgtaacagtttctcctttagagtttagtgcctgttttctttcttatactgcaaagggcctattccaaaggaagcttggggaaaataaacttgacaggaagggaaatgaaataagttttaaactgaatctgaaagggaaataataataataaaattaaagcatatagagccttagtgctcaaggaatttgaactggattagacgtggggatggagaaggtcataacatttagtccagaagtaaaaattgccatcagagtcactaagctaaatttaatcccaattccttctcattaggtgagtagcagccacctcaccttttccttcttttgtaaagaatatcttttatgtaccacaagtgaagggagtgctgaatatgatgccttcctttagcctcgcatgatagttttataaatttctggtgaagtcacacatgaagggaatatataaatccagcatcactgcccaagtcctttcagtccagcatatgttgaaaaatcctatttgaatggtgaaaagggaagaaaaagaattcttcctccacccacccagccattccacccatcaatcgtttatgacaatcttcagaccaaaaggctgttgttaagagagtaaaatgatataagcaaagtgcttaccataggacctggtttgtgtattactatattagtttgctagggctgccatagcaaagtaccacaaagtgggtggtgtaaataacagaactgtactgtctcacagttctggaggctaaaagtccaagatcaaggtgttggcaaagttacttccttctaaggctatgacagagaaacagttccaggcccctctcctagcctcctgtggtctttaggcaatttttggcagtccttggcttgcagatgcatcaccccatctctgccttcgccttcatcgccttcatgtgctattctccctgtgtgcatacccatctctgtgtttcagtttcccctttttataaggacactagtcatattgaattaggacccaccctaatgacctcatygcaactacttctgcaatgactcttatttccaaataaagtcacattccgagatattgggggttaaaacttcatataaattttgggagggcacaattcaacccataataattattatcatttattattatatcttcattatttcttagcttttcatagtttcctttatactataaatctattctctaccctgcagagaattaaaaattcgcaaaaacagaaaaaagtagggaggtgaagaaatcagaatatcaatgcatagtgtgaatatcttcaagtaataatgaactgttggacatagccaccatattcagacattaatgtttcaggtaaaaggatccagaacaactggccagcccaattcagtgaagcagcatagctagtcattagttaaaccctagccatccagagtgttggcagtctctccaacggtaagattttggtatcctttcatacagtaaggaggcagttggtgtggagtcccctgcatcagaggcttcatgcgcattttagatttattaaaaagcccacaaaaaaagaaataccctttggagcaatatagtctcaaatccaacaatttcctgcagtatcacagcaaagttccccccggcggctgttgagatggttagccagtaattcttcaaaacatttttttctgacacatacataacattttcctttgtaagaacgtgaaggtttgattcctccagagcccattacacagacagattggcccctgagataattacaagaagatagtctaatgggctcgattaagaaaatcccaagacccagacgagtcttcctacacaaacacaaatataatttcttacctaaaggcatagaaacagcattcagttcacctgtttatatttggatactaggctaatatcgatctgtcaaaacagacttgttgaaccagaatatttttactgtactctgcttcaaaaataatttaggatgacattcaaggatgtatcaaatatgacatgatagactacattaaaagttatgtggcctaaaattgtgtactgtcagtatcagaatctggcctcccagcacaggcaggagtggcagctctcacaaacctgacaggtggtgacgcagtccttcttgagatggcatgattctcggagctctgagttctgtccccacgtcccgagaggcggtcgcccttcgtattatacccctagctatggattcccatttgccctgtagaggggtgagagagtagaaaaatccttaggtgtccaagaagcatgccatctacaaggacaccgggagtgtttcaccctccactcctagaaaggcgggatttttatgaatatgcagcactgtcagttcataatttataccttcccctgacaccaacatgtccaacttcagattataagtacatttttaatgtataagaaaatgttttagaaggtgaaaaaaatcagtttcattaggttaagacactgtattaagctcatctctgtcctgtactctcttagtgtccaaggcacatatgtacatggagaaaggggggttgcctgctagacaagaaccttccttactgcatgtgctccatccttatcaactaggttttttcaaaatctctgtgataagcataggaattacctggggaatttttcaaattgcggatgcctagatccccattcctaaagaatctgattcagtagaactggggtgggacccaaaaatctgcatttttttttttttttgagacggagtcttgctctgtcgcttggctagagtgcggtggcacgatctcagctcactgccacctccgcctcccgggttcaagtgattctcctgcctcagtctcctgagtagctgggatggaatctgcatttttaatgtgttcctttggtgattgtgagcttcatggcctatgagacacactttgagcagcactctgccctcctatgatcttctttcttttagaacactaatttttgcattattatcctaccatcattttttcaaaatggaattttttttcatgttcatctgtgaaaaaatatgctcattgtgaaaaaataatcagacagtgtgagtaaaaatcatcaggttttcagcactgagatggaattaccctatatattttaatggcatccatcaagaacttttatctgtgtgtgtgtgtgtgtgtgtgtgtgtgtgtgtgtgtgtgtgtgtgtgtgatctcattttaaaatattaatttggcagatccaaatttgtggaaaagaaagagggaggtagcttccataagacctttttcttccagaggtaacaactttttctttgagttctctgactccaagagcccttcatttacaacagcctcttcccatggtggtttcaaagctccttatttacacctctacctggagcactcttctttaaagactgggttaactatcaggtgctcttagtaacttaggagacataagggaaattgcccatcatctccaagattcttttctcttttcttgcaaacattatcttgtcaccacagagctgttctcttttatcacttgtacacctctttcacttggaaaaagttaggtcacatcaacatttcacctattcatttttctacctttggtgagaaccaccatttagcatttcacctctgagaagtcttttctagctagagagggctcccaaactacatttcccaaggatccccatttattgtgctttgcaatcattgtgaggtcttaggttcctttgagaatctgatgaaaatgataatatctcactcctaaaaccaatgcacatattcgcacccacatttttccaagtattttcaagaggtccaaggaatctaggttaaggatactccctggtagtatgtcctcagcagactgagttccctcaaatctacaaaggattcccacagacattattcattaaaataagtattaagcatcaagtatgtagcagacactgcattggggtactggtgatacaaagagaaacataggagcccttgttttaaggatctcaggatagaaatggaagcagatggataaatagtgatcatggaatgtgagaagtacatgaaacacagcagggctagagtaaaatgtgcttaaattataatcgtagcttctttccttaaaatctttgatgcatcctcttcctatcatgcacaaagaccttcctcatgaacctcaagtttacttctctaatatattctgaacatgtgtccttcctttgcccagccctggcactccatgcttccgtctcattgaaatctctgttggtccccaaatgtaccatgttctatgagtcttcatatgagttgtcccccacccctggcattctttcctccccatcctttgccctttggccaggctgactctcattkgtcttttaacactgggtttggaatgctttctccacgatgcttcccctaatttctytaaattccatttagatgcacttcttcccaagtacagtggctcacacttgtaatcccagcactttgggaggccaaggcaagaggattgtttgaaccccrgtgttccagaccagcttgggcaacatagttgagaccctgtctttacataaataaaaactatttgggtgcagtggtgtatacctgtagtcctagctactcaagaggttygggggatgggggatcacttgagctcaggaggtcaaggctgctgtgagccrtgatcacaccactacactccagcctgggcaacacagtgagatcctgtctcttaaaaaaaaataggtgcacttcttagatgttatccttatcttaattcctattgcattatattacaatgtatgtgtcttcattagtctgtgtccctcaccagacagtaatatcctcaatggcagggactatcatattcacagttctagtcacaccaactaatgactaatagttaataaatatttgaattaatttatgaattaatctgattaaaaaaccctcagtataattagttttattgttctctagtataagctagaataaagaactctacctatatcctccctgagaagtatggtctataattagaactttaacgacatctgaccaaggtgctctctgcccatgaggaatctgactcttggttccttggtacacacagaaggagacagagagctgagggcagttaactaggagttgttcaaccgtcatttgcttaacactgtgcaaaatactttggggagtaaagatgtatttctccctcctttcaagaacctactgttgggaatacaagagttccccaggtgaaatcttgctagtatgtaatttagtaccaaattatgaataaaataagatgacgtttaaagtcacttccaactagtttttctgtgaagctaagattttttttttttttttttttttgagactgagtctcactttgtcgcccaggctggagtgcagtggcatgatctcggctcactgcaagctccgcctcccaagttcatgccgttctcctgcctcagcctcccgagtagctgggactacaggcacccgccatcacgcccggctaattttttgtatatttagtagagacggggtttcactgtgttagccacgatggtctcgatctcctgacctcgtgatccgcccgcctcagcctcccaaagtgctgggattacagttgtgagccaccgcgcccagcccgaagctaagattttttatatcacctaactgtactaaacactctatggcatatcttccaaaccacactgagagtgacaatcatgtgttgatggtctttgtaccttcaaggtcgaacatagtccccaggtctgagtaggtttctaacaacgttttttttgttttgttttgttttttgagacagggtctcactctgtcacccaggctggagtgcagtggcgtgatctcagctcactgcaatgtccacctcctgggctcaagtgatcctcccacctcagcatcccaagtagctgggactacaggtgtgagccaccacacctggcctccaacaacatttgttaaaccaaatacactcaaagaagaccgtgacacccaccataaatataacacctgactggagtttcccatttataaattttttcactgggatgaaaggcttatatactaaataagcattgtttattcttcactgtatattacttaggggcaaattagtatattactaatgtggcaaaaaaaagcggaatggatcaaaaagtacaagctttaaaatcaggcatacctgattcaaatcccagctcttctgcaggtttgacaagtaaccttccattgattccatagatatttgttgaatcatgctctgtgcaaggcaatgtgctaagtgttaaagaggtaaaagtaaatactctctacagtcttggagcttccagtaactttcttcaggctctttatctgtaatgtggagccaacgatgttttcttggaaagctactggcaagatgaagcataatatgtatcaaaatgcccactctaggtctttgcatgaagtagacacccaaaaaatactactagaaggcacagctcctatatgcctagaaggcacttgtcctaatcaggacaagtcaatgaacattcacagtgcagctaaagctctctgccagtatgaagtccccagtagctactgaacccttgaaatgtggctagtcaaaattgagatgtgctgtaagtatgaaatacacaccaggatttgaagacttagcatgaaaataagacagtaaaataacttagtaatattttgtattcattacatgttaaaaggatatttcaataaattgagttaaataaaatgctatatatgattaattttacctgtttttattttttaaatgttaccattagaaaattaaaaattatatatggctcacattatttctattgaacagtcctgggttagagagtaaatgtatgttataggttctaaaaagaaccaactagagatgccaaaggtgatccagaaatgtataccactaggtaatgactgagcagggatgaaaacacaaagctgcaatcctgcttttgtgccctcatggtggtattaatagtaattaacagattacaccggagtcagaacattctcattcactttagttcaaataccaattgtgggatgtacccatgtacacacctaggaaagggggtggtgctgggggctgggaagaagatggcagagatgtcctcaagacttacgatggctgctatgattcacttcttcatttggaggcatgttaaagcagatgggctttagacatatgaggtttggatgtcagcatcatttcttcctgcacgatctggagcaagttagttatctctccgggcctcagtttactcatttttaaaatgatggtaataataacaactagatcataagatttctgtgatgactgaaggagcaaatgcatgtaaaatatgtggcagggcataacgctcagttgttagttattgtcactgtattagtctgttctcacgctgctaataaagacatacccaagaatgggtaacttataaaggaaagaggtttaattgactcacagttcagtatggctggggaggcctcaggaaacttaaaatcgtgtcaaaaggggaagcaaacacatccttcttcacatggaggcaggaaggagaataatgtgtgcccagtgaagggaaaagctgcttatgaaaccatcagatctcatgagaactaactcactctcataagaacaggatgggggaaactgctcccatgattcaattatctccacctggtccctcccataacacgtggggattatgggaactacaattcaagatgagatttgggtggggacacagccaaactaaatcagtcaccatcacagtctattttatgcaatcataaataataatgcccaccacatatttggtattcaataaatacttgttgaatgaatgaaataggttatcatcatcaaatcaagcaatagatgactctttattcctgaaattccagtgtcatcaggtaggatcctgctgctatatctctgaatgtgggtgtgagtcttgtaagaacagtcacagctactgagaactgctggctaagttgtctcttgttttgacaagtgtccctcagcgttgactctaccctcaggccactccatagccattccagcaacgtccatggttttatatttcccttatcctttccacttttccattatacctgagtgtgagactctttttttcccccatccaatttaatcatataaaacctgctctgatttagaatctcctttgcagctaatcgaaccttgcagcattctattagctcttcctatttgctctcagcccaagctgaggctctgggattattatgtaataacttggactcatatctggtcagtatataccatgccttttcattctgcaaatcccctcagggttctctgtctgtttgcaaggggtgggagaagagagtagaaggattgtggggggggttttggtgggaggggactgtttgctaaaagttattatcccacacttatcagtattaaactggatttgacaactcatagcctgggatttaaatgatctaaatcctgcttcatttggcagcctgattttacctgttatttattgtgctacccaatttattatcatcggcacactcggaggcttggcctgtggtgtcttcacagccaagtgatttatacaaataataaaaaagatcgcggttcctagcaatgaaattcaaagcaattccacctctcctttccctctcatctagctcagttcatctcttacacattaacccttggccttcttacttcttctagagaaattcatcctcagcttccttctgatccctggaaggaaatgctattggcagagaaaggggcgggtaataaaagtgatgatttaggttggtgcaacagtaattgtagcttttgccatcaaaatctgcaattacttttgcaccagtctaatagaattccaaaacataagtatcatcaggtctttatatggaaggtaccaggcaaatcctctctatacgttataggatttggttgtcacaccagcactttgaggtagacattgattttatccaatttgacagcagagggtctcagtttgaaagatgctgcatctcagtctcacgaggacagacagagtgggagagagaagcatggccagggggtggggtgtctggaatatggccaggatgaggggtaatactggtaccaaaactgtaatgtagcagttcagaacatgagctttgaaatcaaacaatcctggaagtgaattctagttcttgaacctattgagttgtaggaccataagtaaccagtctgtgcctcagtttcctcacctgcaaagtgggaataataaagtagataggtagttatgagaactgaatgagatattgtatacagggcatttaacacagtttctccatctgttaaaaatggctaatggccaggctcatacctgtaatcccagcagattgggaggccaaggcaggaggaattcttgagcccgggagttcaagaccagcctgggcaatgtagggaggccccatctctacaaaaaaataaaaacattakccaggtatggtggtgtgcatctgtagtcccagctacttgggaggcgaaggtgggaggatctgcttgagccagggaagttaaggctgcagtgagctgtgatcatgccactgccctccagcctcagcaacagagtaaaaccctgtctcaaaaaaaaaaaaaaaacctaactcattttatcttcacaacaaccctatgaggtaatatatgtaaagcacttaaaacaattcctggaaatgctcaataaatgttagctgttattactaccactactattactaccaccaccactrctactactgccgttattattgtctactattactaccaccaccactactactgctgctgctgctattgtcatgactcaaattcaatacaaaatcagtactttccagcacatatattgcaaagaccttgagtagggtcctggtaagctgaattcacccatgatagtaattatagcctatgctaccatataaatgacgtgtgtgtgtttgtgtgtgtgtgtgtctgtgtgtggttttgttttccttgccccagatctacttatgaccttctcaaactggttgccaattctagacttggagggaggttagtctaaagctctagcccaagcttagaacaactttaatatgggaattcagtatcctgtcatcttctctctctagtctcaagctttagcaagtctacttgtattagttcacatacttcttactgaaagccaaatgttaatgggtagtcttctatttactcatttagaatatttataattagagagcttattcatttatttaaaatatgggccaagggtagttctgttggggtatctgctgtgttgaaactggaagaagcccctcacccccaattaattttatatcttgcaaaactatttatgttggcattgcaccaaataacatttagcagtcccatactgccactgttttttgaccacccagccctgtactttggaaatactggaagttttatcccatgttcccacataacttgcactgagtgggttacttgcatatttagggaagaatatgagtaaccagattgcgggaacagcacctcccactgatttacatttgtaaaggaagtgatgctgagagttcatggtgacctagaagtccaaattcggcccatattctcccctatatcctgtatctagagccaagaataatgttaaatatgtaaaaataatttttgccgtgagtgtgtatcagtaatttatggccaatagatagcattgttttcaacacaactttgctgaagcagcaatagcagaagatgggctttagaatcagcctccttcattaactgtgtggtcttgaacaagttgtataacatctataagcctggagtgccccagctacagtctatatggaggtggagtcaatctcatagtgctatttgaggagtaaatgaaaaaatcatttagagtttgtagctgagcacttgacacaaagtactcaaatacttgttacttagtagtattcctcttctattgatttgcatattcctaagctttttacatacaataaattttattgatgttgtatttgttgcctattatagtctgatggtgacagtgctattaatgctgttattgtttgtggtaaaaatatgttttaccatgagcatggtttcaactggaattcacttccaggtttgttctacaaaaccttttatatttcctcttatacctctgcaagattgccctttgttcctgatttcaaggccatagtcactgtggaaattccaaatcatgcctcctttctatttttgtccatcctcccattggttttcacttgctctgtggaaaaaccgtagtttctgtgtattggtagctggaagcctgaggcttcagactaaatattatcatttatcagtgctatagcacttgtattaaagaggtccttgcaaaaatttttatcaatgtatgtgcattagaaatgctgttttctcttgtggtcaaaagaagttattgaaattcttattctcatactcagccctatgtggagtgacttacctttgacctttcaccgtaagttagaagcagaataaatgagtgntgatttcagctgcctcctcctttcttgtgataatgaatgagtcagcatcaaggacttttccaggaggcctgagtcataaatatccctacattccatcaaaaatctccacagaaggttgtttttaaaccgtaaacgggaaaaagttcctggaccttatcttaatcatcaagttagtgggagatatttacgctctaactttggggtcaaaaagaaaggctatagctaacaatatagttagagaaattaatatgaccccatgatgagatggcaaacttctcatagaggaaagacaaaaaaaaagttcaatggacatacccactctgtccaaattcttgtcagttgtgttacattgttgttttcctaaaacttattgaggatttatcagatgtcaggcagtgtgctagctcctttatttgcattatgtcatttcatctgcacacctccttcatgaaaagtggaaagattttcttcactgttttacagagaaggaaattgagaatgagggtgactgactctcccaaggttttgcagctaatagatggcagaaatgtgctttgaccctcagatccatctgacttcaaagcccaagctcttaattagtcagttaaactctacgggaagccacggaaaatgaagagggaaaggagaagaatatacagaaatgcaagttggccttctctctgccacataaagtactcatagtacagtatagttaaggtctcttgcaaaataattttaattttccattagcactataaacagaaagccaatggatactataagaccctgaaaaagtccaggcatcagagtcctgaggctgcagcaaacatcaggtacccagcagtaccacagattttgcagccattttaagtgccagtaactggcaattattctgtatacctgaaaacatcccatttttgtcaccattcattctaacttacttggagtgcagtctcctgtcagggatgtctttgtcacacatacaacattttatttatgagaagaataacaaaatatgattgttggattagctgatagagcatggattggaaaaggagccagctggtgtgttgtgtatggcttcagcaggaagatacatctaatctgtgtttttctctccaaactcacacctcgtacatggctgaatcttcctctctaaccctttccactgtgagcctcgaaggcctcatcggtttcttcttggaatgcagagaatatcttttggctacatttcctggtcagactcctcatgccaattcaggcttccctgatcacctctctttttaatgatataagtttaatytccctgtattagtccatttttatgctgatgatgaagacatacccaagactaggaataaaaagaggtttaattggacttacagttccacatgtctggggaggcctcagaagcatgtcaggaggtgaaaggcacttcttacatggtggcggcaagagaaaatgaggaagaagcaaaagtgaaaacccctgataaacccattagctctcatgagacttattcactattatgagamtagcacgggaaagactggccctcatgatgcaattacctctgcctgggtccctcccacaacatgtgggaattctgggagatacaattcaggttgagatttggtggggacacagccaaaccatatcattctgcccttggcccctccaaatttcaygtctccacatttcaaaactaatcatgcctccccagtagtcccccaaagtcttaactcatttcagcattaacccaaaagtccacagtccaaagtctcatctgagacaaggtaagtcccttctacctatgagcctttaaaatcaaaagcaagctagttacttcctagatacaatgggggtacaggtattggataaatccagctattcaaaatgtgagatactggccaaaacaaaggggttactgagcctatgcaagtgtctgaaatccagagaggcagtcaaattttaaagctccaaaatgatctcctttgactccaggtctcatatccaggtcacactgatgtaagagtcttaggcagctctgcccctgtggctttgcagggtatagcctccctcctggctgctttcatgggttggcattgagtgtctgcagcttttccaggcacatagtgcaaactgtcagtggatctaccattatggggtctagaggatggtggccctcttttcacagcttcactaggcagtaccccagtagggactctgtgtgggggctccaaccccacatttcccttccacactgccctagcagaggttctccatgagggccctgcccctgcagcaaacttttgcctgggcatccaggtgtttccatacatcttctgaaatctaggtggaggttcccaaacctcagttcttcacttctgtgcacccacaggctcaataccacatggaagctgccaaggcttgaggcttccaccttctgaaaccgcaggcccaagctgtatgttggcccttttcagccacagctggagcagctgggatacagggcaccaagtccctaaactgcacatagcatgaggacctgggcccagtcctggaaaccactttttccccctgggcctctgggcctgtgatgggaggggctgtcatgaaggtctctcacatggcctggagacattttccccatggtcttggggattaacattaggctcctgctacttatgcaaattactgcagccagcttgaatttctccccagaaaatgggtttttgcatattcaggctgcaaattttctgaacttttatgctctgtttcccttttaaaactaaatgcctttaacagtactgacatcacctcttgaatgctttgctgcttagaaatttcttctgccagataccctaaatcatctctctcaagttcaaagtttcacaaatctctagggcaggggcaaaatgccaccagtctctttgctaaaacataacaagagtcacctttgctccagttcccaacaagttcctcatttccatctgagaccacctcaacttggattttattgtccatatcgctatcagcattttggacacagccattcaacaagtctctaggaagttccaaactttcccacattttcctttcttcttctgagcccttcaaacttttccaatctctgcctgttacccagttccaaagttgcttccacattttggggtatctcttcagcaacaccccactcctggtaccaatttgctgtattagtctgttttcatgctgctgataaagacatacctgagactggaaataaaaagrggtttaattggacttatatggttccacatggctggggaggcctcagaatcatggcaataggcaaaaagcacttcttacttggtagcggcaagagaaaatgacgaagaagcaaaagtggaaacccctgataaacccatcagatctcatgagacttattcactatcatgagaatagcacgggaaagaccagtccccgtgattcaattaactccccctgggtccctcccacaacacatgggaattctaggacatacaattcaagttgagatttcagtggggacacagccaaaccatatcacttcccaactgttggaggattattttgctccacacgaagacaggagagcaaagtattaaccaacaggatgtggagtgcagcagtcccacggagatctgttaactctgtgactctgagcatgtacagaacataatctctgagcccattctctcttctgagagaaaaaataaacacacctattcaatgtttttgctgcttaataagtgataatctctcttattactaaacatggggaaaaggtyttatttaaaaatattctgtttataggagtcacacagtggaatggataatactgagaagaaaacatttttccccttcctgattctgagatctcataggtaanatttgctacattggtatctctccattccctgtccttgctttccttttgctgggaaatcattgcatctgaaaaaaaaaaaaaaaaaaaaaaaagtaagtgtttccctagccatcatattcagagaaactaaaagttttttaaagtgagtgagttactttgtggtatttaaaattatacatgcttattacagaaaactgagaaatagaattatctcaaaagagcaaaagtaaaattttaaactccatccaagcacacaaatactgcatgatctcacttatatgtggaatctaaaaaaagtcaaactcatagaagtataaagtaaaatggtggttacccggggctggttttcggagttgggggttgagataggggaaggggragcaattgggtatgggaagatgtcattcaaagcatataacatttcaattacacaagaagaagaagttttaragatctgcacaacttggtgattatagttaataatgtattatatatctcaacattgctaaaagaatagattttgggtattttgtttattttttataattttttwaaaatttytttttgacttacgggtacaagtgcagttgtgttccatggatctattgcatagtggtgaagtccgggctgttactgcacctatctaaatagagtacattctacctgataggtaatagttcatccctcacccccattctaccttcccaccttctagaagtctccaatgtttattatttcacttaaaagagtagatttgaaaatattctcaccacaaaaagtgataaatatgaggtgatagttatgttaattagctttatttaatccatccacaatgtaaatgtatattgaaatatcacattgtaccccataaatatgtacaattattcatcaattaaaaataaaatttttaaataagtaaaaaaaaaacacctctcataatcctaccctttaagacttcatccacatccttcctgtccttttttttttttaaataaatgtttaacatagctgtaggaatccacactctgaaatgaagggaaatatctgtgagctaatacaatgagaccttgttcttgtcactgttttttgtggaatcaaattcagcatacagctgagcaattttgaattccctgaagggtagtttagaaaatgaagttccaaaagaacccctttgtagagtgtgtcaaaacactagagtgtctctcttctataggatgaaacctagcattcagtaatcctccagttgtcccttcttatggaaacgcctccttgagccaggagaaatcttaccataatgtgtatcctagttacaaagccatgcaaatctaacatttacatagccacagaactgggtttcctcttgaaatccagaactgtatatggccctctatgcatcctgatgattccccaggagcatttatgaacataagcgactttggataatttatacagcaaaagagactgtgggaaatcctttgtaaagtagatttctcagatcagatcccatgagcctgagattcagaatggttttgttgttaagatattgactcaaggactagactgtgtgggtttgaatcttagctccactactaactggttttaggatgttaggcaagttacctagcctttcaaagtctcaatttctttatatgtcaaatgaaaataataggaataaacagatttgctatgaggatcaagtgagttcatgcatatgtggtgcttagaagtgtgcctaatgggttgttcaataaatatggtcactattgttaataatcagggtatgtgtgtgtgtttatacttggccatactccccttctgcacaatcccaaaagaatccctttgagactataaactcgctagagccaaaaagtcctgtgttccactctttgtcctcagcagcacctaggacagtcatatctagtttggcatagatgctgaatactccctagttggcttaaattggccaaaatcctagttttcttcctgcttgtttgrcgcccagtaagtgcttggctccaggctctgagaggtggggatgcagtggtggagaaggaggctttagaggatggtgcctgctttttgttcctcctcctctggcatgatggattcttccctttaactccttagtgcctcaaagacaagtaatgatcaaggctccaggtaggactgactatcaaaaccaatagctgctgctaagatttgagtatttataatgkacatgagattccatctctatccagcacaccagcccactgatgctttacaagaaaatcctcagtgcctcagagttagctttcatagttttcttgttataattttcagcttcccatgtgccatgctagrcacaaggtacaacagtgaacaggacagacatgggccctgcccttttagagtctagtgaggaagatggacatagtggatagtaagtacatgtgataaattctatgtcaggaaatgcagggtgctatgggaatcttaggaaggtcacataactattttaacaagtgaaagaaggccagttatttagctttagtaggaaacaaagctctccttaataaaatataaagtaagtgccatattgtgggtttgaagatttctttgttctatatgatatatattttctgtgctgagaagaggatagtacactaaaaatcgatatgtcttgtaactcagtgttttatggtcaacttataacaccttcaacttatagaagaattaagattatcttctaaggcaggctttccaacatttagawgcatgcatgcatatcctagcttccagatacctgcatccatttccctatggctggttatttttttctgaaacggattttttttccagccttctgacagtgtagtggcagaaatacataggttcttcatgctgtgtttttactttccattttcgcaataaaactatatcactgcaaaggaaatcaaatctaatctgcaatatatttagcatgaaagcaataagaagcattaattcactccagaaagagcaaaatacagtcgggtactcaaaagaagaatcaccatggaaactgttttcttgaaattgtgtgctctccaggctccaggcatgactaagtgaggaaaggaaggcaaagggaagagaagaaatattttaccctttctgttgtcactaaaaatgctgctgaggaatttctatgaattattgatcgcattaatagaagtatatatgaattagaattattaaactgttgccttttaaatgagtgtgtaaaaacacactgagaacttgttcctcagtgttctcccttcctaactgtcaaaaccctattgagcggtgttctccctttcctaactgtcaatcatcctmttaaggtcaaaagttttaagagaagcactaggaattatgatgattaaagaattatgtaagctagaactaaggtaaaatgtgtttgcatgtaactcccagatagacttgcttttgtataccattttgagatgattatggtttcagaattttttcaaagatattaaatatgtcaagatcagcccagctcctgcctttgggaccgtgttaatgggatgtgatggaatttccctaaggaatttgttacagattagattcactctgtgtttgtgtgcacatgtatatatctcacaacgagtccactctccttgctttctacatttttacctcctaatttatagatttttctcactgcaactatatatttggattataatagctctgataagaatagctaccatgtgttcagtgttccctgtgagtcgatcactatgctgaattctttgcattataacatcaagggcataagcttttatttgggtggaattgtgtattatttagcaaaacaacaaattcaataaaagctcactaataaaataaatgtttatattctcatgtaaccctcaaaaaaaaaaacctatgacagtccccattttacagctgaggaaactgagtttttgggatggccatcgaatacactggatcacagagccagtgagttgcaaaacctggatttgaaatcatgtgggaatcctaagtccatgggcttaacaccactatgttttcattctaaaggacatagacaacctgcctttttaatctctgtatagactcatagctgcccagggtctggacatgtaagtaggactttggtatattcacaacaaatatatattgagaatctaccattgtaccaggcactgtcctaaatataaaaattgaaaataagataacatccctgccttcaaggaacttacagtcctcaggaaatgttggcacgaatgaatgaaacagacaaaatagtcaaaggttcagagaaaaaagggattaatgagatttgtggatttgttgagtttgtatggatgaatttgtcctggccctccaagagggggaggagcttttgtaaggtgggaggaagagaaataaacatttagggtaagaaaacatgattttaagcacagagatgggaatgagtgagaagggtttcaggacctgttagaagatcagggcgtgtgttttagaaaagtgagtttgaacaagtacatcgaccattgggccaatcagtaaagaacaatgaaaactggggcaaggaggtctggattttatcctatcaacacaagtgatctttcaaaggattcatgtgtttattctgaggtgttaattactcacaataacgagcattattcttttgtattcagcttaatgacttttatacatgtatacaaccatgtcaccattacccacataaaggtacaggacagttttaggactccgtaagattttctcttgcccactcttacttaattctccctcgcccagagattatcagtattccgacttttatgtgagtgttcaaagggaagtgatttcttaaaatgacactatgaaagtttaaaggaaagctgaatgactgacgggatgtagcacaaagtgtggaggtgagaggtttcaaacagggagaccaacaaagaggatgttatgaggttcactccaattcatccaatcaattaaatatttattggacacttattatgtaccatacccatacactgggaatatagtggtaaccaacatatgctctctcaatgaggaggccaacaaataaacagttaccttacggtgtaataaatgctataataggaggaaatatacattgtgcttaaaatgggcatctaacccagaataggaaagtcaaggaagacttcctggaggaagagacgacaatctgaggatcgaggatgaatagagattagccaggttccaggcagagaaaggcacatacaaaggcccaaagaggagcaaggacctgttcatgtttaggtagtggcagtagacaagagagaagtcaaagaaagtaagttttttaatcaaaagaaatggccagacttagtaattatattctatcacaagaaccatgtcaaactgggtttcttcaacactggtactgtatataattgtgttttatactatgtattaggcactaacctgattgtgcaacattgcaaaaaatttcagatgttcagcattgcaggctttttcattattgtttatactgtgggcaacccacttgcttgtcagtcatttctctgaatttgagccagaaaaaccagtcaggcaataagatttcacctacttctgttagatgaagctgtttttcttattctttgtagcatattttgtagcttccccttttctggactgggctgggctgtgcaaagcagccaggctatgccttctgacttttagtttgtttcctggggcagctttgagaaagctattgagttctcaacactcattttttctctgattcatcagcagataactcagtaagcagaaagtggcctttgtagctccgcagacctgagttaagccatagcctaagtcttactaactctctttgtgacttcaacaagttacttaatgtttctaggcttttgttttcttgtctgggaataatagcatccactgcatatggcgtaaatgtcattaaaatctaatgttgtaaaagctgtaagatagtacctaacatatagcaggtcttcrgtaaatagtatctggaggtagtaaagttgagtggtttatagcaaaaagctctcaagttagactgcctatgttagaaggctggttctgccaaaggctagctgggttaacataagcttacagtgactcagtttcctcatctgtaaaatgggggtagtaataatgacatctaccttatggttttattgtgagggttaaatgagttaatgcatgtaaagttcttcacacagagcctgctgtgtgggtatgcatatctctacatctatattagtagtgttcctgttaaccttaatgattattgttatttttacttattacttggtcccatctatgagaatgggagagcagtacctacctatcctgcaaggttgttgcaagagctacttaagaggtatgcgtggctcagtgccaggcacacagtgggctcctgataaatgtttgttgagtgaatgagagcaaagtgcttctctctgaatgttttctgtaaatgtttcgccttaatgatcactgggagcttccacatagaaggaagtgccaaagaagcgcacagggcggcagcctggcttgggcctggtggaatccaatgatgttgaacaaaatagattcagatcagtctatttggtgccattgaaactgtgccaacgagcagcaaaatgtgatttcatgttgggagagtgccaggatcctggtttgcaaatcaaagagaatcctacctatttctagcaccttctctctttctcccctcaagattcttctgtgtgggttttcttacctttgaaagagcctctggatgtttcacaaaatcaggccccagatgtttgaaagacttttgcagacaaggtaatcaatccatttggtggccagatgctgtctgaaaattttcctgctatagcactgcaagtttctaaattcattagaaacataaattaattaaatctaatcaacagtgggtgatgcagaagattaaatagtgaaaaacaaatacatttccaacagggtcatattagaggcagagaaaaacagctccagtttggaggtaaatgtcaagttaacccttcatgtgatattctcagaaaacttagccaggcctgagtccccaggtgaggctgtggttctttccaaattaaggctgctctggtgggttaattgacttttcaagaaataaaaaataaattatctgtttctctaaaacattttggagtggtctgattctcttatgtattcacagaagtgaaaatctccatcattcctttatcatgaaaagtctcaagagataggatttgcaagtggctatgcactatgtataaagcagtatttttcagtagcattctatagtcagataaatttggaaagagagtgaagtcttctttactccacactagaataagttacctgagttcaggattgtctgaactgaatctgtcaatattcagatttaatattgactgtcaatactgaatctccaacaccaaaaagaacagtgcctggcaagtccttaataaaaccttaataaatatctgtaagtccttagtaaatatctgttaatgtatgaactgtgggtgaacttctttctgatgggacaactcaatatttacccagataaatccccaagatgagggacagtgtatgagctatttcccaacagtgttcgacatcttccccccaagaaacagcatcttaaggaactaatggtccatatgatatattttagattaaccaagttttgaagtattgttgtatagcacccctatcctttgtcccatatcctctaccctcagtctwaatgaaactggagaagattcagggtgagtgaatagtgaattcatgcagtcaacttctgggtaagaggctgtcctccaaggatgtgctcagcttactggttaggccagcccttagttgtgatttgactgttttttcattccacacttgsatttgcagttttgactgttttttcattccatacttgcacttgcagtgctgacaaatgacctaacgttgtgtggataaaggtgttgctaccttgcatgcagccctgtagagaggtaccagtttgcagaggataccactcaacagtaaagaccagcagctgctaactcagatgcctacagaggcaaagtagcrtaaaagatgaaagcagagaggtagaggaaaacctcaggagggtaaatgggagctggcacttgacactaaggctgggggtacactaggaaatgttaggaggtgcagtaaattcaagacctatgcccttctaaagggagcagctgcttccccactcaagtcaggaatggccatatgggaatgccagcttgatgttgccaatcttcatttttctaaagaaactgaaaaatctcaattgtttaaaatgaaactttatactttttagatgatagaaactcattcaaaatgttggaaacctttgtgtgggctaatactgcaatgttaataaactagtccaaataaaataaatctgcttgtcagatatgacctatccactccaactggtatcctctgggctatttggtcccatgatgtggagctgtggagccttgctctgccttatctgggatccagatgagtgatccactgggaacaacaacaacaaattatatatattgaggagctacaatgtgcaaggcatcatgctaagctcctccccatccttatctcatttaatcctcataattcccctccaaaatggtaccaatattattcttattttacagataaagaaactgagattcagagaactcaagtaacttgcccaaaggcacatcacttgtaaatgacagagatgaatggtatctttctgacacctaaagtcattctgttaaccattcattatgttacttctaggtaaaatactatactaacatttagtgcttatgtgtgtcaggtaccattctaagtgctttgcataaatttatgtacataattctcaacataatatcatcatctccattttgcagattaaataagtagggggcagagagagaggttaaataataaacccaagatttgccagctagtaaatgtggaagctataatttaacctgggattacaagactgctattgatcaactcttagaattatttctcaagacaaagtcctaggtcaggcacatagaaggtgctcagtaaatagttttcaatggacagcaaatctcattttcgtcttgggattctgtgctgcaggtgtggttgttgcctctaagtagctgctatttcagccattatttcatgtgactcactggcagctgtcactcaggcagccttcactgcatcactttgctaattccaggcatgcagagcaaagactgacaagccctagaagctggctcagcctctaatgaactgtctaatccagaaatcccttctcagggatcgggcaatccaattcaaactgcgtatgtgactgaaatagttcactgggtcagacttcttggcatataaagatcttcccacccagtctctggtgttcgattgcctttcttcctgcaaattgaaagggtggagactggtttagacaagggctggaatttaagtagcagaagggtgtgtgtgcattttataatgcatgtgttttcgtgtatatgattagctcagcatagaccttattaactagaatgaagcaaatgtggattttattggttttcaaattttcatgatcccatagttctgctacactcaattcaactgaaaaccaaatgtacgtgtgtgtgtaagaacaacattagaggatataatccaaatgatcaggctacaaatattaataaatattctaggaaaccgtacttttttttttttaagatggggtctcactctgtcacccaggctgtagtacagtggtgcgatcacagctcactgcagcctcaacctcctgggctcaatctgtcttcccacctcagcctcctgagtagctgagactataggcgtgtgccaccatgccaggctaatctttgtwttttttgtagagataggattagaaaaccatactttccttgaacaatgcttgcatgtctactatgtgtcaaacattgggctaggggccaggaataccgttggttaaaaaaaaaatcagctgtgcttcctgtgaattatgaattcttgtgaattatgtagtcttacaagggagacagacattaacaataaacactcaaaaacatacataatatacataatgatgaattatggtagatgcattaaagaaaaaggatagagtactataaagaacaatgtgaagactttaaaataggttgtcagaaaagtccactctcaggaagtgctgttgttcaagctgaaattttttaaaatgaagagatgttggctaaggaaaagggaggacgggggactagtttaggcaaagcatgtttccccaaattaagggggaaagcaggaaatttatgagatcctgaaagcaaaagtagggctagaaaatggtaaggagggaggtcaggggatagtttgcgagggaggaaagggcccgttcacaaagtgttcttaatgatgacctaccaaaaggttgtattaccccaaagcttccccaaaatggtgtctagtacattttactgttgatacaagttcaggtgaagaagcaggaggtatatttgagattgtggccagtgttgagtctatatcttcagtgcttaatggtttggttccttctgttacctgataaaatactgacatatcattttttattccccaagaactttgcagaaagcaatgcatcacagtcagtgctagaaacctgctatggtgtgtgttggaaagaaaggaattttgccaacgcatttaatagttatggactttttcaagtttgaagctttttcatatcctccagaggcaataacttaggttgttggaatcagtatttgaaatgttccccaaaaatagagtccttggaggtatggaaatgtgatctgattttcactcctctcctatctgctattcctggagaaagcatttctgaaaatggccttggtactagatttctcaaatactagttttatttcagaggtgtcccaggctataagcctatagcaatgaacaattaaaaataacaataagttgtaggtaaaaatggaacatgtgtgactttaagctaagcagagagctgtcatgtgcattacataaacccaaagtcagttgtccccatgagaatcctaaatctccagttgtgaaccatttatgtcatgtttgctatgcacagaataagatcctaggtactgaaaaagatgctttctactaaagaaataaatattattctgttttcagggaacttataatctagttaaacagataacacatacacaaagtatatttgagccatctatcaacattcagaccataatccaatagaaatgagtcatgcctgataagaagatgccagctaagttagtgaagttttaaatgtaaactgtccttacttggtttctagaagagaataattttcaactgggtgttagaagggaagggaaacaggataagttctaagaggataatttccagattgaagaattgtttaagcaaaggtctgaatgcagggtagtattgagtgatggtctcagatcccactagggatccagagattcagaagtaccatgaaaataagatgcagaatttcacaaatataagtacatgcatatttatggggaaaggatttatagcttttattggatcctcaaagatgtcygagatctcctaataaaggttaagagctaaattgtattattagagaaaggttcagattttacattcttttattcatcaaacattaattgtgcttagtagagtcaaaattgagtaaaataggaattctgcctttaatgaaatacatttcagttaggaaaatagaacaagtacacatgtaagtgacaatgtcatggatctcatgtaaaagtacaaagagttacagtttttgtgaggaagaaggaattttttccaatcaatgaagcttagaaaagcttcatggaataggtgacatttgagctggccttgaaggatttgtgtatttacttttttatttagtcagtaaacaagtgttttttgcaaacctactagatgccagtccctatgctaggtcctcagattataataatgcagaagatcctgcccacaagggacatgctgtctcaaagaatgagatgtcaacaggcacaattaatgacaagaatatattagataaatgaaatggcatgaacagttggtcagcaaagattgtatttgctttgagagtctgaggagttaaactttgatggagtgtgtgacaatgatggaaaagtgaagactgagcccagaagatacactctgctgtgttaagaagtaaaacctacaactgtgagtgaaagatgaaaaaagaatttatatagaaaaaagaagagatagtatacagaagagaataggaacaagaaataatagaaggtggagggaaaagaagcagcccacaaaaaggcaggttctgaacacaagctttggaactacaattgggtttaaatcccagctccacgactagtcttacaaacatgagcaagttatttatcctgtctgagccaccattttcccaactgaaaaatggrgaaagatactaaaactcatggagtttgagtgacaattaagtgatataacataaaacacaaagcacagatcatgaccaaagtcagtatccaatatatgacgatggatctatagatttaggaagagagtgtatgtatatagagggtcgaacgccgtgcctggcttgcagtaggccaactcaataaatggtagtttcaaagaaaaactatgcttttctaaactgtgcagtgctggtgtttctcttagactgtaatgtcttgagaccaagtcaatagctagttaatttcagtgagtcttctttatgacagttgcaattctctacctgtagtcatactgcaggaaaggaatgtgcagctaaaagagttttccattaaagactgatgtcctggaagngagntctacaaatcacttggaaagttcctggcaccatcacctgggtctggccatttacaangtgtctgtaaatcttgcacagggaaaggatgagagtgtagggtttttttccccactctgacagacttgtttctataagatattaaggatactggtgaaagttaaggaaggccaaaaggaggtcagcctacccatgtggaagtgatcttgtagtagatttctcatcactttaaagtgtatatgagttagcagccttctgcctggtaggcagatagtaggtagctaaaagaacagagtcctttctgctctcagcttcaaaaggagaagggaagggaggaagagatgagtggaaagcagaaaagaaagaagaggtgtgaggtcaggggagagggagagaataaggaggaagaaacaaaaaaaaaatcaagaggtcttttattcatagcaatcacatggatctctgaaatgctgatatatgagagaaattcttgtaatactaaatgttttaagaatcctgttaaaccttatatgaagagaagatttcaatagcatttttcttactatccagattttggctgtgggtagggtttgaacctgtacagattttatttcaaatgttagtggcgaccagtcctcattcctggcctgttcatctatacatttatttttttattcattcagcaattccaccttctttcttcttcatcgttatttttttcctggcagttggaactttcccaccagcatataaacatgctgttatttctatgacactgtgaaagtactctcttgatcccactttccttaccatctttcacctcatttctttgctactcttcaaggagttgtacatagtcaccatctccaattcctctcctcccattctctctgaaacctactccgatcaagttttatggccaccatcccatagaaactatacattactcaaagttaaaaatgagctccacagtactaagcttaaagttttactctaaacttttagcttgcctatgagcagtatttgacatggttggtcacttstctgaacttcacttggtttccaggacattacgtttctttgattttcttattatctcactggtcattctctttgtttttttccctggattttcttcttctgtccccaactttttcaatgttggagtgccctactgttcagctcttggtcctcttcatttattttaatgcactcactccccaagacctcatctggtcttgttgctttaaacactatctgaatgctaataactcccaaatttatatcaccagctcaatcccctctcctgaactccaaattcttatttccagttatctcctcaacatctgtacttataaacctctcacatttcacatgcataaaactgaacatctggtcctcaaaaagcctgctttactcacaatattctcagtgatggcaactctaacatgccagttgctgagaccaaaaactttgggatcatccttgattcttgtattttttcaaaccctataatcaatccatcagcaaatcctcacaggtcaactttcaatatcatccagaaaatagccagttctcttcacctccacagcctacaccatggtttatctccccttgattatctcaatacacttcccaattctacctcagccctctacagtctgttatcaacactgtagccaaattgagtcttgtaaaagcagtcacttgtctacttagtatccttccaacagctatccctttcacttttttgttgtaaaatgtacgtaacataagctttaccattttaactatttttcagtatacagtttggtggcatcaaatacattcacattgttgtgcccatttcacttttagtaagagagtccttgctgtgttatacaagactctatatcatgtgaacctcccatttctcctacctatttaccccttgtttgttctgctctaggcacactgatcccttaacacatgttcatttccctcttagggtctttccattgtcagtttcatctctttggaacactcttcctacagatacctgcatcgtgaacgcctccactccttcaagtctcccccatgaagtctgtcacaaccaccctattgaaattgcagcctccctgaaaatgccagtcctgttcatcttactcagctctatttgttttccttagtacataacatacaatgtaatttaatatgttcattgatgattttcttttctccacaactagaatgtaagatgcatgaggacagatatcttatctatttttaattgatctttctttaatatctggaatagtactttacacgtagttggtgtgttcaatgtacatttgttgagtgaataaatgggtcaatgaatgaattaattaaccctaaatcttgagacgttgtttggagattctagcaggggaacacagctactcatatacccttgaccgaagaccagtcctcctctattggggatgatcatgctcttcaacccattgtgcagctctgggagggatgcacagagtggtgagggaggaaggagacacctgcctagccatccggatcagccaaatcaaccctggtgatcagtggggtgacagatgttgcaaccagatcacccttatgtcctattaacattaaatctttcctgacttttctagttttaatattattcattgttatctaaactgctacatgaccatgaagtcaaatataatagattttctaaatatccgattttcagtggatagataaaagcagtaagtatttactatactgcctttatcctgatgaatatttattaaagattgggtcctgctgctgatgaaaatcaacactagtttattcattctgtattttactcttacctactgtgtgtacagtattgcattcagtgctttaaaatatgcatattatccaaaagagagcatactttataatattcttcaaaataccacaactcctagccagaaactagaaggagggagggagaaagagaaaaaatactaagtgattcatggtattataaytggcacgcttgtttctaatactttccattttatttgctaagacccttgaaaaaccatcgtaacataataataccttgtgaactattagcaacatatttattttgtttgacatcgggacctcatgttttaggaggaaaaaatcaaatccttgcctatcatattcttcattcatttctttaggccmacctacagtttaacaaaaatatgcattgtatttagtgttcaatttgtcctttagagaaataaaagagatttattgcatgcaaggatatggctgagatgtgtttccttgagttctgataaggacttctgcttccctctaggaaaaaaaaaattctttgacttaaaaatctctatgatcagaatctttgaacaacctttccccaacattgtacttgtatcccaacctcccattacctcccagtcctctaactgagagtttcacaagggcaagtaccagtagtgtttgtttattactatatctctggtacccagcccagtgacatgcacataataggcattcattaaatcgagtcctttcatctcagatgtatttgctcatccactttggctttcttattaccacctccatgccctctcccaagtaggaccctacctggacatcctctctcccccaacccatctgctttctcttcctgttattcataggaccctgaatccctgacagtgctgcaaaggctttttaggacaagatctattatttattgagcaatgtatctcattctaaaatcatcaaacactcactattccaaatgagaactttttcttgcttcacatcttaagtaaatgtttacatctacccagcatacatattttgattattgatactttgtttagggttatccattctctatatgttggtccactttggtattggctctcttcagtgcccattcagtgatccattaaagaaaaaagattgattgcttgatgacttgtgagcatagaaaaaaaaagattgagaagcatctgttatatactaagagactcagctaggcactgagggtttagtggtgaacaagttccttgtgaagtttacaatgaagagactgaaacaggcatataaatgattctaatatcattgtgataaatgctaatgattagtggtgataacttataaaggcaaagtatggggagcaatgaggctgcataataaagggagctgtgttgggcttaaaagaagtcacacagggcttcttaaggaagtgatacctgagccagtcccaaaatatggggaattttagcttccacaaagtggataccatgtcttactgacttcagaacatctggcaaagcaaaatttctgaccaaacatgtgccagatgccataatatgtgtgtttgggtagcaggtagcacagggcctgcccaagaactcccattcccccacagatgtgagaactttctcattttggacctggagtcctgctgactttggggtcagccatagatgtcccatgttgtgcggataatagatctgaatgattgacagagtttgtattgcctgagcagttaattactcctctgctttttgaaaaattgggtgacagatggtaaacaccttgacagcagattccactgtaaaccacacaggcatgtaggcaagtctggactgctatcaatttcccactggatttttctgtactcagagacttataatttttaagactcctttgccctttaggcaagttttgttccaactatgggaaaattttatcttctaggcttctatgttgcaggaacttgttttgaataaaaggcaatctttatcaacccacatgtccttgggttgattcaaacctgtttagtgttggagatttggtcagcctggggaagctgtgtgcattttaaggggaacagcatggcattcattactcacctgcttcccaccatctggattttcacagctcagcaagcatggtgggcttcctgcatattagcagggaaagcttggctcctaaagagggtgtggctaggtccctctgaagtcataattttacaatgaacaccatgaataaattggggttggcattctatcccagtaagctgctttcatatytgaatggttgaaaaataatacaccatctccacagcaggggaaggaggaaaaacacaaatcatcttaatactaggaatcaagcaagtgggaaggaaaattggttgtgtggtagagtaaagtggaaatgtgcatgtgagagtttgtgcaaatatgttgtaaggcaagggagtttccaactcaacatgcattaataacctggccctgtgcaaagtgctataaggaaaacaaagatggaaagacatgtatagtagcatgaatttagatgaatataacagaaaacttactaacagtagcttaaaccacagggtttaacaatttcagacataggctgtcttaaggtaggttttagttgttcaacagtgtcatcaaagatattgtcccattctcccatctgtcatactcagcttcttagccttttaaagtccataggcttattacctcatggtcacatgatggctgccacagccccacgtattatgaacacatttaattacaaacaaaggcaggaagcaatgaagagtccggtcagaaggccttccctcacttacttccttttattcagggaagaaaactctttcccagaatctctgtcccgctcctgcttccccagtagactttcctgtatgcctcattggccagatctgggtcacacaattacccctagccacaagggaggctaaaaagcaagtatgtgggttttccagcctctacagtgggacagtaggaggcaggcaaggaagaaagattctgagtaggagtagccaaccaagagtatctgccatgacataacacatgccattaatgggcttgatctacagggtcagactgacatttaagcagtgcccattttttaatactgcacttatggttaagtaggaaacagccattgtgataagagcttgggacttggagctattggacccttctatctgtattctttcatctaagaggtaaaccagcaccaggttgaagataaaaccagtatgcacagaattaattaaatgaaaggaagaatattcagtatccaaatactagacactgattggatgacagaggaaacaattctggatcaaacagaacgtattacacacagtaggtcaaggatagcaagcatgtggcatgtgtaatcagaactgtgtatttactacttctgtctttagtaccaaactaaatgagtgtgagaagcagtgtcaagttaagaaggtaacgctactgaatcaggaactcaaacatagttccatttagacaagggcataggtgaaaaggtagaatacttcatggataacgtagcttggatgcaggttggcaaaagtgtattgatgaattttttttagctccataccatccaaacagaatcccaaatagtaataacatctagacagaaagattaaaaaaaatctttgactctgtgtactaagaaaataattattggtgccaaatcaagttgagtcatatcaatagagacactgtatctacacagcatttttaactcttacaagctcttatatctatcagttcattttattcccataattttacttcttttggaagaattgtccactaaaaagagcagtatgaaggaactttctggggtcaatggaattgttctatatcatgatagtggttatggatacatatctctatgcatttgtcaaaacctttagaactggatgccacaaaaagtgaattttacacacacacacacacacacacacacacacacatacacacacacatacatagatatacagatatacagtgttttttttttttttgagaccaagtctggctctgtcgcccaggtgtgagtgcagtggcatgatctcggctcactgcaacctctgcctcccaggctcaagtgatcctcccacctcagcctcccaagtagctgggaccacagacatacaccaccatgccgagctaattttttttatttttggtagaaatggtgtttcaccatgctgcccagcctggtctcgaactcctgagctcaagggatccacctgcctcagcctcccaaagtgctgagattataggcgtgagccaccgtgcccagcctatatataaattttaaatttttaaaaagttttaaagctgctgagatgagtgctaaaatctttcattcagtttgaaaacaaattaaaattgtttacaagttaaaaattgttcaagtatttatggttatggcaaaatatagaaaataccgaagatttagaaaaagaccataagaaaataaattatgtacgttctacaccaaaaagtacaattttggattctctctgataaacttttgtctatagagagagagtgtgtgggtatgtgtagtcattaacaattacttgtaggagagtcagattgtaaaggaaacttagttttatattttaagtgccaccttgtcattaacagaagtttctgtaagtgtacatattgctttacctgttagaaaagatatattctaccaagaagcagcttctccactccttctggaatctccgcctggttcagcccgcctgcctccactcctgcctccaccatgtccatcagggtgcagaagtcctacaaggtgtccacctctggcacccgggccttctgcagctgctcctacacgagtgggcctggtgtctgcatcagctccttgagcttctcctgagtgggcagcagcagcttccggggtggcctatggtggggccagtggcatgggaggcatcactgccgtcccagtcaaccagagcctgctgaacccccttaacctgaaggtgaaccccaacatccatgctgtgtgcacccaggagaaggagcagatcaagaccttcaacaacaagtttgcctccttcgtcgacaaggtacggttcctggagcagcagaacaagatgctggagaccaagtggagcctcctgcagcagcagaagacggctgggagcaacatggacaacatattcgagagctacatcaacagccttaggcggcagctggagactctgggccaggagaagctgaagctggaggcggagcttggcaacacgcaggggctggtggaggacttcaagaacaactatgaggatgagatcaataagagtacagagacggagaatgaatttgtcctcatcaagaaggatgtggatgaagcttacattaacgaggtagagctggagtcttgcctggaagggctgacgatatcaacttcctcaggcagctgtatgaagaggagatccgggagctgcagtcccagatctcggacacgtctgtggtgctgtccattgacaacagccgctccctggacacggacagcatcatcgctgaggtcaaggtacagtacgaggagatcgccaaccgcagtcgggctgaggccgagagcatgtatcagatcaagtatgaggagctgcagacgctggctgggaagacctgcgtcttacaaagactgagatctctgagatgaaccggaacatcagctggctccaggctgagactgagggcctcaaaggcgggaggatttccctggaggccggcatcgcagatgcggagcagcgcagggagctggtcattaaggatgccaacgctaagctgtccgagctggaggccgcccttcagcagaccaagtaggacatggcgcggcagctgcgtgcctaccagaagctgatgaacatcaagctgaccctggacatcgagatcgccacctacaggaagctgctggaagatggagaacatgagtatccataygaagaccaccagcggctatgcaggtggtgtgagcttggcctatgggggcctcacaggctctggcctcagctacggcctgagctccagctctcgctctggcgcaggttccagctccttcagccgcaccagctccaccagggccatggttgtgaagaagatcaagacccgagatgggaagctggtgtcctctgatttcctgctcaagtgaacagctgcggcagcccctcccagcctgcccctcctacggctgccccaaagcctaggagggaggctgctgtgcaaggaagcacagggaacaggagacttacctgaggctcagccctagccctcagcccacccgcgggggagttcactgcctggggacccccgccccttgcccatgcctccagccacaaaacaattcaattgttttttgttttgttttgttttgtttttctgtccaaaataaaacctcagctagctctgccaaaaaaaaaaaaaagagaaaagatatattctgaaatgaaaacactttgacaaaattgcaatcatttgacataaactgttttattgactgattattttctaaattttatgacatattaacatctttcaacaaggtcatcttggcataatcccagtaggagtatttgggtttggccataaccagacttttttcctatcccctccccaaccccctatttgtggaaaatatgctcaaatgcactatttcagttaccaaaacttggtaagttactttggtaaagtaaaccttatcagagaaaatggatgctgactttggaccgtgatccaggacccaagaaggagaccacagttttatatggatgggaggaacaactgtaattcccatcaggacacctaagaatcccgtttgtttaatgatccacaaagtagtcattgccagtctagctagaagcctctgtgctgggatgacaaatgatacacatcctacctcccccaccacccacccagattcattacccattaatcatggcaccccagcctagaagtgaccccgcaaaaccttctcaacacaaacctggtaactatgatcatttcaccattatcattcactatgaaatatattttctgttcttatcttagctgaaggcgaaaactaccaaaacccaatccagtcatcagaaataaagccaggtattgagtaggcagaactagtcagctgatgcaagtagggtaaatgactttatgatattatctaccaaatgtttcttagatgaaagataaaacatttaatgggctctgaaaactaaattgcattacccttgcatttccatctctatgattgatgttgagaggtcagtgctagtgacctggtcagtaagatattccatctgtagactttgagtttagatcctaagtctaaactgagtctccattttatcaaaacagtcaccctcctatgtgagttgtatatcacctaataatccaggtgcctgcctcaactcaattctctggcattgcatagactccagcctagcatgatactgcaagagactagggatgaactaggagattcctctgtttccgtaagcctcacawtcattagcctcacatgcgtatcattgttaagtcaatatctattattcaggtaaataatactttatgtatgaaattaccagtctagaacttttgtaggatgctgagattgatttaaaaaaaaaataataaactcagccttaatagtgcctattgagctagaaatggggttaccaggccaccatcttgtggaaattaaatcagcacaaatagatttggagcaaggcaaacttcacactacccagggtttcctttaaaaatcactttaactacatctgacctttctagctgtttctggcttttgtttttagtcattgtgtactttatccacatctatatacaacagaggaaaaatgctcaagtttgtagtttcttgatcaacagcatgattaggctgagcagttaatgaaatgtggaattgtcatataaacttacaatttaaaggtgaaagccatgttgaacttgatgaattgatttctgtggatcatgatttcaaatgacgttattatctctaaacttgctaccttattactacatcctcttaccatatcacaaaattattttgtcttgagcagtatattttccagtttaaactgccttaccaaagagcatgctgcaaacacaagagtatttgtatcagaagtttcagtatcttgaaattggaatgtataatgattcatgagttttgcatcaattattaaacagtcatagatgaagatatgcagagatggatggggcagtaaagtattccagttacacctactggcttagcaatgataaatgagtcaggaaacatgaaagttcaaaacaagtattaacttgagctgccacggcttattctctgaagggaagtagacaatagcatgatataaacaggttcatgtacagagcagctggctagtagaattaaaataaaggtaaggactctgcaagagggctaaggaatttcagaatcctgccatgcaaatcaccctttctcttacaaggttcttgagggagacatagcattgcaaaataataacacttggaaaacaaaggaaatatttgtattacctgggaccatgcctaatactccataatgcagaattctaataatactggcttaaatcatgtgactttgacttccacttgaatcctgccttgttttgacttgcatgggtcttaaagtgagagtaaagacattttcagagtctaggaagaaggaaaatgtatgtgtcatcccctgggaaagcaagtgttgcccttggagtaatatcttcttggcaactgagccaagagctcacactgggaaaagctacttaactctcttctgatacccaacttcaccaaaaggaaaggcccatctttagttctcattgtaaggcccttgcagcccacccagaactctagtgttctgcattaatcactgtccagtgaaagggcatagactgcatgtaagcagaactttagaacgtagctctgagacaagagccaggcattgtaaacctcaggcctggctcccaccaccctctcattatttcctgctactctttctttctgagaaatgtttgtatttgagcagttcaagagccttgaactggaccagcctttgtacctgaccaaagacaaaaagtgaaaagcaatagacatgcccgctttaggctgtacccaaatttggaagccccatgaataaccctttgctaaccattcattgaaaagccagaagcagtggttaatgttagaagtgtaacttagcactggtactttcaagcagggcaatctgaagcaactgcaaatgttaagtagatgccttctctcgtctaaacatgggagtagtttgctaagatgggcaaactgtaacaaaggaaagtggtcaaataactcacttgaggtgtctggctttctcactggctggactttcttctcaattcatgggcattggttacataaatggaccttctaaacttacatctggaacttagtaaccatattgcttattttgtgtttccttaaggtagtattcactggagtcttctcgagaaaatgaactagatttctagttaagagcatcagtattggaatgagatagcctattccaaatgaagactctgtacattagaagtcataaactgataacccacaaaccacattcagcccacagatatgattaactttttcattctcatggcattggaaaaaatacttgccaatgtataaactttaagagatttttgcataaaagtcctgatttccagcttcctatatatatttaaacaatgagaacatcaggcaatacatggcaatacaggcaatcatggccccaatcagcttaagctgaatagcctcttgcccctttaaaggagacatacatagtccttctagttcacctatgttactttgtggccctgcaggcctttgtatttgctatctaggaggtcaattatctaagaagtcaaaacaagaaatcaagaattgttcttttaaatgtgtctagcttgaaagtgaccaaggtttatgccttatttttgttaacttctgcacaatgaatgaccataaggagccttttcatacatggaaaagaacagttatatgtgaagtggagaattttacactacttacctgaataaatcaggcatacaaagaaaatcctgaaataatgatataaaagtaagatttgagatcagaattactcaggggtaattgccttagttttccacctcactgtttcccctttgctttccttacctagacattatcttcagaatgttcctgtcaaaggccatagtcataattcccctgcctctttttttttttttttttttaactcatttgcactcttggtagcaattgttggagccctgcaggggaataattgtgggggaattaacctctgacatttttctaaaaatagccctaataaatccaatcataggtaatttacctgtccatgttcctccaggggtaaccagcatagaagaaagacttggcaggctggcattccttcagcaattatctgtgatctgagttcctggtgcctgtgcattttctctgattagaaatacagagtacaaattgccctcacttctctgcccttatgaccttgttttctcagcacccttctcctggggttgaaataagtcatgctcttccagaaggatgtgttgggctcacaaaaaaagaaggggcacgggccaagctggagcattcgtcagttccttccttgaattatcgactggcagagttttcccaatgatttctttgtgctctgttcctccattttccatgtctaagcttcaagcatcctaaccctgcttcatcacagcccccagccctgatttgaatagccagaactgaagcctgtgtggggaagattcttggtgtaaaggccgtggatgcacgaagggtctgtggttggtagaaatcatcaaagaaaatagccatttccttcagccatcatgaagttaattttctcttccttaaaagggtataaatgtgtttttcccttttattctctccagatgttccaggagaccactgtgcagtgtgggcatctaggaaatttacttcccaagtgccacttctggtggcatttaaaacccagaacataacatccttgtaaattccactgcagagacaaagccctaagcccttaaatgcacagaaaagtatatctattatctatcctttcaaagtaagtgtgcagttacttaaattgcctttgtcttcttctttgcagctgacattatctctacggtagaattcaaccacacgggagaattactagcgacaggggacaaggggggtcgggttgtaatatttcaacgagagcaggaggtaagtggtggtgaatgcaaaatgcccattttcttcactttttaaaggaggcctcctactgttccttaatccttatgtgtcgcccttaaccttgctgctttgctcgaaaactaaaaactgccaaaaaagtcattaacatcaactgttatacattcagactcataaaagccctgtaaaagagagccttttctgggcatggccttatctttctacgcctggatgttacacctgcaaaacaacttcacttctcgcctgacctgcaaaattccatgggtgcttgttgagcgtaactcctcctttttcaatgggatctgtcatagagccattgaaattcagtctcccttgatttcaggtgtgccagaatatgcaggaggaaaaaaacatagtttatttgccaacagatgtgaagaggacaacttgggacagcagagaagaaaatgatagcttacctcacctaagggggtaaaaggccacaaactagcgtctgagtaaagcttatgacacacatcacagtatcactgtaggtgacacagagggccctggagctgagtgctacatataggaccatttctgagcaggagttctaacttccagtaactctcataaacccatttcttcctgagacatgggtttcactaggaattgtttctctttttcatataaattgaggtttttggtgtctgcttctgtttgtcaaaatggaattatggcccaatttgatttccttggcctcccctggcatggtcttcgagcttccagcaggccagtctgtgttctagtagctctcccatctgccactgcctgcctctgagattcaccgggcactcgggaagcatgagagaggcccagtgtgagaggaaggtttcacaagagacttccctagcaatttaaagcctgctttgtgcctcaaagccacttgcagtacacctcccctcaaaaaaggaaagcctcatttagaggtgatatatttagtaattgcacattatttgcaattaatttctataagggcatcgtaatccctcggggttccatataaattcaagtgttcagcattaaatcaggcatccagcctattccattggccctggaaacacgaaaatgtggttggcaagtagaaactaatagctcttcatgacctggaatttttcctgcttttccagagctgcctagtgctaattggtctggcacatactacacacacttgacagtctgatttggatggtagcaaatcaacactcttataaatgtattgttaaggtggactggctctctctgcaaatgagcaggatagtaccaagtatgtcagcatttaaagtcttttgaacactcattttcaaacctccttttccagctttttyttaaaaaaaaaaaaaaaaaaaaaaamccaattaagttcgcagtgatgataaagaggaaccggaggagctatttagcataaattacccaaggcagcatgttgccagtaatattctgctctacattttccattagctatttataggtttcacctattttaatttagtgaaatatttgggaagcctgattcattcgtagaatgatgggggacacattttctaaagcagggtagttttgttcaataaaaaataaatgtcagtgaggataaagaacctgcagttaagcgttaagctttgtggccagtcttgggattaaaatgagcactaaatccgagaaacaaacccatgtgacatcatctagggcagacctgcttttgacttcagtgagtgagctccaggagtgaattctcaggaggcacacacccagagagtctgcacaaatacattacacacccagggttcagcactctcactggtcagtaagttgagatttgggtttggatattttatatccacctagaaatatacatttggaaattaacccttttattaagagtcaagcttttataacaaatgtttaataagactcatatttgaatttttgagtttttcaaagcctgcttcttgaagctcttggtaataaggacctaaaatatctgaaataaaacttccctttccactttcctcctcttcttcttctttctttcacatcctgttttttttctcctctcttcctttcttctttttcttcctgtttctgcagacccttgcccttgtgtttaattctctcatcatgtatgtagtccctgctgtttgctcattgcataatcagcgctagaggaaagccaagaggtaaagtctcatcattccttaatgatgcaggtagcatccctgagctcctgtctgctttgtcactcatgttggaaagaaaaaaaaaaaaaaggagcaggggcatatctgatgcccaaatctgctccttatgagctgtgagacctagggaaagtcatttaatatctgagcctcttttgtccatttccttgccccaccctacctcagagatttcatgagaatcaggtgagatcttaaaaggccaatgaaagtcatagatgctacaattttgtactctctttaaggggtcgatgtaagtatttacgaatgccactgtgggatgactcactccaaagggtgactgcagcatctgttaggatgcaaaaaraaaatattagaacttctatttatattgattttaaaattttgttctattttaatatttctatgtatgtattatgtatactatatgatagtacagaagttcatgtgtataattatatgtgtgtgtatatatatatatatatatatatatatatwtttttttttttttttttttttcagaggtgctagtgactatcatggccctgccctcatcctcatggccctgccctcatcccacccccaatgactgctggaaaaaaaagggagttggcgagttttacagttggctactgtgatttaatctgttgtgtatttttttcctttcctacagagtaaaaatcaggttcatcgtaggggtgaatacaatgtttacagcacattccagagccatgaacccgagttcgattacctgaagagtttagaaatagaagaaaaaatcaataaaataagatggctcccccagcagaatgcagcttactttcttctgtctactaatggtaggtggaattcctrtttggtattttcagagatacagtcggccaaactatatacttcaatctctcttaacctcaatttcctttgaactgtgtgggctgttgaaaaacttagaaataacatttgcaagatgcttagcagagtgcctggcacacacagattcggccctcaataaatagtaactactgttttttaaaatattaaatttatgacccaattatgtgagacccattatctgcagttttcaactattgcagattatttgcaggtgtttttggaatgtgacttcctgtcttaagattcactgaatgttattctgggaatacatttcaggaaactcaacatgctgtctctgtgaggttggcatattgaatagaagttattaatccctgaatatattttagggtctgtaaagcagatggctgtgtgtctctctgacaaaaattaacttctatgataggagcacaaggcaagaagagatagggactttatcaaaaaactgatcaagaaagggtttcttttcctatctccctccatacttaacaccatttgttggatgaggaggagttgacataaataggtcagagagagaggatgttgggtactgaatagagagacaaattacataatgactgggtaagtctttatacagtggaattacctaacctccaggttcttaaatccttgctaaaagaagccatctaagctcaaaacaacttggcataaagtcacatgttaaagggtgctaattgaatagcataacaattaagaggattcgtatttaaaaattaaacactctctcccaagaaaatgagttggagaatgattcattttatctcatatgtgagtctatgaggaatatacattttaatttaaatcgagaagcaagaagcaagggatttaaaaagaaagggaaatgttcatatttcaagtgaaaaaatacagtgtcaataatgtgatcaaacatacatgaatatttttaaagactggaaggaaatacaacataaggttcatcatgattaatttttgtgcagtatgggcaacttgtcaatttgttccttttgtcattttaatttgtaaagttttacaatgagtctcatattaatcttatggaaaaaagcggaaagttatttaatgcatttgaaccccaaatctctcaaatataaagccagcatagaagtctaaaaaaatgacaattcggacgcagctggtttaggattatccaagcatatctcatctcctcatgaccagatctctactcatctgtttttccagactccaagtagtttgattctttctcataactatatttattgttctgtttatgttttgcaatcctgatttcttggaagccaaaccacataaatttgtttcaatttctttccttttaattttgctatttaagtttcactaacgggctttgcagattcaacactacttggaataaaagagacttctgatgattttgacttaattactttaggcagaggaaaaatgtctgattgtcttctatagctaactcactttatattctcaaatttagcctattgattattgcatttaaaactcgaagacttggccaggcgcggtggctcacgcctgtaatcccagcactttgggaggccgaggcgggcagatcatgaggtcaggagatcgagaccatcctggctaacacggtgaaaccccgtccctactaaaaatacaaaaaaattagccgggtgtggtggccggcacctgtagtcctggctactcgggaggctgaggccggataatggcgtgaatccaggaggcggggcttggagtaagccgagatcactccaccgcactctaccctgggcgacagagcaagactccatctcaaaaaaaaaaaaaactcaaggatttattaactactttgttggcggrgggatgggaaaaaatcagtgaaatgcaatgaagattaattatatagcataatattctgttaattgagtttttaaatagttttttgattaacaaggatattatcttcccatttgggatactgtttcatatgccaacagcatctcaaaatgattcttctaagaaaaattcccatgttcttatgtaattttcttttttatactaatattgaggttgagaatcccccttaggccaaataggttaacatgcaaaagttaatggaagacaattggaattactgtacaaaagagaaaatgaagatagatgataagattgtgtttaaaagctgccacaagcgatgataaactactcagagaaccagcaagaagaaagaaaaagtcattactcattaacagccacatgttccttagacttttttattcacaaagcttcaagatactgagtcaagaaaaaaagtgtgataataaagtcaagaatgactccaggcaacccaaccatggggaattggattgaattcactatcaattatctttaagaaaatatactgcttatcttattatagttaggaacaatttttactttctgctagaatatattttcaaacttacaatttcaataaaaaataaaaccaacattcaattgtgaatctagactctcaaattatttatgacataaaaacacattgttttacctcattttctgcttccacttcaatacctataatgagaagtggggtatactgaatttgtttttctcactatgaaattagtacatgttcatggaaaaaaaaatatagaaaaacaaaaataataaaagtgttcccatccagagagaaccactgttaagtcttttaaagtaaaaagcaaaaagatacaaataaatttgtttgtttcttaatggaaatatgatatattctgcaaactcttttgtaactaggtttttattaatataacacttaataataggaatatcttcccaattgttaaatattctaaaatatcataatgaccacatagtatttccttgtatgattcttctttagtttactagtaagcctcctacgattagtcctttagctgttaacaaattctcactattataaatcatatatgcaatacgttatagtatacaaatatattctatccctataaatatatttgcagggatagacgttggtatagataaatatgattaggcaaatgcatactgtaaactaagtatgccatattatgtttactaaaaacagttacataattgtatacataaatataaaagaaatcacaaaatttgtataataggtatctctatctagtggaattaagggagtttttttacctttatgattattttaataaacattccatgtatcgcttgtataataaaaagaaggaaataaaatgagaaaatacaaaatctatatatgcaatattacagatttgtattctccccccaaagtacatagaaaaagtactataaggatttatgcaaaatgttgacgatgatcgttcctgactggagaggttgtaggtgatttttattcttcatgttatacccatgatttctctgtttctctgtatagcaatttatcattcatgataagaaaaatatacgatgttaactttgcaaatgggatgggatacattccaaagccacgcaacaaaaaaaatttggtattaaaattttggggatgttctaagccacagctgatcaagagctaatcacgtgactatataaatatggcccatgttcattttctcaccctaaaaagcasttcggtatgcagcaggatctcctttcgctccagcgcaagccagggtgacggcacaattcagagcgcacaaatcatacacttagcagccttgccagtgtgtcagacacgagcagcccaagtgatgcccagatacaagaaaatggggcacttatttgctgctgaaagcccacttcacaatgtggttcattaagacctccaagaacaaggcatttgtttctggcagcttcaaggcgaatggtactgtgatccacatctcctgcttagaagatctgtccgcccaaaggcatgagaagtgggaggtggtggcaaaaagtcaggtgaggagaagtggaggaatggagcaaggggcaaaagaggaaggaattcccagagggacggcttttctcccctgacagtgttacagataagaaataggatgtgctgacatcattgagggttgaagctaaagctgtcagagcaacatgttattatggcagaatagttgcccaatttgctaattctaataaaagctgtcatttgcggaccattattagaagcctaatactgtgttaaacattctccatgctgtgacttatttaatcctcatcagagccccatgaggaagatactgtttccccagtttacaaataaagaaactgaggcaccatctttctttgtaagattgaactatatgggatatactcatactaaattattttttgcttatctgaaattcaaacttaactgggtgttctatatttttttacttgctaaatctggcaatcctatttgttgcttaagaaatactagttgtggtcgggtgtggtggctcatgcctgtaatcccagcactttgggaggcaaaggtgggcagactgcttgagcctgggagtttgagatcagcctgggcaacatgaaaaaatcatgtctctataaaaaatagaaaaattctctgggcgtggtggcatgtgactatggtcctagctactctggaggctgagatgagagaatcacctgagcccaggaagacaaggctgcagtgaaccatgatctcgccaatgcactccagcctaggtgacagagtgagactctatctcaatttaaaaaaagaagaagagaggaagggaagaaaggagagaggaagggaaggaagaagggaaggaaggaaagaaagaaggaaggaaaaaagggagggagggaaggaaggagagagggaagggaggaagggttatgtacctactgagtgggaatccccgtccttggacatgtgactggcgtcagagtggggattgggcccaaggttgtctgattccaaaccctaccttgtgcaagacagaggaagatacaaagaaggcaaccaagttctgccttcaaaaagatatgttaaaacaagtataaaaaatgtacactggatctgataaggcaagcccaccaaagcatgtggccagcagacatgatttgtttgcctgatcttgtctccttaaataattgaattaggccgggtgtggtggctcccgcctgtaatcccagcactttgggagaccgaggcaggcggatcaagaggtcaggagatcgagaccatcctggctaacacggtgaaaccccgtctctactagaaatacaaaaaaattagccgggcgtggtggtgggtgcctgtagtcccacctactcaggaggctgaggtaggagaatgtcatgaacccaggaggcagagcttgcagtgagctgagattgtgccactgcgctccagcctgggtgaaaatgcgagactctgtctcaaaaaaaaaaaaaaaaaaaaaaaattgaattaaaagcctgcatgtagggcacgccattccagctccacagatcctttagccctttttactcatttccttggcctgcatgacaggtgtagggatgggagttctcatgggagttctgtagggataggagttctctgttttaatgctatagagaatgccaggtgtcatcaagttgtaaaaagtgctggggcagtacaaaggtgagaaaggtagtttccagctggagactccatagaggcagcaaaaggaaaggaacatttcagtgtatctccttaccattttatttccctgaatattgctagaaatatgtactatgcaggtagatgagatttgttcatttgccctactaatgtttattgagcagctattgtgtgccaggcactgttctgggtgctggtggtacagtgataaacaagatagatagaatccctgccttcaacaattttacactctagtgaaagagacagatagttatttgataaataatcaaccaattgtcaggtagtaaaaggtatcatgaagaaaaataaagcaggagagaggagatagagaatggttctgaggacagcatttttaggtaggtattacataagcttctctaaggttgggatgcaagcgcaagaggaaagtaaaggagcaaattayacgaaaaagagggtaaaggactttccagacagaagacacagcaagtgcaaaggccccgaggcttagtgagcttaatgtgtacctggagcagtagggaagccatgtgtctggagcacagtgagtgagcagggagaggatggacaggggggtcagaaaggtggagaaagtggagagggcaggtcatgaagggccttttaggacatggtaaggacaatgtgttagtgaggtgagatgctaaaatagagataatagcacctacttccagagttatgactgttaaaccaatttttcatgtaaaattcttagttacattgtaagctctgtgtatgttgcactcttattattcaatgctcaataaatgcttttattgaatgagctgaattaaggtataagctatagatttaagagcccattatcagggaaatccatttgtcccagcataatgtatgtttttgttttgaaatatgagctctgccttcaaatgacatgggatttatgcacgccaaacgtttatgtgagccagcttctgtagcaattctatccatccttacctcttcctctccccattgcccccaggaaaactcccttatgagcttgcttttcactataattctgacttaatctggttgcccactacagataaaactgtgaagctgtggaaagtcagcgagcgtgataagaggccagaaggctacaatctgaaagatgaggagggccggctccgggatcctgccaccatcacaaccctgcgggtgagtgcaaacagctgccctggccaccacagtcaggrgcaggtctcctaaggttggccatgtgctggttgttactgtaggttgcaactataatgggccagtgagggaacgtaggcagagactcagcctaccccagtctctctctggtggcagatggagaagcaggaaaggtgccaagccttctaatgactacaaatccatgcttttccttttgtcccagaagacttgcccacatggccactgccagacgttactataatcttagcctctgttgttcacgttatctaaaatgtcttgagcaccttctgtactgaaggtacagggatgagaatccagatggcgagttgcagtcttgtgattcagaacacaaacttaataatctaacagacctggcttcaaattctgccacttacccaaatttcccaatagtcatttaaccttttcgagctttcaacatgcaagttaattttaatttctccatctgcaaaacagtgaacacagtacstactgctcgtggacttatgaggaagaagtgcaaggatggaaaacccttcctctatggctggtcctcaatatatgatctctactcagtctgagtggcttccttcctgttcctcagaaatacatagcctgataaagaggatttgtaagactaatatacaaatgattatggcactaaatatagtaagataaatgcattgagaaagtgttggagagttgcaatttgataaaaggaggaaaaaattagctgtggtttttggagaccagaaaagttctcataggaaagtggcattaaaaacggatttctcaaagcgatcttttaagggaagggtctctagatgtaaggtaaagtggtttaggactggatgatgagctcagttatgaacatgttcaatgtgagcagtaaagcaggcacatgttgggatagccctagccccaacagccttgtaaaactgtgtaaaatatgtgatttcagacaccagcagctctgctaaagaccaaaagtaagaagggagacagtgaagtagatgtgaggaaaataggttcttgccctatgtttgaaagccaaaatgggatggtcattgtatgcttrattagctcacttgtttatttgtttaataattcatttattgatacatctgcttattcagcagttactttttgaatatagactctgtgctgaccaccatgctagactattaggtgtttaccctgtcctaatgggcacatggtcttcagttgagctgcttctgagctcacaagcattggcgactctgtttcctctgatcagcctatgctttcagctctggagaacctccatgtaagtccaccttatcattctgggtggacttggcataaatccagscttgatgctctgaatgtgcaggggttttggaggctggaaagtagcgtagtgaagagtattattgttgagtcagtccagcctgggttagaattctggctccgttactttccgctagtgaccttgggcatatgacagtcatatatcacttaatgatgggaatatattctgagaaatgcatcattgggtgacttcattgttgtgaaaacatcatagagtatacttatgcaaacctagatggtatagcctactatatacctagactacattgcctgttggtcctcggctacaaacctgtacgcctgttcctgtgttgaatagtaagcaattataacacaatggtatttgtgtatataaacatatctaagcatagaaaagacacagtacaaatacagtattrtaatcttatggaaccagtgttattgaccaaaacatcatgtggcatgtggctatatttgaataccttgtgcctccaatgtctcatctatataacggggatgatgatagtcactgcttcctggaattgttgtgaggattcaataagttattttgtgtaagaaacagcttagcctgtgtagtgctggctcacaaaaagcactcaatgatgttagttcccttctgttgttttagtattaataacatcatcgtcatcatggctattattamcccctactgatagtgggcctatatatatgagacaattcagttatttttctttttatactttttatactgttgtatttattctacaaactactcactgagatttactaagtggcaaacaccgtactggcaatatattgggaataagactgtcttttgcccctcgagacatggcaatcttatggagaaaacaactggattaagtgccacgtagagtttataccgtgaacttctgcccagactttaccttgcccttgtttgctatgtggatggaatttctcagatgacatctgtagaccccaccgtggaatcctactgtccatggcatcctatgggatttcatatatctgtgcttaacccctgggagaattccatccctatgataaagagcaaagaaggtctattcagtttccacgagagcagagatcctccccatgccaagccagtgatgccaatgaagtggacttcagatgaaacagagaaggaggccctgaggtgtggctgggagttggaaaattccaactctggttcttgctttcttactaaccagctgtgtaacctaacaacctaactgatgaattatacttcttccctccaagcttagtttctaagctgccaagcagaggactgggaaatgtaaattcctgagacccactccagagaggaggcccagaggaatctgcattttcaacacttgaccctggtggctgagacaagggggtctgcggtcactggactctatcatccctaaggcccattcgagctatcattttttttttcaagctatcatttttatgaacctgttattttttggagagacatgttatatttgctatataacctctgttatattttggagggacatgttatatttgctatataattataaataccagtatctgtatttacctcctctcctttcctaggctctcaaatatcctgcatttcagtgtaaacatccacaccacagcactctttaaacactgaaaagtccagcttccttttctttttgatcccagtggtagaagaaaaaaaaagcaggcaaccctgaagactagattcagaacaatgactccaaacagagaatgagctgacgtgatattaatcagactataatttactaacacgctctcctcttgaaatgtgcattgccagcaattgtgtctttttttcccttccctgtactatgattacttcttgctcactttcatagtttccagttctatgtgggtattgagagtgagaacatttaataatacccgacagctaattaatccttactgtgtaatgaacctgttctgtttcagcgctgagagactcagcttttcaaagcaagaatgtgactatatctttcatagaagatagcctttcaaaatcaatctcattaccaaaagagcccatgagaagcatgtctatgaaaactatatcccctgctcaatatcataacttaacataaagcaataatcatggtaataatttaataataatgccttacagttgtaccatttctattacaagcgttttctcacctagtcccttgattcatcttcagaatagccaatgaggagggcaggacaggtatttagcaggtgaaaatgcgggtatctagcacttattgatcatttgccatataccatgcaccacgctgcactctctatctgcactagctacctcaaagggtgttaaaatgcccatttaacaaatgaggctccaagcagttaagtagaatacccaagatcatgcagggctgagaaccaagctttgatctactttgctctgggacctgagcccttcgatccgatgcagcctcagagagggaaaatgacttacccagtatccctcaactggttattccaggactgggactaaaaatcaagagttaggctcttaaacttagacatatacatctgggcatttgaaatgtttgtcttaataattagtgccattattattnnnnnnnnnnnnnnnnnnnnnnnnnnnnnnnnnnnnnnnnnnnnnnnnnnnnnnnnnnnnnnnnnnnnnnnnnnnnnnnnnnnnnnnnnnnnnnnnnnnnnnnnnnnnnnnnnnnnnnnnnnnnnnnnnnnnnnnnnnnnnnnnnnnnnnnnnnnnnnnnnnnnnnnnnnnnnnnnnnnnnnnnnnnnnnnnnnnnnnnnnnnnnnnnnnnnnnnnnnnnnnnnnnnnnnnnnnnnnnnnnnnnnnnnnnnnnnnnnnnnnnnnnnnnnnnnnnnnnnnnnnnnnnnnnnnnnnnnnnnnnnnnnnnnnnnnnnnnnnnnnnnnnnnnnnnnnnnnnnnnnnnnnnnnnnnnnnnnnnnnnnnnnnnnnnnntccctccccccaccactccccgctaccactgtccctgccacacacacacacacatatacacacacttacacattgactttccagatctctgacctcagcaatggagaaacaaaggccttgaggtccctatgcagttttacttcagaagaccctccatgcccttcttccccaacctcccgctgcccaggagtaacagacccttagagctctttctaggtaatgggaactcatcgttaaagtgacttaatcagcctgaaatggaagttgggtggtgagaaatcacacttagcatacttctccctgcagggtaagcctggaggtattctttttctcattattatcagctgccagtgccctgggaacctaggccaggttgaaatcggcatttttacctgttacaaatatgagctcccaagctgtgactggtcataaccttcccaaaatgaaggtgatgtgatgaatacaatttttcgaatggattttattcaaacatgccttacaacaaataaaaataattatagcaaccatctattgagtgcttactatgtgccaggtactagattttatatccttaatatcacatagtcctcataatatctctctcggttaggttctatttttctctccagatcatctgaagccatagcctcctcttcatttcagtctctgctcaagtgctacctatcaggccctcctagggtatcctatggaaaagagcacacccacatttcccattcattctctctgcccttttttgcttagctcttgtcactgtctagcattttcttcgctgtctgcctcctcttcacccccagtaaactgtaagctccatgaaagcagggactctgttttgttctctcctgcaactccggcacctggaacaatccatggcacatggtagactttcagtaaatatctgtcaagtgaacagattacacagaaatggaaaccgtgttttagagtagccaagaagtttgcccaaaatctcatggctagaaaacggaagagctggaattcaaacctagtccgcatgactccaaatctgatgtttttcatcttattctctacagctctgctttttaagaaaatattcctgaccatggggcaggaatgttttattattgattgatgtctctcagaacgttttatcaaagctctcttaacatacaagctagattttggtggggtggaaggcggggggtgagggctgcagagccttttctgccacagggtgggtacacaagggatgcactgatttttaaaggaaagatcaaatgacatcatattttacacaatggctgtttctgtcctcctgtcagcacaggacactcacagtctcatgaatctccagaactaaactttttccacttaaaatgaccctgatgttagcaaatcccattggtggcaatttggacacaaccataggtaccgtctaagacactggccaactggcattcagttttaccagctctgactcctgaatgaggacttcctgaggaccattgctaaaaggtcatgagattaggcaagttgactgaaaagactagctagttttcccaaaagagagatcctctgagtgaaacagtttacttgatttgtctcctagagaactgattaaacagactattggtttaggcttactaatagtagcaactgtgcatattcagcctttcttagtgacaggcttggggcgcagttgtttgatgtcctttctttatcatcattctgtgacttaggcatcctgcccattttagagatgtataaacagaggctcagaaaggtaagtactggcttaaggccttgcaaatagtaaacagcaaagccaagaatggagtccagagctccagagtctgtctgactccagagctcctgttcctcactattattaggactatttatggcatggcacttgatttaaacaacagtgaggatgacaacatctgatgtacaggacttttccatgtattttgtatctcagtgtctactatgctacacactgtactaagcatgcactacaaagtgtggctcttacaaagatgaatgaaacacactctctgtccttagggggcatggaggagacaagttacaagtggctgaaacataaaatgaattcaatcattggttcttaaatgactgtgtgcctcatggtcaccggggactctgcctagaacataatttctggcctcgtcactagggatgctggtttagaaggtttgagttggactctaagaaatgacatctttgacaaggcccctcccagaaaatgcccaggtgattctggtgcaggtggtccctggaccacactttgagaaatcatggagaaggataactgtcctgagaaaagcacagaagataaccatggcagttcagaagaagcacaaagggaggagacgggattaggaaggagtttccacgatgcatctggagggtagatgggctttcatgttgggcatctcatttgatgctcccaaggatcctttgaggcatacaggatrtgcattgccatttctttctttctagtggtgtggatgtgattatcccatttataaaagagggtaactggctctgaggggccaggtatctaatcaggatcacacagctagaaagaggcagaactgggaatgaagcacgttctgtctgtctatagcctttaggctttcttgctccctctgaggtacctatgtcgtaatactcattctgggaggagggggaaccccaggccagatttagtgcaaattattggttgagtcaggatcagcctttactgccccaggttttaattttcggtatatgctttgataactgaggcctcttaggacatagatacagccttcctctaccatttttaatttttttagacttcattttgtgatttattgctgctctgggggcttcayatccaatccttttatggtttcatctttcctttccttacatttgttgcatataacaatggcgtgtttagctactgcagtgaaaaatcaatcaagcctattccatattcacaggcttgcaatggcaccaacggctcctggattagattaactttgtgaatgtgtcattctagtatgggtaatttctcaaccttcgctctatcctccccatcctgcctcggcgggtggatattgagatctctcattgattgactgccctgaaagtgaatgctggcatgtgatgtgtgtaactcagtgggaygcacatactctgtgtttatgaaaataaataataatttctgttatcattattgattgccatcattatctgattgtatctgtcagtgtcatggggtttcagttatgggatcagaaagccctccacgagaatttarccactaccctcactgacaagcctttgtgttttgacatgtttcgcctttgggggatgagagtttgggatgtttctgttctgctcattggctaatatttttggctaatgttcagagacatgatgataattgagttccatgtcagccaaaggaactacttcagttggaattaaaagagaagctaacatttatgctaatgttccaagaacattttgcatgcattggctaatttaatcttcaagataaacctataacataggcactgatattatccttattgtagagatgtgatagctgaagccagggaagttaaggaacttgccttaggttagacggctagtaagtggtaatgcttggacttgagtgcacgtctttatgactctaaaacccaagctgctgtcctgcctcttgtactaaaatagaatgcctaatatatgcatctgaatattcagtgtaagccaaaacacatatgagtaagcaggggctggaaaacaacttttcarggagattgtaaaagttactggtgccttgggcacaggtgggctttctgtttaattttgggaaaaggcggggtaggaagggtacatgaaactaggtcatggcttaccaaagctggatgatcatcagactctgggaacatctaagtcatctccaaccaagtgaytcagaatctccaggagtgtggccaagacacccacccgtatttctcggccatattcttggccatcctgaagatcagatgggtttgagaccctttggcataatgatctctctactcaaaagyagagattctcagatktgatttttaaaatcccttcctttttcctcttgtctcctcctgcctcaaggttctgtatagatcagtctgaggacaacattattatcaaaatgtggttgcctttacactaagagagtgatttgatttagaatgagcatccatgatgattctgtgattgtgagctgttagtgccttttataactcaacttctttccccttcttactcctggtcaagtcatgggggacagccyacttagttgccagtgtgctataatagtaacactattgcagacatttattaagtatgtattatgtgccaggccttctgctaggcaggtaccatctcactatgcccagacggcagcctgtggagtgggtactaytgttattcccattttgcagatgaggacatttgatctagagagctrtagtgacatgctcatgtctatagctactaagtggcacagccatawttttaaaccaggttcaagctgactccagaataataactatactttcttacagaggttgggctgataaagtcacttgttgaagtgtttagcataatatcttgccatcaatagacgcttagtttatgttaatccctttctcctcttttttcccatcttgtcttttacctagagactaggagtttcaggaaagcatgatgaatatattgaaaagttcgaagtagtattacatctagagactarcaattcattatgctttgaatctgcctttgtactgactctcctacgctgccttgcattcagagtgtattcactgacaataaaatattttctttcatcccaaargtacctttgttatgctgcacttaccatgtagtaattagatccaacatagacgtaaatataagcagaaccctatacctggtttaggatcgagttctctttgtcttttgctcccaaaccctttggaaggtgtccatggcttcttgaatgtgataggaactaataaaggacacctcccatatgtacactcaatggcagtggcaagctgagacgtccactagtgtcagaaaaagaaaagaatcacattacagaagaaaatctggatgtttccatggcctctggtgccatttatcttgagattccctggccataaagcctgatagtgttacaggctctgacacattgtctttccctaaccttggttgttaaatggtctgaatttcagagatgtgggaaggttgacagggcagagttctggcctttttagggctttgcaagtaaggatcttgtcaccattccaaacctgattcacactgacccagataggattttctcaaatgagaagttattagagtgattctcccatcttttcatttaaagggctctctgtatacttttcaaaggaagtgaaaaatcaaggataattggatgattgaaggagagaatacttttattttctgaatttttcagatgaaattatctgaattataagcgtaatgggaaagacattcagcccacaccaggtcccatttctgaagtgtgagctcactgttgctagagcaatgggtgtgtstccrgtccccgaaactacacgtgcatgtgtgggtgcgtgcaggcatgtacatggcatacaacacccaagcagggcattgctcaagaatcctaaaaatgttaacaaagtaaagagctgacttttatttatttttcaactagactttactaatagaagatcaaaaatacatgcctagatccctttttgctactaggttatgcaaagaactaatttgaaatcagtagaggacttctagggcctctgctcattatgcattaggatttttgtagaaaataattagtgcaaatggatttggaatccaactcaatagaggacatgatcactttgatcctagtacgttgcaagccgggcttcgactgatgcattgatgtaagcattttaaataccagtccttaccagagaaaaatattttaaatatttccctaggggtagtgtgcatagcaagatactatcttgtctttgacgcataaaaacaagatcttggttggagaaaactacttacaagggtggtttcatgttaaaggagactgttttcaacagaaaaatatattttattctctggtttccttagaatggtttagcaacaaggaaaggaattttctacctgaaaggtgttaggtttgtgtttgtttgggtggaagaaggtgggtcatgctcttgtaatttgttgytgtgatcagatgagtttattttctttttaccagaaaactgttaaaagcagtggtacacacatgcatacacacactgtctcacacaaatgtctctggctcaagtaatataggaaaccctagcttaaacacagttaagcaaatttatttacttcaggatttctgggaactttttttttttaagtgtgtgcaacgctgtggttttttttattattattattatactttaagttttagggtacatgtgcacattgtgcaggttagtcacatatgtatacatgtgccatgctggtgcgctgcacccactaactcgtcatctagcattaggtatatctcccaatgctatccctccctccccaccccaccccacaacagtccccagagtgtgatattccccttcctgtgtccacgtgatctcattgtccaattcccacctatgagtgagaatatgcggtgtttggttttttgttcttgcgatagtttactgagaatgatgatttccaatttcatccatgtccctacaaaggacatgaactcatcattttttatggctgcatagtattccatggtgtatatgtgccacattttcttaatccagtctatcattgttggacatttgggttggttccaagtctttgctatcgtgaataatgccacaataaacataagtgtgcatgtgtctttatagcagcatgatttatagtcctttgggtatatacccagtaatgggatggctgggtcaaatgggatttctagttctagatccctgaggaatcgccacactgacttccacaatggttgaactagtttacagtcccaccaacagtgtaaaagtgttcctatttctccacatcctctccagcacctgttgtttcctgactttttaatgattgccattctaactggtgtgagatggtatctcattgtggttttgatttgcatttctctgatggccagtgatgatgagcattttttcatgtgttttttggctgcataaatgtcttcttttgagaagtgtctgttcatgtccttcgcccactttttgatggggttgtttgtttttttcttgtaaatttgtttgagttcattgtagattctggatattagccctttgtcagatgagtaggttgcgaaaattttctcccattttgtaggttgcctgttcactctgatggtagtttcttttgctgtgcagaagctctttagtttaattagatcccatttgtcaattttggcttttgttgccattgcttttggtgttttagacatgaagtccttgcccatgcctatgtcctgaatggtaatgcctaggttttcttctagggtttttatggttttaggtctaacgtttaagtctttaatccatcttgaattgatttttgtataaggtgtaaggaagggatccagtttcagctttctgcatatggctagccagttttcccagcaccatttattaaatagggaatcctttccccattgcttgtttttctcaggtttgtcaaagatcagatagttgtmgatatgcggcsttatttctgagggctstgttctgttccattgatctatatctctgttttggtaccagtaccatgctgttttggttactgtagccttgtagtatagtttgaagtcaggtagcgtgatgcctccagctttgttcttttggcttaggattgacttggcratgcgggctcttttttggttccacatgaactttaaagtagttttttccaattctgtgaagaaagtcattggtagcttgatggggatggcattgaatctataaattaccttgggcagtatggccattttcacgatattgattcttcctatccatgaggatggaatgttcttccatttgtttgtatcctattttatttcactgagcagtggtttgtagttctccttgaagaggtccttcacatcccttgtaagttggattcctaggtattttattctctttgaagcaattgtgaatgggagttcactcatgatttggctctctgtttgtctgttattggtgtataagaatgcttgtgatttttgtacattgaytttgtatcctgagactttgctgaagttgcttatcagcttaaggagattttgggctgagacaatggggttttctagatatacaatcatgtcatctgcaaacagggacaatttgacttcctcttttcctaattgaataccctttatttccttctcctgcctaattgccctggccagaacttccaacactatgttgaataggagtggtgagagagggcatccctgtcttgtgccagtttccaaagggaatgcttccagtttttgcccattcagtatgatattggctgtgggtttgtcatagatagctcttattattttgaaatacgtcccatcaatacctaatttattgagagtttttagcatgaagtgttgttgaattttgtcaaaggctttttctgcatctattgagataagcatgtggtttttgtctttggctctgtttatatgctggattacatttattgatttgcgtatattgagccagccttgcatcccagggatgaagcccacttgatcatggtggataagctttttgaggtgctgctggattcgttttgccagtattttattgaggatttttgcatcaatgttctcttaaccaccatgttacctggcctcccawcagcaatggcttttaaccctctgagccatgggggctttatcctactttagagacttcttgaagcagaaaagaaccattagccaatccaaaacaaatcactgttcacaaatgtttccttctgtctaacctaacattaatcttacctgccacttatttaaaaaggattccatacatatagtcatgatggacatgtatggtctctgcyctcatggggcttgtaatccagtgactaggaatctttggtttgaaaatagtcacarcgggccaggagtggtggtacacgcctgtaatcccagcactttgggaggctggggtgggtggatcgcttgagctcaggagttcaagactagcctgggcaacatggtgaaaccctagctctacaaaaaatacaatagttagccaggcatggtggtgcacacttgcagtcccaactacttgagaggctacagtgggagaactacttgagcctggtgcagtgagccgagatcaggccactgcactccagcctgagtgacagagtgagaccctgtctcagacagagggagggagggagggagggagggatgagttttttaaaaagtataagatcatagcatgataccattaatgtgaaaaataaagcaatcctgaaccgcaaacaaacaaacaaaaaaaaatggtgacggcatgtacttcatttgcccctgcctaacattacagtcaatcccattgtgtatttagaaactgcctgagttctttctcaacattttcttctctactctgtgatctcacttcctctcattattttcagggagtgagagttctgcaacattcaattaaataaggacactgactatttaatgcgaaaacatccagatacaaagcgaaaactctgtccaattatcttgccagttcaaaaccaaatatacagatgtttagaaacttctgaaagcttgaatttttaaatcataggctctccaaattcaaagagcatctaagaaaagcatcctatgagggaaacataagatcgtcaaagcagacaaagcagacaacaaagataggagttcaggagttataaggttagagattaagatagaagtgacaaaacaaagccacacttggttatcattattccttcccatactaaaatcctttacgcagatggactcagaggtgaccgccacaccagtcccaattagatatgccgttgcactacttgacggtcaaaccaattaagaacataagcaccacctcggtttcttgctatgcattttaaaaactaattccacaagcacttattaagtccctactgtaagccaggtactatgattagtcctggagttatagaagtgaacatgaaagatatggttcctgccttcatggagctagccatctctttgggttggaaaaagcatgcataaaatgctcctaatgtaaagccgacagtgtaatggggcctctagaggaaaggtgaatggtgtacaggagagcagatgatggggagaatttgatcttttcagggagagcagaggataatttcctgagcaattaatatttaaaccacagcaggaggaaagtaagaagaggagcagaaagaatgttytaggcagaggcggtgacatgcacaaagcccatcaggtaggaggyagcacagaaaaacacagtgtggaaggagggcccaggtggctgaagctgagtgcaggggatgtgtggtaccagtaagatgcaggtggtgaggcagcttatggccagatcatgctgggcaccataggtcttgttaaggaactcgcttttttccccatgagcaatgcaagccctcgcttctctgtacaggtcattttttggaacagccctactttgcccagatagctaaatgttctgcactgaagacaggatgttcaccaacatggaaaagccgcctagatagttcctggcagaagagtttaaatttaggaagtaaatgacattttgtcagtttggccatgttgccctctagcccccagctgccattgtttcaatacatgtcagggcatggcctccaccgggtttctccaatatcaaggcgtcctccctccaaggtgaatccgcccatgagtgattgaattgtttggagggtcatagaacctgacagctccctattacacaaaggaaaagataagcttccgattagtcctggggcaggaggaagccaagatagagtgcacctgtcagaactgcttacgacatataaatcattacctcaattttctgtgcaagcagtggrccagagagagagagagagaagtgactgaggttggttaacagtgcagaaccataaaaaagagctgctgctttcctccaaagcaggatttcctctgctgtccatgcaaagaaaactgagccccatgcccagaggaacgacaaagacaaatgcccactggctccagaaaggggcaatttgtttctatggcatttgctaacagcatttactgctaatctaacaatagcagccaccaaggctttcccagactttaacagggagcatgcttaatattgcacttgctatatgtttcatcctagatttctctaccttgtaattgccataacaatcatggttgttattgttgccattttcctttcattcactgggcaaaaatctctgagacagaccaattgcaactaacctgctatcccacagtccaggataccagggtatttatagcggggtgagggggaacataaaaacaaagattgaatgaaagatagcaagtcagaagatgctcaataaagattcaaaagcttaagttgtttgggcaatactcagattttcatcacaatttatgttgtataaaataccaagtatcggcggggtgcagtggctcacacctgtaatcacagcactttaggaggctgaggcgggtggatcaygaggtcaggagattgaaaccatcctggccaacatggtgaaatcccrtctctactaaaaatacaaaaattagctgggtgtggtggcgcatgcctgtaatcccagctacttggaggctgaggtgcgagaatcacttgaacccaggaggtggaggttgcagtgagctgagatcrtgccactgaactccagcctggcaacagagcgagactccatctctaataataataacaataataataatataataccaccaagtatctagctgaatgtgaaagcctgaaagatcctagttggagaagygccaacactgagtaactactaacttgtacagcaaagctcaagaaatactaagtcttgtgcttcttctgggctactctaaacagagtggataacactttgggggagactggttcattcttcagaatagatgtaaactaagttcccagaacttttgagagggagtttggcacctacattgaaagggagccacatgtttgtccagcccagatattcctgctgccaatgatggaggagacattttattccaccttggtgtattttaaagggaagcatattctcaaaattacaacacaacccaagatgtatgagctgtcaattacattccttaggaccagaagggaaatatatgaacagacccaaaaagtgcatcaagacagtacacaaagggatgtaggagctgagggaatgagtcacatggatactttaaaacagaataattgttygttcaaaattgtgagcaaaatgttcttactgccaggagaartgttgggcagacttatttctacttattgtgtaataggggcagaaatcccatagttgaaatcgtcatgggagagagtctaggkctttagagtgacaactccaggttcatatcctagctctgtctttgtatgactctgagccttttacttaagctctcaccatatcagttttatcatcaacmaagtagggataatattatttaaagtatctcataggacttgttatcagaaaaaaatattagcacagtatctgrcttttagtactaaccattcaataatatgtagctagctccaagatggaaatcaggaatgctcagaacagagagataactgggagactccagttgctacttttggatggaagaatacatttataaaaggacagataagagggaagagacttctaacttggtcgtatggtcagagtttatttrcctaagacatactgacctcaacatgtaagacttcttagtgaatatttctatcccttgctggaagaaaattcccctgagaatgggaaactgcaagtgcagataagatgatgatgaaaaaaatcstcagtttgagattctgtggataaagggaggtaagtgagttcamcctctaatgcctgtttttgaaagctcagtaaactttcaagttctcactgagctaagaaaggttacatgctcaggagtcactcctttctagggaagaagctrcagttaagtctcatgtgaggggcctctgggctgatggcaggtacagttgtctggaaagctgttaaagtcaagggtctagttttgaatcttcctttagattctctgcttcaatcattagtcaccaaaaatgcagaattctcagcctgggccatgcatttcccctcaggttaaaggatccactatygaatattagactttatgtctattttctagtagcaataaaaaaaaatcttctaaataggttacttttccttagataaaaacaaacccaaaaaaagttctgttgatattttctcctttgtcttgaccactaagggaaaaaaataatcttttcttccagcacaagttcattattaacccagttaacgtttgcaaattaagatacaayattagacatttgtactttacagaaattttcctcttaattggactgctttcctataaaaatcatcccgccagcatctgtggtaagatagattctggaaaaacaatgtgccatgccaaattatcaggtagaattagattgctctatatttctgtttgataacaacactgtgcctttgcataattcttgctgattatcagaaggaaaaaaccataactcagacagatgagctttattggcaytggtcccttctaggaaagaaagaaaaatgtatgaacagaagcatttgcaagtgccatatatgttgagagaataaaattccaaacagtctgtaaacttagcttccctgcaaccttaaaaaataaaaatgcctccctatatttggtgtcayatctcaggatctgggtttatcccattttctatatttcaagacaaaaaaatgtacatgcctataratatatctagaatagaatgtcattttaaactagagagttctcgtgaaggaaaaaataaatcgtcggagagagttgtgagtcagagtctttatagaacttggaaattaacaagaaagtgttaaatgaatactcaaatagaacagctgcatatactacttatagagggagggaggttrgtctgccatctttatttgtttgcatgctgaaccaaactatggtgtccattttctctagctgtctttatccatctcagtttctgcaagcagttttctgtgwtgggatagataatgtaactttaatctggtacatgcgaacaaagtctgcttaccctttatgtgtctttcaagcattccccccacccccatgtctccagcagtatccttgagagctatttttttgcctctaattccagactctacccctttctctaggaaaatccacagaaaccctttgagccccttccctgagcaaattcaggacttctctgactctactcaagactcaggaatatttagtctctgtttcctgtaccccaaacagcttcagatgtctgtcagtacccaggggcaattgtgtggtttgatccttgttcaacatcaaaaaccaatgctttgccttttraggactcgaaaacaagaatgttgcttcataatcttcttcccctgggaaatttacatctcctcttgcctccttggatgtctcccattgtgaaagcagcagcaaataattttgcttccctatgtctttctttttggcacattcttacttgtcgatcaataaattaccccctgccaagctccagcagcctggcttccgtcttcaccacttatattctccttttgtgtttaaaaaagagctcattatttttctcttaacctctagtgaaatattccctttattctctccgttttgcttatcgtttaacttaattcttagtccaaccatccccatctgtacctgtccccgagtcctccacattttcctctttaataaccagaagttaatgagaccacccttggagtcacatgctccttttctgatcacaccaggataagcaaatgggatttaaatagcaatagcaggtaatacaatagaagaaaagccataggcagggattcagccagtcaggtaaaacagaggatgtagttttgtgctctctgggatgtataatgtctccttttacagctgtgcctcagttttctcatctgagaagtgaagtcagccgtcacttatagtatctgcttcatgcagtacttgtgaggattagatgggataaattacacaatgtgtttgatggagtggcacacagaaagcccacagtaagtattaggcactactgtgtcatgattataggaagcaaatgtaaaagacaatcctaccctttaccaggtttgaaagctgcagttacatatggttgagagacagaggccttcagtgtccagmcaggaatcccagctctatttgtttatgcaaataactcatcaaacccaccatttagcggttcttaatggggagaaggtatgtgaaataacactggacaacctaaggacagagacgtgtttttctattctcaagacccaatattttgcctgacacagtacattttctataaatacttaaaatcaacatacatgaatcacctaacatactaccttkgtgtatatcattgtgtttcccaaagtctaggatatgtgtttctgttgatgtaagacacaactgtaagtaatattgaatcacataattgaggaagttattccctcctttcttgctttataaattattctgatgacatcaagcccaaagtctcagtttgatgttaatattttttaacctctctcataacacttacaaatcttgatttttttaaactgagaactgaccttacactctgtcttttcagatgactctatctggctagaatttaaaaacaatttttattgtatttatttttataattttcttcttttttgacaattcatagaaaactggttttccatgtgttacagtgtaaagttccctatcaaaataaagttagttaactaaaagcaaatcagtttaaagaaaatactaagtgggccgggtgcagtggctcatgcctataatcccagtactttaggaggccaggcatgcggatcgcttgaagtcaggagttcgagaccagcctggctgacatgatgaaaccccgtctccactaaaaatataaaaattagccaggcctggtggcacatgcatgtagtcccagctactcagaaggctaaaacaagagaattgtttgaacccgggaggcggaggttgcagtgagccgacattgcgccactgcactgcaacctgggtcacagagcaagattctgtctcaataaataaataaataaataaataaataaataaataaataatagtacacataaaacagataagaaaatctgaaggggtactaaaaggactgagttttagaaaacactattctaattttccctcaattatttggagagctttaaaaaaaaatcaggatacctaagcctcacctcagaccaactgagttcatctcgaagtctgtattttctattgctctttaagaactctcaggtgattctgatttttttaaaagccagtttaggaatctctgaatgagaaaaatctgattttgtttttaaattcttttaaattcattcaacaaacatttgttgaatatytgttctgtgtaatgtcctgtgtcctggatgccaaggatatgatggaaaataatacagatactgtgttcactgagtttttgcctgcttatgagctttactcctatgctaatcacaacctgaaagatataaaagtgtcataattttgtgaacattttttggttatgattctgacattgagtttactgcagagagaaacctgaagctagccttattttccctctaatacaagagraattcatgtttaaagatctagataatccataaatcttctttatactggaaatatagtaacgtcaccagaaaaaaatgccatggtattgaccattctctgtaaggttcagatggtatttgaatcctagttctgctgatcccgaggacctcatgacttattatgtcatttaacctcactgagcctcagctctttaaagtctgtaaaatatgtatggtatcaactatgcaggatttttgtgaagcttaaaggaggtaacgtatgtaaagcatacaggggacagtaagcactttttaaagggtcattaaagtggcagttttacagaggttaggttccaaagtcgccccataaagcaagcaccaggtttggtaaaaatactcttgaaaaatcccataaatcacccataagatttgtttgtttttattaactctatatagaataatatatacatatawatatataggatataaagaataatgtagaatataaactatgcaaacaatatgaggggccatttgtgaaaaatatacttccttaaaccttagtaacttattcaacatcccacgatgctcagagatgagatccacccagaccaytggtctraagaaagagcarattaactcccctcccccatctcatactccctgggacctctgacccattatttaaatttgcttctttccttttttcatattattctaagcatatatagttgaattcacatattaaatgcatatgtgatacaattcagtacataattgtattcctagattagaggcaaaataaatactaaatagaatgtaaaataggtggaagtcaggtaccataatttgatgttcaactacagtgattttaaatgaactgcacatttgttctcttttccctctctatgattagttttcccttctttttaggttttcctttcctttctgttagcctcagagcttgatggttttttaaaaaggtcctctgctttggctattggagaaaataatttatattccttccttcaggaagaaaatgaattaatggagtctacagtcctcaaaggcaataacctcygtccatgccacccgtgccctgcttccttccattctatggcaatgcagttcacaacatttgggggcaaagaggtcagaaagcagtacagaaatggatgacaaccttgaaaacttgaagggaatagataggattcagagttctaaaaggacagagcatagtgctgggacatgtggggagaaaactcaacagttcatgtgtagaaagtggaaacacagccaaagtaaagttgcagaaaaaagatctcagggttttagtgaataacatgaaagtgttacttaaaagtagaccaggcataagtcaccccaaatagtgtgttgttccagaagaagtaattacgtaattttcttcagttcaggataaattcttactctaatatggtttgaggatctagtttttaaaaagaatgtgattgccatgaaaagggctcatagcacttctaagattggcagggaagtggggggaaattatgagggagaattacataaatgggttcattgcctaaagaagattgaaaggcaattataacattccaaacaaaataaaatttctagctagggaatagtgaccacttgtgctttgccctccttatacaagacactgttagaaatctagattaaaacactaggagctcaagttacaaaatgattccaggagggttgtcaaaatagtgacaggttgaagaaggaagctagagaatcgttttctttaggactcttaaatgtatccaattattcttcatcacagtgggtacatataagaaaggaggaatgagatgagctctgttaactgcagcagtcaggttctgggatgatttagggatatggatgggtggatagaagtgaggtgaacaaaggaatatcctaggaaaaggtgtggatgtgattacgaatatgggatgtccaagggacaaggatgagacccaattacagggctctgatgcttccttcttcccactttgtttctctgcctgcttgtttccttctctcctttctgatagcactgagcaattgggctgaaagtgttataaaatctgggctggagtgactcattggaggccatattcagactggtaaacagatgaagtcattggtaaaaagaggagaaagggccagacatgcagagagaaggcgtttaagagaccaggtggcccctaagcaagacagacaaagagagaaacagaaaaacaaagcacatttttcgaggttcctaacagcttgccaagtccctgttctatttcatatgctccatttcagtctygatgatctgtaatatttttctgtacttcagtaatccttttgggttttttttttaagtaagtttaggaaggtttctgttcttaaaatctaaagagcccagactagaatattacttcacctccctgctttcttctttttctccattcttatttctgaaagcttggcatctttttattctatagagtcttatttctgcttcttttctcagatactctcttctcttgctcatcccatcctgtttactttttatctcctttgtgtgtgtgtgtgtgtgtgtgtgtgtgtgtgtgtgtgcacaygcctattcctgctgtctctccttggaaccagcaaaccttcttctctggagttatttcatcttcatccacttcatataacaatttattttctagaatcactacattcaaattcagctcagccattgaggaagagaagatttacggtctctcccaccctcatgcctgaattcagaacattgccattgtcttctccacctccctaactcatttgttcatcttctgaccaatagcctttattagacagaaaaatccaattatccagaatctactgttcagtagattcctaccaccatctcccacattcacacacataccatttcctacctctgcattttaagagaaagcaacagatctaggaggagaggttaggaaatcacattcaagttcaaaacagtcaaatagtatagaatagattcaacttggtatattacttcatttgaaaaaagacctgggaattttacttgatgayatgatatggacgattacaaagggaagtctgttttaacatacagaaacagaaagcacatgtcttctttggaataataaatgcctgtgctggtagattgtgttcagtgaagcaaagcatttgtggaggccaagtggcctgagctcaccattattgaggtgtgaagattggaggctgagtcttggtataatctatgaaagtggagaggagatgggttgagagctgtcctcaagtatctgaagtgctgttgtgcaaagaaagggaatgggctgactccctgtccactctgggaacaggtggacagttcagtaaagcagatattaagctcacaggaatgagaaagttgtgctcattaaagatgcttaagttttcccaagaagagtccagtgcagactgaagaatcttaagaatcctgccctgacaaaacattaaacatgatgtcttcccttccttttcttacaaaagaaatgcttgtttatagcatccagtcaaataatactatatttacggttccatatctcagggtaactaaggttgctagtttggtgtatgtctttccatacctttctctgtatctatgaatacrtatattaacattaatgaatgaacagatatgactttgttttgtttacaaaactgagatcacactagacatattactcagtaatatacacatccctccaggccaatttaccttccttgaaagagctgcagatattctaaagcatagrtaagctatgacattaaatcatttctccattgatagatattcacattgtttctaaattttgctataactaacaatgctacaatacgtgttctcagacatacagccataccttgttttattacatttcgctttattgtgcttcacagatagtatgttttttacaagttaaaggtttgtagcaacactgcaacaagcaaatctattagcaccatttttcgagcagcatgtgctcatttcatgtctctgtgccacattttggtaattcttgtaatatttcaaatgttttcattattatccttgttatagagatctgtgatcattaatctctgatgttaatgttggaattcttatggggtgttttgggtttctcattttaaatcaaaagctagaaatgattaagcttagtgaggaagacatgtcgaaagccaacacaggcccaacactgggcctcttgtgccaaagagttagccargttgtgaatgcaaaggaaaagttcttggaggaaattaaaaatgctacttcagagagcacacaaatgataagaatgcaaaataaccttcttgctgacatagagaaggtttgagtggtatggatagaagatcaaaccagccacaacatttccttaagccgaagtctaacctagagcaaggctctctcttttgttctatgaaggctgacagaggggaggaagctgcagaataaaaaatttggaagctagcaraggttggttcatgaggtgtaagaagccatctccataaaataaaagtacaacatgaagcagcaagtgctgatgtagaagctgcagaaagctatccagaagatctagctaagatcatgggtggcggtggctacactaaacaacagagcttcagtgtagacaagagagccttatgttggaagaagatccaatctaggactttcatagctggagagaagtcaatagctrtcttcaaagcttcaaaggataasctgaccctttcagtaggggctaatgcagctggtgactttaagttgaagctaatgttcacttaccattctgaaagtcstggggcccttaagaattacactaaatctattctgcctgtgctctaaatggaacagcaaagcctgaatgagagcacatctgtttacagcatggtttactgtatattttaaacccactgttgagacctactgcctagaaaaccagatttatttcaaaatattactgctcattgacaatgcacctagtcacccaagagctctgatggagaagtacaaggagattaatgttttccggcctgctaacaacatccattctgcagcccacagattaaggagtcatttttgagaaatattatttgagaaatacgttttgaaaggctatcgctaccaaaaaatagttcctctgatggatctgaacaaagtaaattgaacatcttctgggacgcactcaccattcattctaggtgccattaagaacattcatgatttaaggaaggaggtcaaaatatcaacattaataggagtttggaaacacttgattccaaccctcgtagatgactttgaggggctcaagacttcagtggaggaagtcactgcagttgtggtggaaatagaaaaaaaaaaaaactagaactaaaaatggagcctgaagatgggtcttaattgctgcagcctcatggtaaaattttaacagatgaggaattgcttcttatggataagcaaagagtggtttattgaggtgggatctactctgatgaagatgctgtgaatcttgttgaaatgacaacaaaggatttagaatatcacgtcaatattaataaagctgtgttaataaagttaataaagcagcaacagtgcttgagcggattgtctctaattttgaaagaagttctgtggataaagtgctgtcaaacaccataatatgctacagagaaatctttcatgaaaggaagagtcgatcgatatggcaaacttcattgttgtcttttaaaaattgcaacagccagccaggcgyggtggctcatgcctgtaatcccagcactttgggagtccaaggtgggtggatcacaagttcaggagttcaagaccagcctggccaagatggtgaaaccccatctctactaaaaatacaaaaattacccaggcgtggtggcacgtgactgtaatcccagctgctcgggaggctgaggcagaaaattgcttaaacccgggaggcagaggttgcagtgagtcaagatcatgccactatactccatcctggatgacagagcaagattccatctcaaaaaataataataaataaataaataataaaataaaataaattgcaacagccacctcaaccttcagcaactaccaccctgatcaatcagcatccatcaacattgagtcaagaccatctacccgcaaaaagattatgattcacagaaggctcagatgatcattagtattatttagcaaaaagtattttttacttcaggyatgtaccttgttgttttaaacataatgctattgtacacttaatagactacagtatagtataagcataactttatatacactgggaaaccaaaaaaatttgtccaactttattgcaatattcactttattgtggtgttctggaactgaacttgcagtatctctgggacatgcctggtatattgttatttacggatgtttttataggatggatttcattaaagtaaggtttactaagttaaaagatgtatatgttattttaacagctacttccagattaccttctgaaaatcttgtkgtagtttatgcttccatgagtaaatgcttgttgtttattccatctccaggatagaatgttatatttttctttttatacttccaactgagaggcagcatagtatagtggtttagagttaggactcccttggctagaaatactgagtacctgtctcagctccagcaagtactagttgtgtacttttagctaggacacattactgctttgtgtctcagatatgctgatctgtaaaaagaggatgatatgaatacctacctcataaaattgttatgagtgtaaatgaattaatagttttaagacttataacagtgactggcatagagtaaattctttatgcataaaggttaaaaattaaaagattcatcagattaatcttttataagattaaagatttwaaaaatcttaatttacatctctttactaatgagttgggcatatttctatctatgtcttggtcattttcttttccctttttctgaatttttcattcctatttttgcccatatttttactgagctgtttgtctttttactaattttcatgaactctttgtatatcataaatagtaacccttttcctgtcatttttatcttccataagtgattttctttttatkattataaaaataatcagaatttttaaaattaacataaaccttcaatcagtatagaactataaaaatcattttaaacccatagtcttagtctattttgtgtttgtataatagaataccmcagactgggtaatttataaagaaaagaaatttatttctcacagtattagaggctggaaagttcaatatcaaggtgccagcatcttgtgagagtcttcatgcaacatcaccccatggcagaagcagaagggcaaaagagcaccccggggaggcaggcatcagtttttaacaagaggtcttatttgattctgatgtgcagccaaggttgggaatcagacaatgtaaccctgaaatgtcaatcttaagtcaatttgtttctaaatcaaagtgttgctagtaattactactgccatctgttggtgggaggyagaactgacattctatggatatctatgaaaggccatgttttttaaattcttagaaatgcatctttgtgtttatccagacctttttaatgtaaatgacttctcaggtaacttccagctgyaagattcttgaagttaatatcaaatttgtatttatcttcttggttctgtatattccacrgtaataaatgacagaatgcagtgtgatacttcggaggcttggtcaatcctcggtgatcaaagattcagtgatatttatcctaatagtaggaaaaagtaatacttcatcaataacagttaaaaaacagcaaaaacaatttttgtgcttaatcctaaccaaactaaccaaaaattaaaccaccgcctctcccaatcccactctccccagctataaatgttaattgaaattttcctctactggggtattttaagatgtctctttttttcttgtggcattacacaatgtaaaacatcaaaggaaataacaggaaaggcagtgaacagggaaacacactttgagaaatagtgatattggcataaaaagtaagtgtctggggaaaaaataagataaaactggcagaattacaggtttctgcatgagttggtaattagcgagtttatcttctgagaaaaaggtatctttcctctcctttttatagtcaggccaaaagaagtcartgacacaaagagcatgaaattttttgccatgcaaaccatttttgaygcactgaatttaaaatatatacattaattccccaggcagcttttatgcatttattattcttacagctggccataggggataagtctttcaaatatatattttatatgtctttgaaatatagatattaaacatagatattttatatatttatgtatatatgtatatatctttgtatatgaagtaccttttaatccaaaacgtcttcatgaactgaaacttattgctggtctattgtagaagttagtacttggtttcttctatgcaccctagatttggactgtgttccaggagagtgtccttaagacttgggtttttcagccttggaactgttgacattttaagctagataattttttgtttcaggaggagctaccttgttcatcaaaatgagtttagctacctccctagctcctgcacacggatgccagtaacatcccctctattgtggcaaccaaaaatacctccagacactgcccagtggcaaaatcgctcctaattgagaaacactgatttagaggattgaatgcttatggccctgctttcgtgggatgaattgtcatttctttaaaaacaacttatctgattcctcagtctaagttagagcccctatttctttctctcatgaaacaatatacatctctttgtagcatcagtgacagtttataacaatgtatttacttagagacattaatgtctttcttccctgttagactttaaattctaccccttaatctcttttgttcactgtgtacacatactacctaatacagtgattggcacttaataaatgtttgtcaaatgaaagaatataattctaagatatttaatgacctgaaacacaaagcctgacttggttcaaagaggtttttcttctcaggcttatttcaatctgtatgacaaagccagtaaaagaagaaattagggacatattgaggctgttgaagggtgtgagcagggaaatctcaaaattatattatttggataggattcccagggggttttggcggggtgctggtgagtggcagtttcattctggaaacaacagctctgatatgtcgctgtaagccagagccagcctatcactcctgctttctgaacaccatccaccattgatccatggaagaaacaggttttttgaccaaagygaggtttaacgctccactaattctttgagggaaaatgccccaggaccaggagaaatatatctatagaaaataaacatcagtatagatagcacaagaggcctttaaatgcttcttttcacgtttttaaaaaatggaattaagatgcatattttttaaaatgaaaaatgactggcattcttcctactgaaaatgaaaagtaatttaatttgttagtggtttattttatttgacagtcattgtacatactctatttggtttgttacactgaattayccttcaataatgggtacacacaatgccagactctgccccccaggttgctttgataattggatgagcgtccatattgttcaagattttcatgacaatgaggacggagctatttgcaaaactcctaaccaggagagctttcagctttttaaattctcaataaagttaatctctatccaatgaccaatcattcccctggctacttttcctaagcaaccttaacattatataatcatgactgaattcccttggtggatggaagagatgctaaaacctcatagtcaatatagaaaagtcagaaaatcttccccaagcaatctttcagaatggaccatttttctacaattggaagttaatggtaagaatgctaataatagctaccataggggctggagccagacagctgacatccagggacaattctaccccttggcaacaatatgaccttgggcaaacttcatgacctgtgttgcttcaggagttacatccataaaatgacaatgatcttagtacctacttcataaggccattgtgaagattcaataacatgatgtgcataaatgattagcacaatcctggcacaaatcatgtctccataaatgtttcttcgttagatggtatgtgtcaatcgtcrtgctaagttctcytaacagtgctactgaaaatgttacatatccccaacrttaaggaggggaatactgataycaagaaagactaagcagcaaacccaaggccacatggttggtaattagcacagccaggatccaagcccaagtccacataactctaaaaaccctcttataccattcaaattgtgtgcttgtgtacctccagaagaattttgaatagctatgtactttcctgagctttttaaagtaggyaactaagcatttccattgtaatgttaaataattgcagaaaatgtgatttcaaagtattttaaacattggcagtttaaaataaagcttttatatcatcttttggttgcatccagtgggatttaaatacctcattactggatactcaccaatacccactaaaagaatatgtgaacaaattttttttaagtcaaaagcttcatattattattttttcttcttcaaacatctatttttattgcatttcccctaaatcatgttaaaaggttttttgatcatttctatgacaaatatagatgtaaatagactttttcttttatgaatatatgactgtaagactttaaaattatcttctgggtttagttgttgctttgactattaatagaacacaatacatcaaaacarcataaacatataattctgacaaatgatgaataaatataaaaagtaacattttattagaaatgcatctcataatgatctggggatgggggcgtctatgcggccttgattaaaagtatcatgcaaatgtccctctcaggaatgtttatgaattgcatagtacaccttggtaagattcaggataagttaaagtacatcttctatatctttcttttgaaaaaggaagaaggagaacctaggctgtgggtactcctgagaagatctgattttaggaaggagaacatggaagttaggaaygaagaaatgaatttccttaaaactttttcacatagttcttaggaagtcatccaccactgctgttcctaggggaatggtattctcattgaagacggctgctctgtaccactgagctgtattctttggaattaggatatttataggaggacccaatgctctcccatttttatgacaacttactccctcttccttgaaaatgaagtctgggtcccagttgttactaaaaagtcatgaaggctgtttcttgaaggaagcccagtgaaaaggcaaggtgataaatttgaagcgaggccggaatctggaatttccaagcccctctgagagatttaccgtctagtgcctcaagatgggataacatattcaccctcagattctccactgggcctcaaacctgtggtcccagagcaccagggtcagggtttccgtatacctaggatgaggtggacacccaggacttccgctctcatctttgtcttttctaggtcaarcagccttcccaaaaggggtggtttgagtaagaagaaggagggggttacatattgcctacctcctctaagcttctcaaggatactctgtgtggcaacttctcagcatgtagtagatgctcaataaatgtttgttgaaggccttatctggggccagtgtgtggttataaccttcctatgtgcacttcctaattgatgatacagaacccaccaaaccccatgaccttgatatatactgtcagtctaaatgtaatctcaattatttggagaggggaatggggagcatctgttgaacactaacaaggagatatggagcaagtgtggatttaaattgacagcaattttttcaaaagaccccataatgttgattatgttgtacgtatcataatgagctggggatggggtcgtctatggggccttgattaaaagtatcatgcaaatgtcccctctcagaagtgtttatgaattgcatagtacaccttagtaagattcaggataagttaaggtacattttctatatctttcttttgcaaaagtaaggagaacctaccctgtgggtactcctgagatctgattttaggaaggagaatgtggatgctccttccataacataattgattatgcttgtaygtaacaagcaatggtattcaaaggtttrtctgttcacctcaatgagatttgacctagagttactaaacagctaaaatccatccacatcctacagacagacatctctcttttcttccttctccatgacttcatcttttctgttctttatctcctatctggccatctcttctctcttctccgagtcttgccttgaatctgtcaatttactgagctrctggaggttgccatggtaaacacagctgttgttttttctctgtgaaaaactccyctcatgaaggcgcattgaggggagtcctccccatggyctccccttgctgtgccttttcacatatgttttttaaagtggaggcttcaggggcttcctgttttctagggctctactctgctttaattgcatgtctctgaagcaaggcactgtgacccgccaacccccacttaggtgtcatggaagattgtgaagaatcgctggtgtggtcaccaaataagccwaatgacagcaacattcattttgttagtaaatgcgttctgggaagtkaaagatgatctggtatttcccaagaggagaggcgggaaagataataagaacctgagggaggaagactcaaagcgggtgagcagagacagaaggaatggtgagggaggatagagtcccatatcaggcagctactcacaggtagccacacctccctgagctttcctcacccgcacagtgaaggtggtgatccggccctgactactgatccaacatcttctccaactgccatgcttccttactcactcctctccagccataaaagctctttgctgacaggtacatggcacgtgcctgtagtcagctactcaggaggctgaggcaggaagatcactggagcctaggagtcctgggctgtagtgccctatgctgttaggatgtccacactaagttcacattaatatggtggcctcccgggagtgagggaccaccaggctgcctaaggaggggttaacctacccaggtcagaaacagaacaagtgaaaactcccgtattgatcagtagtgggatcgtgcctgtgaatcaccagtgcactccagcctgggcaacatagcaagaccccatttcttacttaaaaaaaaaaaaagctctttgctattgttcctcctgtactctgagcacactccaacctcagtgcctttgcatttcctgttccccctggctggaatgctcctccccacattgctgcatggctccccctctcacttcattcaggtctctgttcataccccactccctcagagaggccttctatgaccaccccacctcaaagagcatacctctcgcttgctagccccttacccaactcaggttttcctcatgtacacatacacacaagaacttmtgtaccacagagagttcactgttgtggcaccggtccctagaatatgtctgctattgaggagggatttaataagtatttgttgaatgaataactaaatcactgacytcaycccagaagcacagttacccatckttatgtgtatactttgctgtctctcctctgagtttgcacactgctggtccctctgactgaagcccagttccctcccctccctaccccccacctctctttggggacctcccacccacccttcaagccctgcctagcttggtagtcttctcctttctgaggtctgccttgggatccccaggcaggacccgtttggttcatacggcctgggcagtgcctgatgacctccatggcagcgtgatcgccctcgctgaaagatctatttacttgtctgcctcccaagcatctgagtgtgccttaagcgactaagggtatagactcctgagtcaaggagtggcaggagtgccaggcctgagtactcgccctgcctcagactcactgtgagccttcagacaacttcacctttctgcctcagctttctcatctgtgcaatagggattgtaacatctaccaagttaatcataggatagcgatgaaaattcactgaggaactgctgaagtgtttaaaaaactctgagcagtcagttggggaagaggatagactgaaggctgtgcgatttgaggtgggatggtcacggaaggcctccctgagggggtgacatttgagcagggactgattgaagtgagcggggaagccgtgccactctctgggggggaagagcttcccaggaatattacaactgaaatatatctctgtaagctttattgcagattagattcaggctgctcttttggggcttgggacattattcggttgatattctaatataatactgggtgtccaggcaagacacagkgctgggatgtgcrtcctttgaaagcagcctaggagaatgagctgaaactcaaccagggtcagagaggagggtgaagcacctgaatcgggggacatcactgaattccagctgctcaacacagaaccacctgcagacaggccaaggactgaccgctcagagggccaaggactgaccactgttcactcagcacatcccttgtctccgccttgatcctagccccatcaatkactctgccaacatggctcagacaaggtttgaactgagttaagaygtcctggcctgatctgaattttgtctggctctgcttttgtcatttggcaaaagggcattctggtcctgtggaggatggctcaggcagatggtgtgtgggagcagaagtctgggacaggaagcagagacctaggctgtgcaagcaaccccggaagggtgaccatggacaaggtgcttaacctctcagacctcaatgacctcatctgtagatttcaagaactaccctggctactcactttcatactttgcttatccacagaaatagttctttcagcatgatattattgaggatgcaagcatataataccaagaataatgaaggaggagaggcctagacactatggcctcccactgtaagactcccaccacacacacagatgatgtcctaggaagaggctctaaggcaaaatgttccctgatttgatgtcacatccatacaccacagagcctttccaaagtgttaggttaaaccgcatgagattgctgatatttcacaatttttgacttgcaaacatggcagttttgtatttcaacctaatagtttcattcacagtagtggctaggtgtgctcattcaggaaccaaattaactggcttcagatcctagcccccagcttattctttgtgtgacattggactggatactccacctccccccacctcccctgtaaaatggggcaaacagaggaatcttccttggaaggttggttactgagggcgctggaggagataacaccttggagttgggtggggcagggagtcaggggttctaaactcagtgactggcacaagaagctctccrtgtatgtttccagagacaaccttaacaattgactgtggacctgactcagggaatagtgtccggatctccttcctgcctggccttaaagggagaatgtggccagagcagatgaaaaacacagtcgcaatgtggtttcctaatcggtccatcgtgtcctgcttgaaccaccaaacttccctctttctccttgtgaggggagtcactgggcagcagacaagccttgacgtaggcctgggactgatgttggaataccacgagcggcattcagctctccatccccccygtcttatctgagcaaagcattagaggctccatccccagatacctacacggagcccttccccattaagtagtacatcatggaatatgtcagcctaaattagcaggcaggcccatcacattaagctgaagctgtgggctggcagctcccactctgtaatgcctcttgttcctggctgcatgctccctcccatgtcgccacagccacaagaaatctctgcagacaatgyacggtaactgaggaggcccggggaagagtttaggaggagccacaggaagtcctgcagattccatttcttttgtgacycttggggtcctgctttgagctctggtacctcttgacgscagaggaaccaggtagcaaccamaagcttcaggtggggagctcctttgtgacaaactataaaagcatggcacacatttctgaaaaaatagatgccctgttcaaataccatgaacacctmcaacacctaattgaggtttcttaactaccacactactatgaataccactaccattataactaccagtaacactagttattccataaattctcctggcaatttatgtcactttcagagcatttatcatacctaccctgtgtgatatttcaatgtgatgtggtrcagtggaaagaacattcactttccagtccccgaattaaacctagctatgcttcctgtagctgggcaaccctgggccagtgacttagcctctctctgcctgagttttctgtttgtatgagtacctatttcacagagcttttgaaagaattacctgagattatgtatgaagaatacttgacacagagaaaatgcccaataaatattttggtgtagtgtttctcagggcaaagtcacttttttatccatcgcaatgccttaactcaggcatgcccttagttgatgtccaaaagtgtatgatcttcactttaaaaattctacctcattcttcctctaacttgttttccattgtacatctggactgatctagtcaaaacctggatttgattatatcacaatcattgcaaatcctttcatttttttccctattcacttggaataatggcaaaactttttggsgggggtgttgcctcctacctagcctgtcacctcatctcccacaatagctcccttcactacttctgtctcaactacagtgacctatcagtttttcactcttgccttgttcacctctatcacgggacctttgcacatccctcagacacattctccctttcactcccctcctggcctggttaaatccctacccatctttcacattccaatacatacattctcagggaagcctcttcagttctccctgagcaggttaaatccctcttggcagkatatcctctcttttgcgcacctagcccttttaattatgtctatctcccctgacaagaacaggtatatgatgccaggacctgtgtctggttctgcttaccagttgaacactccaggactttgtgtggcactcagtaaatattgttgaaagagtgggtaggaggatgcattggaggtcagatcatctcaacaaaaccccaaaccaccctttgcgatagtgagagcacagggagcatggtcactgttttgcagacagtgcaattgagctcaagcttaggaggagcaggttagttgcccagacctcatagcctattggttagtggtgaatctgatcagaaccctggtctcccattcgctgccacacacacttaatctataggcccttatccgtaattgggatgggggaccacaaagactttccttccctttcctttcctagtattcagaggacccctgacccttctacagccacacctcaagtcacctgtggtttctgggttatcaagtaccacatctgtctagaattctgtgtttcctctgaatcattgatttgatttaaaaactcccgcataggtgagttaaagtccctcaagtctgaactgggagaattcttttttctaaaaggttatgttggtgaggtgactgcacttcagaaaatttaacttttgtttttcttctcctcgccacctgggttgaagccaatccagaagttgaagtcttaatctaccacctggtatcaaatcagtcggggctcagttgcaagaaatgatttgcttgaaaagaaaatagctttggttattttattwtcttgtttctattaagtgaccacacctgtgttgtggggttttgtctgtcttgggtgtttttttagtttgttccctctcgggcattagtgttcttattctctttctttgtagccagttcacccagaactcaaaggaggaagagtgataggtctttgttcacatttgccagaaagacggtcatgtgtgggaaactatttagttgccgattctctgatccaccagaaagaaatcatttaatcatgtattcttactcattcaacaaatacttactgagaagtatttatgtatcagtaaggtgaccatatcattaatgttcaaactgggacagttttgcatgtaaaagtggacactacctggttcgcactctaagacaaatataaaccaagattttctcagtcagatgtcattgggttccctatatattagtggctgaatttggacgattagagtcttgggtgatgctaaagtttcccaaaatgcccttaaggattaaggacaaagccaggaaggggtatagcttccaaagccatgagatgaaaagacataaaagataaatttagattaaagttgaactagacatttctaaaattttcccacaactcccttttttaaatagatttcatgtttaaaaaaaaaatagaacaatgtctctggaaggtaatgactccacaatggaagccaagttcccctgagatgaggctacctggaggggcttagaaaaatgtttagaatttataaagaatgaaatttcccaccagggctaagtgatggtgatatcttttgaaagaggaggaacagaatggaacaagaacagtgtgtgattcgttattagcctcttctttctctaacttggagtttcttcaatgtggctattattttgtgtgtgataataaatgatattagcatgcacactcttttcctatggaagatctttggttcygaagtgatttgtttctcttgcatcccaggtgcctgtcctgagacccatggacctgatggtggaggccaccccacgaagagtatttgccaacgcacacacatatcacatcaactccatatctgtcaacagcgactatgaaacctacatgtccgctgatgacctgaggattaacctatggaactttgaaataaccaatcaaagttttagtatcctttctttgtgatcaagaatcaactggcctgaattaagagtattcaggtrcgagtgggctgggagaaaatatggaatagaaatgcaacacctagcatttgcggagaacttgccccttttaaaatacactggcacctatgagactctttaatcataacaataaagttagggaaatattgttattacaagtgggaggccagggctagctctggattgggactctgaatcaattccttcatacagaggcatttatatgtcatgaattaaaattagaggtgattttatcaacaataggataagaccctagagttcaggttctttctctgttaaaggattcataaatctgtatggacagcatggaccacagacatactggtttccattgtctcataatagtgaaaataatagtgactgacatttattgagttccaagcacttgcaatgggaactttatagtattacattttttacctcattgaagtatattatgcatatagaaaagtacatattataattgtacagtttgatgaaatgtatagtatacatattataattgtacagtttgataaaatgtacagtatacatattataattatacagtttgatgaaatttcagaggttgaactcacctataaccagcattracatccagaaacagaactttgctaacaattctcaagcccccatcatgcctctttatattaataatttctacccccaaggacgtatttgataaaacaaccccataatgtaagtatcattatctcctgtttaattaaaatatagaaaagtcggctggccgcagtggcttatgcttataatcccagcactttgggaggcctaggtaggtggattgcttcaggtcagaggtttaagaccagcttagccaacgtggcaaggccccaactttactaaaaatacaaaaaagaaattagccaggcatggtggcgggcgcctgtagtcccagttacttgggaggctgaggcaggagaatcgcttgaactgaggaggcagaggttgcagtaagccgagatcgtaccactgcactccagtctgggtgacagagccagactccatctcaaaaaaataataaaaataaaaaatatatagaaaggtaaaaaaaaaaaatgctgaatagctgggccagtattttcacccccactatgttgaccctctatttcatagtaaaaattggtcatttattgaatacctatcatgtgctccatttctcacaaacctaaggcatgagatttatgaggaatggcactgaacaactcaggtaactgaacaattgacctaggtatcaatatggagttttctcttccacttaccagcctcccctactctaactccatctatccatgagccctgcctctaaaatatatgtcaaatcaacgcatatatccctatctacctacctacactagcataagccactgttgtctctcaccactgtgactgcaataatctcatctggtctccattcattcttgctcttttatacagtaygaacccttcaacatgtaattcaaatatcattccttccctgataaaaaacattccagkagcttcccactaaactcagaataaaatccaagttatttaacttggcctataagattctgcgtgatctggaacctgtctccatctttgttatccagtcttgtcacgcttccctaattcacttcatttcagccaactaatcacttttctgttcctaagtaaaccttattcttccattctttgcatttgctgttccctctttctagaatattttgcccacagcattcacatggctagttacatgtcacttcaggccccagaggtactctttcccattaactcttaagtagctaccaataacactatccctgttattgtcatggtacttaccatgatttgaaatttttttacttatgtatttttggtttcctcatgttaggatgtaaattctacaagagcaagggccttgtatgaactattgctgtattccagtacgtggaacactctgacatacagaaaattattgaacctgtcaagttcgaaataatagtaggtcatcaaagtagcgctatccagtagacagttcataaaatctaacctggaaatttaattttaagagttatagtaaagctctgaaggttcgtttatagaatagaccccataatggctcaaacaaataaaagattattttcgtatgaagtctaatattgatgatccccatcagcaggcagcctcctccaatcagtaattcagaaactcgggcctctttcatttgcagctccccaatgttaccatgtttatagcaggactgtaaaaggggaagktcatggaagatcacaagtgggagattcctctgagccatgccctaaaaaagtatgcattccattggctagaattcagccacatggctaactcttaactgcaaggcagcctaggaaatgtagtctggctgtgtgcccaggataaaaagacccggttttggtacacagctagctagtctccaccatggagagcactcaaccgtctccaagggctttcagggaaggcagctttaatcagatagtggcaattatgagatatatttggagacaatgagaactgaccatcaggaccatgcctggcatattttgttgatcacggaacagactccacatgctgtctgggcctgcctacagattttgcctggcagtgcagctgctaatagaatgagtgtgggtggtggttccctttttctctctccatctattccaagagccagaaatctgctcaggctcagctggctgtcactctgagcttctgcttccccagtctaggtgacatgttttctgaattttgcctctaggccttcaagggggaggggagtttctttaggcattttgggagacagatgccttggggagaatgcaaaggggaaatattaacagcgcagtttaggttatattctgcagatgtgtgacagactgccagatgctggcatacaaatgagaccgtgccattcacccttaaagcagccatatgtaaaataatcattgtcatcatgagaacgatgataagtgatatctatatagttcttttcaaccagaccgccctaagcactgagcctctcatcactgaagtatagccacctctggggtaggaagcggccatctttcaaaacagtctcagaaaaataccagccaccaggcaggtctcatttccacaatgccccttattcacaaaggagacagaagaaacatggttcaggatagaataatttgggattcccaaagcatagtgtggctactactggggatggtaagcaatgtgcttctaagcaatacatagacttttttttggtttttatatttatgtatttatttagtgaaygtcaaaaaacataaccatcatatcctacaatttcatagatattcaaaatctatttagattacaaagtaagtgtatgtaaagyattaagtaaatagtgagacaagggatctggagatatggttagaaaacagtcatgacttcctgtgactggcatttggtgtgactttggcattacggttgagaactcaggcttcagagtccaacaagtgatagaggtctcacccagccctaccacttttctggctgtataagctttaacatgttcttaatctatccaagcctccatttctcattttgttcatctgtagaaagcagctctatcacgagaggattatgaaaattaaacacacacacacacacatacgcacgcacacatttagggtagtgccttgctaagcaaatgctcagtaaacaggactagcacaawcatgataattattgagagwacaaggaaactagaaaagttgaacattagaatggtagcttttattctgctaattttattatctggattgtcttttcaattctagactcttcctttggttctgcagttgggtgtcctttgcaagatgctgycccctagttactaaatgttttcaggaactctgaggtctagggccttgtgtttagcaccagatcagagcaaggcatttctaaacctcatgataactggtcatgaattctctcccttccatccatagccagtctgtccttgtcttgtgtaacagtttcccacataagcagtcaaactttcgtcttaataggctaactacatcaggactataacaastcattaatagattagtagttttctagggcaagagacaatagcaataaatgaaaatttatattaaaagatgttgcttctttatgaaaactatggtatacctagaatcctttgaactctttttgcaggactaagaatgaactgacctgagttcttaccttgtccaacatgggatctattaaataggcccatatygagtaaaaataaagactagccctcaacgatgataaattgagcacctagtttgtgccaggcatgaaaatgggaaaaaacaaatttgccgctttcagagtaatgttcatcaaatacactgagtatataattacaaactgagataatttctgtgaagacagggaatatggttctatgaatgcatttttaaaaatcctgctatagaccagggaaggctttgctgaagaattagttaagatctgaaagaggaagactatgaactaacttggcaaagaggtgtggagacatgtgttcagtgtgtacagaggtcctgtggcaggagagagtatgacatgttggaggaattctaagaaggccactatttwtgaagcccagagagtgaagtggagcatggagtaagcaaggctgggaagggtagcagaagcctcacctttcagaagtccagtctctgaatatgagatagaggacttatctgggagaagccagctggactctagggatacttcaactttgaccttggtcctaacaaccctgtacagtggcttcattttatttgtcaaccaagytgaagccctgttagagtcgattccctaattaagggaccaggtagcctcaactcttggcttccaggttctagcactcattactaccatggacagcagcttccttttaattcagtgggattctgccaggcaggcttccaggggarctgtggggtctagtacaagtttctcccctgttgctgcttcagtggctttcaccctgcccaatacatatttaatatgacaccatgtgtctctttgtcagtctcctcatattgagcctaggaattggcaaacactccatgaatatttacacattgacttttttttaagctcttaagagaggaatatcccttggagtcctctttggagatttccagtgtctcatcatcaagcaayatgtcctttcagctaataagatctttatgtttcataatcattgcttaatatccaaagattaaatttagaccatggaaaggraaaaagatctcaaagcaactcatgtccctaaaaggaaatcacactcatcaaacaaatacgctgtgttcacacaaagatattactattttctaccttcagtactggcagactttaagtgggatatgaaaagcctcagctgcttttgaatgtgggtactttaccctggtaaacatagattccactcttcagcttggccaatgtttataatactcagccctgcagaaaagcgtcctacttggctstcttatcctccattggcttagacaggaattggggaaatacgcatgtcagtattagcaaaatcagcagcaaagggacagaggcatatgaaagtcacctcacaaaggcaatgcatataaaccctatccttggagaaatatgtgcttccttcagaagaaggaatattcactccagtgtaaaaccacttaaattatcttttccattatcttgtttaataatcaaaattcttagaggctgatagggttacacccatttataggcaaagaaatggaaacccagagagataaaatgactttcccaaattctcttagcaaaatggagatagaatcaaaactgaatcccaatctctggtccccattttgttacaatcacwgtatttttcacaatattatctcaaactttacccatcgmgatgaggttcctggtctcgcagctctctcacagatgattttaagccagggaaactgctattttttaatgcttattgttttctttgtttaatatgtattcattgtagagatttggggaaaataaaatgaccaaaaatcttactaccaattttgctgtctatacattgkattcgcatcacagttttaacttaatgctagctaattcaacaatgtgggttcagggggaaataaaagaaattttaaaagccaaagccaaaaacaatttaaaactcctgatttacccaagaatctttcttcttcttytttttttttttttttttttttttttgaaactttcctaagggaagaagttcaggttcctaatccacttttttttgcattacratattcttttattgatattatttttaatacaaataatacatgaatacaagttattttttggtaaattactttagcaataaacaattcacctcttactctgctaaaaggttagaacaggttggcaaactgcccacagaccagatctatcccaaagtgtttttgtaagtaaagttttgttggaacacagccacaccctttcagttacatattatctatggctgctttcctgctgcaactgcaaagttgaatagyggtggcaaaggcccaaaaggctgaaaatacttgctgcatggtccttatggaagctcgcctagtttaggatatggactcacacttttttctatccatttatatatcaggcatattcacagactattttattttgtatatagttgggattataccatatgcctttttctttttaaaacaattttttatttccacaggttttaaggaacaggtggtatttggttacatgagtaagttctttagtggtgatttgtgagaatttggtgcacccatctcctaagcagtatacactgaacccaatttgtagtcttttatccctcacctccttcccaccctttccccctgagtccccaaagtccattgtgtcattcttatgcctttgcatcctcttagcttccacttaygagtgggaacatacaatgccaagaaccttccttctattcaatctaggacatatagagacataatttctctctccctttcctgcttttactgcttagtagttatcactgcctaatatactgtgtataatactcatttaccttgtttattgactgttccctactagaatataggctccatggatcaggggggcttggggcctgctttggtcactactgtatctcctgcacccagaagagtactggcagggtatagattctttggaaacacttatagaatacacaaagaaagaaatgagtgaatgggcccttgtctgtctccctctctctctctctctctctctcgtgtgtgtgtgtaatatcttttacgtggtcttggtcagactgtatatactttgtacctaactttccttacccaaaatagtacacatcataagtatggaaagtatcctaagtttttgttttgtttttcaatacagggtctggctgtgttacccaggctggagtgcagtggcacaattaccactcactgcagcctcaacctcccaggctcaatcaatcctcctgcctcagcctccccagtagctggaactacaggtgcatgccaccacacctggctaatttttgtatgtttggtagagatagggtttcaccacgttgcccaggctggtctcaaattcccaggctcaaatgatccacgcatcttggactcccaacttgttgggattgcaggtgcgagccaccatgcgtggccctaagattttttccagcctgaaatacaactttattaaaagaaaatgtggaaattgtgctgatcattgaaatcaaaagaaaaaccattcgtaaacccaccctgatagaactatcactaatgttttagtgtcttcccatttagctcatcattttcagagtataagttttaaatgacatcatcaaactgttgttagaattttgtgcactatggtttttacagacttggaaatttcactgcaaaaacaatttaatgagatatataaaaattcatctaatcacttccttgttctgtatatttatttaagttgtcaatctttttctaatatcatgctggacttttgttttcataaaaagctttttctaaacttgggattaggaaatgatgtttgaatggcccccatgctacctcttaccatcctgccatgaccctctccattccctcatcccacactgatgaaccatttgtggctctggcttcccatttgtttgaagtggatcccttaaggagtgacctcctggtgtcttcaattattattttaaatgatgccttaggccactgcctggcacagcggtgccctcaccttcccctcttctgccttccaagcatggagctcagctgccaagctggctatgccccctcctgtcctcagagctgcctccagagtcccagcagagagccagattaaccccttttgttagcagatgtaatttgcctgggctcagcattaataagaaatgccgtaagcagtcaggtcaagaagaacagatctgtcaagccccagggttaatttaatggcaatctgttggctgtcggggttgtatattagccatgaattcaatgctctgttttgcttttgccatctagttatttgggacaacagggaaataatttggatagagagctctaaaggattaaaaaaaataaaagtgactgtcaaaatgcatcattccattttcaagattatacgtggagccacgaattgctcatcttctttctccttccctcccaacatgaagggcaaaattacatatgctgaaaacatggatcgccctttagagttgtgcaggggaaaatgcctgggtttctagaggatacagatgttgaatatcctctcccatcatccccataagtcacttaatttttagcaactagacttctctcaaatgtttctagaactcaccaaatcctccagcaggtaaaaatccaaataatcccttatcaggcttgtgtcccaaattctgcttcaaaaaaaaaaaaaaaaatcttagagcacataaaaattctgrttctggaaaatgcagtcaccaaagtggtaggtaaattaagagagcacaagcctaaagccagaagagatggggctgccctctcagattagctgggggtcttttcaaaggaaccaaaattgtcacattttggccagctttgtgaggccattcctcaagggaggcagagtggcatggtgagaaagaacccrggctctggagtcagacaagcttgggttcaaatcccagctctgcccactgtgtcacataaccttgagtaatttatctgagttccctcggctgtaaaatggacctgttaataatcctgccctcataaggctgagatgaggggcaagggggacaacacatggaaagtgttagcacagggcaggcctggcccctgatcagcattagcaactggccatatcttcctcttaacttcatcatcccagtgattaaaaagagggataatcatggtttatccctggaacccctttgagtcaaactaaacaagccctctactcaaaaaggaagactgagacctgctggggataggaagccaatggcttggggatgagggctgggtggtgggtaggcttggaaggtccagtgaaggaaggaaagatccagagatggcagctctgggcagatctcgtgggcacagccccactggcatccttgatggtggaggatgtgcctggtttcatagacatgtttaggcactttgtttttgcacattcttactttggggctttatttttaggtgggaaaaaataactgtagctgtagcacctccccctcccacacagcgaagatcccttccagttcagcttgttttcagagctatactggtagaggttgagaaagctgacaccagattttctttccctatttggagaaaagagaaacatgttcacaggcacagtgggatatcaaggcttgctctggaggatgaggaaatctaacagcagctgaaaactaacctccgtttacccaacgccacgtcatggccataaagcccagggcatgggtcagtggctgagagagcaccggagctgcagcctagagcctcctcctgaggggcacaggctcttgctccacagcatgtgatgctaactgcaatcatatttataactctggcagaagttgagttgaaggrtagtattttgtgaatccaggagactcacatgccccggagacccaagtaatatttgcatctgggtttggtaggagaaattgtagtaacatgtactgttagctcagtctcatgccaattttagaaagaacccaatagggtttataagagataatgaaggggaaagaggcacaaccaaatacaaagccattgttgcaacaaattgcatgttggaatgttgtagcaggagcatagtgatgtttgatcatagatgattactttgttagtgctagcgggactaaaaatatcagtgcatttgcttgtaccgcatctaaactctaaggaggggactatgctactagcttaatgaaaagcatacaagactttcatccatctcagtctaatggggcagttatatcaagttattgcttgttgattcaatacattgttgtccaaaatgtggtgcataaactcctggcacacgcatttgcagttatcacatgtcaatttttatgcatattacttaaaatgtagctaccttattaaacccatgattttatgaacattgggttactgtttagataaagctaagtaaagaaaaaagtgaatcaatttaaagttgatctgaaagaaaaatgttaagtaaaaagtactatctgatgatgcacagatagggcaaaaatcacaaaggtggctcacgagtrggaaaatctaggaaaagtgggagtcctgttggtcagctttactgtgtaacagcatccacatcacaaggcttgttctttgcaggatgttgctgggtcctcagacagtacctcggcccctctgtgtcctgatcccccaagctctgggtggaggtgtgaagagatctgtacaaacccactccttcactcatgccagacatcccagtgaaggggtttattttcattgagtcaccttcataaataaaagactaaatgtttcattccaatatacaaggatatggtctttaaaaaatagaggtataattcttgatcagaaagggaaatactgagaaaaaaaaacccagatgataaaactaaggatattttccacgggaccctaaaactttccaactggatggcttgtttctgatacttaaaaactccctcacaagctgaaaagcagatcacaacttacagagactagaagtcttatatatcatacatgagagaaattttgcataattatgaaagagcacagactttgcacctgggatgaaatcctagtgttgtcacttagccatgtgacttgaagcaagtttctttatgcacatggagcatccgtttccacccctgaaaaaatgaggataaggaaaacgctaattatatagagttcttgtaaggattaaatgagataaagtacatgatatgctttgtacagtgaatggcctatagctagtgctccattattggtggcagctattattattatcatcaacatattataaagaagggcttagggatttcatgaaagaagatatgcactctattattatagatatcacttatcagcccaataatccattaaggaatcagataaaatgaattatttggttataataggaccagtaccttaatcattattataaaatgagaagcaaaatctttgcaacttggtacattttagcctgattgcacaagcagttaactttggtcatgagtggatgtcttttacatgtttatagaggataaaacacaaatgaggagtcaagagacctgagttctaatgctgcctctgactactgggtaaccctgggctattttcttaaagttcctgagcctcatctgcctgggacaagtttatgatgaggatctaccatgtgcatagcaaatgttgacatattttactaatataagatggtgccattgctaattctccccttccccaagttcctgcctccttctcctggttccttccttgactcgtctgtgccagatattgtggacattaagccagccaacatggaggagctcacggaggtgatcacagcagccgagttccacccscatcattgcaacaccttcgtgtacagcagcagcaaagggacaatccggctgtgtgacatgcgggcatctgccctgtgtgacaggcacaccaaatgtgagtagcaactgaagggaggtggggggcatggccactggccccartgtgctgggggagagcctggaagcttatgatctccctttctacaccagacacactaggagtaaagaaactacaagtgggagtcagctccgtattttatatttcagtaaagatgaacatttgtgttcgattccaaaacatccagagatgaaaataaataagacatgaccctcatcagaaaagggtttaaataacagtgtgatgtgatccaaattatgtgttaaggaaatcatgcttgctgccatggggagaatgactttgaggaatagcagrgggaccagttaggagaccgttgaagggtggcctggacaaagaggtgagtggaaattgagagggcagatgggttctggacacatctttttttttaatccatgtaacctgcacagtactgcacagatcttggcaataaaatkaacaggacttgctgaactgcrtgggaggctgagaacataaaagccatctagaacagcagctgggggaaggagctggtggcttcttggagagattgtgactataggatgccagagccatgtcataatgaccatgatttttaaaacccaaatttttttcatcaaagtgagtgaacagccacaaaagtaaccagaggagtagtatgatcagaattagttgttagggaaattgttcagatggaaggcagaaggataaaggttaaattctggctgagagaacaaagaaacaaggagacaggttaggaagccactataatatagataagcatttcttaacagtacaccattgaatcttgygctacatagattkttgtttcggggaaggggctgtcctatacattgtaggatgtttagcagcatctgtggccttacccactagatgccaataacccaagcccagttgtataaccaaaaatgtctccagacactgtgaaataccctcttggtgaaaacattgctcccagttgagaaccactgatctagactacaattcattcagtcacagatactgcatgatattcttgtatctacaatgtatttgttacaataaagaactctgaggggtacaatggaaaggtaagacttatctcctatactcaaggaatttaaaatttggctaatgaggcaagatgcacccaggaagcatttcaggaacaatgtataaggcagtttagttttaatactcaagtgaatgatggagataattatgggttaggccattcagagacggttgagacatttgaaacagacctcacagggaaggcagaggctgagcagttgagtgttgaagtacaagtaggatttggttaggtgggaaacagaaagaagagtattgttggcagcaaccacagaatgggcaaaattctgaagttactaaagtaatggaacatttgaagggtgttaaataaaaagtgtcaggcttgggggaaaggggaatcttgggttaatgaggttaaatagcaatgatggttcatatcaggttgatccttgaagatcagattccaaagtttatgctgtcatgtattcatgcattcagtgagtacttatattatacccagagtctggttcccatagtatccagtccttcttaagctgttccaccaaatacagttctggtggggccaagccatgaaccctgctgccatggaaggagggcacagagaggaatccagttcctcccatgtgctctgggttggcccaacctaccagcaaaggcaaaacagcccatgcctggcagagaccagcgaccctgggggaggtgctgaccacaacagattttctttgaagccttatttttctttctaaaaattcatgtgaattttacattttamcccatataaaatctattttcactttaatttaataattatgtttctacccccactcccaaattttaaacaaaactggtgtttcyaaaagatgtaacatttatcctatggcttcctgtactttttagtatacccccatatcctcccctcttcctaacgcccaaggatatatacaggtaccccggttggagaagcacagtttctagtatgtgggaggtaatttgagagcatttcgctggacagcagagttaataaaaattgtgttttatggaagattaacacagtggtcatgtgaataaaggtaggaaagttagaaggttttgctttagtctcaatgcaaggataatttggaacctagatcaagaatggtggctatagaaatccaaagaaagagaagggggaaaatgaacattttcttttaaaataactatgggtgttataagtgacattagtgatattaaaggttggcattcgtcatacatggacgtgatatgaattgttcaatgtcattcccctgtagatagtaaatgccttgaggataagaactgaatctgacttggtcacattatatgaacccctgacacataagcagaggtcaggaaatatttaataaatgtgtgcctaagggttgacataaataacaagtgggaatggggatggatggaaagtctctaactctctcccagagagtgaagggttgggactcagtaccggacatgctgtgggtgaggtgacatgagctgtctaaggaggcagggcctcyctagtgagtgaaggcagaaccgggctttctgggccaccaacccagggtggaggccagggatggcacrggaagccctggcatccccatagcccagtgtggctgacactagcctcagctttggagtcagacagatccacatgcattctggatattggggaatcaactgactgggaagcttgatgaactgaacacaagatagaaaaagggcaaggccttagaagctttcaaaactagaatggtaaataactaattggtactaggcttaatacctggatgatgaaataaacacacaaaaaaaaacccatgacacatgtttagctatgtaataaacctgcacatgtaccactgaacttaaaagttaaaaaaaaaaaaaactagagtgatttagagcagatgctttggaatcagaactcagctctgatactcagtacctgcatgacctcaagcaagttatttaatcattttgagccccagattcctcatttgaaagtagaaatattaaggacagcatcatagggcaggttgttcacaagaactaaatttcatgtgtgtgagatcctagccctctgccaggcacaaaggagtcaataaatgacggcagcagttatcacaattattcaccctggattcctccggttctaggcctgcagacataagatgttcgaaaccccaaccctcttgccagatataggaggcctcattattcatttatttaatcaatatttgttaatcacatactttatgtcaggtactgtatcagactctggagacagaagggtaagcaaaaacagacctggtttcctccctcttagagcttactctctgtattagggttctccagacaaacagaaccagtagggggtgtggtgtgtgtgtgtgtaagttaagagatttatcataaggaatgagatcacatggttatgaaggctgacaagtcccaagctctgcagccagcaagctgaagacccaggagagccgatggtggtgttctaatctaaaagccatcagagaccggcctcagtggctcacacaggtaatcccagcactttaggaggctgaggcgggcagatcacccaaggttgggagtctgagaacagcctgggcaacatggtgaaaccccgtctctactaaaaatacaaaaattagccaggtgtggtgacacacacctgtagtcccagttacttaggaggctgaggcaggagcatcgcttgaacctgggatacagaggttgcagtgagctgagattgccccactgcaccccagcctcggtgacagagcaagactctatctcaaaaaaataaataaacaaaaccctcaggctgaagacccaggaaaaaccagtgtttccattcaattccagaagcaaggggggaaaaatacaatgttccagctcgaaggcagtcyggcagaggagttctctttcccttgcaggagggtcagcgtttttattctcttcaggccttcaactgatgagatgaggcccattgacaataggcagtacaatctcttttactcagtctattaatgtaaatgttaaactattccaaaaacacctttacagaaacacccagaatttctagccaaatatctgggcagcccatggctcagtcaagctaatacataacattaaccacactgtctaaggagagaagatgcattagttagagaacagaaacaaatatagcatcgcaactgcaatacatgtataaaagagaggcatgtgctggtacaagtagaggtgttgaggactctacaagacagtgactgctgagctgagacctaaggatggagaagcagacggggagagcccagggaagaatcatgcagtcatacagaagcaggaagccggtcaagccacacacccagggagccccagaagctgcttctccctccagcctcagccccacacagccccagagaagcaaagccctggtgactgtcctgaaggaggcggaggagccagctactggccttcaggcctctgcccagccctgtcctcccactccctattccaacaccaacagagttctgaattgcaagctgccagcctgctaatctaattaagaagcaaatgaaattcattttcctgactccttcaaagaaccaaccttcttcagtgcacatctccctttgttcagctgctgcggctacgagccccagctcctgccagctgggaaaacaagttcaatctgacccctcgcctgacatttcatattgattttctccatcctcctcaaacggcagcctgcagtcaaccgcagttcagccgaggtgtgtgatcggaattgagacagttcatcagagttcaaaatgaaaagcaacattggcttttggagatgagctctgagaaggagagtatttaataaccaacagcatttaatcaaaatgccgaggagaaccgtgttatcagagctgcatttattaatttccatatgtccctcactctgcatactcagcaggggttggaaaggatgattccttttctccctcgcctatttttttctaccacttctggcggtagtgacagggctttgtttgcagtttagatgtctgaaacaatagggtgctgatggcagcagtacttagctagagtggattattctttcccctttccacgcatgagtatcggtggctgggtgaagaaactggccaggtgtaatggacaccaacctggggaatgaaaggaattaagcctgaactcctttccaacgtgccccgtaaatctggtctctgccaacatttccaggctcagctccctgtagcctggccacactggcttgcttcctrcacctccaatacatccagccctttcccacctcagggcctttgcacatgcttttctgcctggaattctccctgccccccacrcactctacctgtctggcctgtactgactttttaagtttctgagaaaatgtcacttcctaagagttaacttctctgtccaccccatctgcacctaccatctctcaatctcatcactctatttctttatttctttcatagcctccattatagttgtttgctttacttagcctctgtcttgctgactggaatacaatctttatgaagacagggactttatctcactaattactgaatttgtacaatacttacatagcacctggtggggcttcatagaacatctgtggtggaaaggcaggcagataggaaaagacaggtgaaaaaagacatattggtttaccagggctgctgcaacaaagtaccatggactacactgcttaaacaattcaactattttttcaaagttctggaggctggaagcccaagatgaagtgttggcagggttggtttcttctggaggctacgaaagaaggatcagttccacactgctctccttggcttgtagatggctgtcttctccctgtgtctttacactgccttccatcagtgtctgtgtccaaaattcctcttcttatgaggacaccagtcctattagatcaagacccaccctgattaccttattttaattacctgttgaaaggctctatctccaaatacagttatattttgcagtactgggagttaggacttcaatatatgaatgggcgggggggggggcacaactcagcccatagtaggaggaaagacataaaagtcatcaagaacacaagccctggagccagcagttccagacattgtttccaggcctcattgccgccagaagcctgggcaggtgctgatgttgacaccttcctccaggaggtaagagtggaaagaggtcatggacacagggctcttgcacagcccctgacacattggaagcacacaatgagcataacttttattaaaggcaggagagaaactagacaaaggaccaaaggaccaggatgatagaaacctgtgcattgggtctcgacagtttcaccaggcaggttgtccgtgtgtgttaggacagtgatgcctggaggctttcctgtggagctagaacactttctttctgaacaaagcagactttaattgattttagaggcattgaggtacctgattcctattcaaaagccagtcttgaagggagaggttccccaataagtagggtgtggtttagcagcataaaagcagcaggtgaaatcctcaagtgggactgggaatagtaaaagtgataccttgaaaggccacagagacttgacttgccaaagacctggggacacagagatggagcaagtggagagatgtttatgaatgttaaagcagcatgcgaaatgataatctcaccatgaatgcagcaaggtcaggataagtatatgtggacaaagactagcagaggctatatgaaagggatgaggtcaggggccatgaaatgtgggcagttctcttattttctagattctctccaaggttgttgttttacttctataacttgaagaaagttgatgaatgactgaagagccccaccgggtgccttacctccagggtggagacagcaggaaagatcaaaactccctgcccaccccagcagcccctgtcataggtactgggatgaggcaaggcggtgaggagcccagcatgatgttccctgtaagcacagcccaggacaattttgttttgtttcttcccctctgtcaaaccaaactgacagtagtgagtgaattcagggactgggtcaaaacaggggaggcaaatcaacatagttgagcagccactatcagcttgtatccatggcctaattggtgatcttgagcaggttacctaacctctgtgcttcaacttactcacctataaaatatgggtcatgaaagtatttaccttatagggtgcttgtgaggattaaataacacccgtggagccttagaatgatgcctggcacatagtataagcatcgtgttatggttggagtgaagatgstgtcttgcttccctaccacatgtgtcttttaagtgtgggagcaggaagagcagaagcaatcataaaagtagtaatgtcaacagccgtattcacagctaacttccatgacattttactgtgtccaggaagtaagccaagtatacatgcatgagctcatttaatcctgataacaaccctatgaggtacatactgccattattcacatcttagagatgaggcaactagctaaaagggggaaagatacacttatggccaccaaagagcaagtgatgaagttgaggtttgagccagaccacctgtagctcttcaagagaacaccaaaaactacttattcaactaagattgattaaacacctgctggtttctgcctttaaggaccatactttcttgtggggagggatgagagaaaacacaaatgtacaaataamcgaggtcatttcagacatgataaaaaagctgtaagaaaattagcagggtcaggaagtagtggtatgtggcaaagcctttgaattaagacctgttatcagamggatccaaagagaaagccaacatctaagtgtgaaggccctaacagaggaggaaacttgtgtgttcaaagaatagagaaaaaagatcagtggatggatacaagtaggctagggacagtatagaaagtgaggccacagccaggcatggtggcttatgcctgtgatcccagcactttgggaggctgaggcaggtgggttgcttgaggccaggaggttcgagaccagcctggccaacatggcaaaaccccatctctactacaaatacaaaaattatctgggtgtggttgcacacacctataatcccagctactcaggaggctgaggtaggagaatcgcttgaacctgggaggcagaggttgcagtgagccaagattgtgccactgcactctagcctaggcaacagagcaagacgagagggcaagggagagggagagggagaggggaaggaaagaaaggagaaaggggaaaggggaaaggaaagaaaaggaagaaaaggggagggagggaggaagggaggaagagagggagggagaaagagagggaggggaaaaggaaagtgaagccagagaggtaggctgggtctagatcattgagagctttatgggccagagcagagcacttgcatttcactctaagtgagatgggaaaccatgagatggtgctaagaaggaagtgaatactgtttatgatcttaaaagagttctcagacaaggggtgccaggcctggaaagcagagagaccatttagaggttgttgccactgtctggaggagacatgataatggctttgaccagggtgggcacagtgaagtagtggtaagtgggcagattcaggatcaccttaggaggtgaggctaagaggacttgctgagagattggcagtgaagaggtgatggaaaagggagaatctaagataactcgtaggtttggtgcttgagttactgtacggtaccatacactgaaacgaggagactggggaaggaacagttttggcatsgaaagaccaagcattctcttttggatgtgtccagattgagatgtctgtgattcatccaattagagaagtctggcagacaattagataacatgagtctggaagtctggggagaggtctgagctgtaggtataaatttaggaatcacgagcatgtcatagctattttaagccatgggatgggataatgtcaattagggcagaaggtatggatagagaataactgagggcccaggaatgaggtgaaggccacaccgacatttaccaatggggtaggggaaaggaggaggtggctttttacagatgatcaagtatgagctaccagggaagtgagcagaaaaccaacacatgtaagctgagagaagacagtgatttagaaatacattaggatcaattatgtcaaatgcttctgagagggcaagaaagatgagaggggkgaagtgatcatgggatgtgggcttatggaagtctttgtccattaattagttactttaagtaaaagcagttagcacactgcctgacacatagtaggttcccagtacacatttgctgaatgcaatcaatcttgtgtgtggtggcacagggtaggttctgcagtagcatcttaattccattgtggtttgggcagaccttccttcttcctcacctgcccctcgagcttccatcttattgagaggtaatgtctagtgctggggaattgcagaagctgaatctggccagagaaggtcttgagggccagggygaggagccagggttcacctcagcagtagcgatggggctgccctgcagcaccaatccttgcactggctctaccagcaagtccactgcctgtagacactctcttctagcagcaaggcccttctgcattggyaagtctgcagcccaaggattggccacagaaatcccctccttcggatgacaccaaagcagccttcctgtccaggggcagtctgactttttcatgctgagrgggaaatggcataagcactttagaccttaaaatctgagatgttaggccaggtgcrgtggcttacacctataatcccagaactttaggaggctgaggcgggcagatcactttaagtcaggagttcgagaccagcctggccaacaaggtgaaaccctgtctctactaaaaatataaaaattagctgggcatggtagcgcacacctgtaatccccactactcaggaggctgaggcaggagaatcacttgagcccaggaggtggaggttgcggtgagctgagattgtgccactgcactccagcctgggcaatagagcgagactccatctcaaaaaaaaaaaaatctgagatgtttctgtgaacagtgtagtcattggagaaacagcccgagttccaatgagaagaaggcaaagtttgatgcccagtccaacaatgcaaatcagaaatttcattgtcctccaaaggtgggtgtagtagagggggagggtactatttttgaacatttctgtatctcatttaattctcacaacaacccatgaagattggtattagtacctctaatttatagatgaggcacagagaggtgaggaaacttgccccagatcacagtggaggacctaagatttgaacccatgtaggtctgcttccagaagatttattcctctgctgggcatctgacaggataaagagcatgatgtttttctaaaatccagaaggataatttcacaagagtccattttatacaatccccatctggctggattccccagcctgaccattttcaaccatagaattaattctgccattacacagaacataaaatccactctcattcttcaccctcatctacaaacttaattgccaacccctggtaagtaagccactagagctccctaataaacctgtggctcattccccaggtccctgatggaatgtgtccaaagacatcagctgagacagcaactgcaatgaatcttaaagcccctgagatttggcayatcttccaaaaggggttcagtattgatctgaggtataattaacagtatttatttcaggggagcttggttaggttaaaaagacaaggtcctttattaaaatgcttttgcctgatggcaggattgcaaacacacacacagacacacacttcccactctggagaaaagccaaaagccttgctgcaaggagcagaattcactgataccaccaccacccccacctcacccccatgtctgaagctgctctatcccattcaagcttagcagcaattaacagagcaggcagtgcccaagccatcgaataaaaatagaatcccttcccccttcttccatcctcatttccatttttgattaatttaaccagttctgtcaattagtcatcctggagaatccagttgagtggattttgctaagaaccagaaggcttattaattttggaagtgagtgttattcattagtagttaacaccttcccaggtcttgccctctccctcacttggggtcttgaatgagacagcagtgaaggtcaaaattggctcccacacatggctgcagcccccaagacatgcagaatgggaaagattggccatagggttatagatggctctggccttgggacattttaggccaacttacctgtcgtcatgccctgtaacaagctatcactagcaaagcagccacaagcacctgggggcatcctgaattctaggttcaggagaacccagtcaaggaaatgcccagaaatattttccccagaaagaggcattggcctgttagagcctagggagggcactggcctcctattccctgtattttgcctgcaaaaaccaaaaattatcttccattttttcaatttataaatatgttgcaacttttaaaatctaagtctgtgttttatgaccatttttccatttgtggtgccaaggaattaatcttttaacattcatataagtatcataacaaggtgggaattttatcatacaatctttatatataatagatcttccaacagcccgtttttcccctccacagtgaaatcaaagttcacctctttctctctgtattagctgcccgtttttcccctccacagtgaaatcaaagttcacctctttctctctgtattagcttcctatggctgctgtaacaaattctcacaaatgtagtggcttaaaacaacactaacttaccatcctgcagttctgcaggtcagaagtctgacattggtctcactgtctaaaatcaaggtgttgatcaagttgtgttccctgctagaggctctaggggrgaatgtttcctcaatttcttcagctttcagaggctgcccacattccatggctaatggccccttcttccattgtcaaagctagcagcaggaagatgagtccttctcatatcacatctctctgtctctctcctgcctctctcttccacttttaaggacctttgtgattacgctgggcccacctgggtaatccaagatactctccccaccttaaggtcagctgattagcatcataattctatscacaatctttattccattttgccatgtaaggtaagatattcccaggttccgggcattaggattttgacatccttggggagccatcattctgcctacacattcttcaggtttcagttaaggcacattcctccaggaagacttcctggacccccaaataggattaaatgccctgtctcagagcacttaataccatacatttaattacctctttctattttggtctctctcactagatgggaccattattatggctagactcttttctcaaaccccctcagcatttaggacagtgaaagtgctaaagaaatgcttttagaggtaaacaactatagtcattcaatctgataaatttgcatctgatacttctctttacacatatgtaaaagccaacagtaaagagtagttgacccactgtttgctcatttctagcattaagaatacattacacacacacacagtataataaaatacctaccttgttatatttaacttacatgaacrttaaaattaaatcgcattcctaggcaccacaagtgggaaaatggcaataaaaaagcacaaaataagattttaaaagttgcaatatttttacaaattggaaaactagaacataagttttggtgtttgcaggcaaagtaaaagaaagagaagtccatgaagtaaaggtaatcaactgctacttatttattcaacgaatgtttattgttgcttcacatgtcccaggcactgttccaggcactaggaaaatcatgccccctgcccttgcagcactttattgaaggagaaggaatctaacaacacacacataaataagattgagatttagtgaaaatgtttcaggggaagargcaacagcaaatggagtggctctgaatctggacagtgcttggcaggtcacagggcagaaagatgaccagctgggctgtgtacagtaccataaggaggaatagcatgagaggaggcaggaagagctacatacagggcagtccccttgcaccacacagcccccattcacattgtcttctgtgcaaaggacttgaagggctgggccacacggtagacctgtaggcaatggtaaggagtttggatattgctgtattaagagaaaatccaggagggcttggtgtaaagaggatgattgattatacttttaatatgtcactctgtggctatttaagaatgaagcctcaggargaagagtagatgctgggagaagagtcagaaagctatcaaagtgctccaggtaagagatgagcatggcttagactaagatggtgacagtggaaatggtgagattgaattgatttgggccgtactttgagtgtaaagttratagaactgtttttttaaaaaaaagatgtagagggtgaagtaaaggaaarcaccaaggacagctcccagctttttggcctgagcacacacctagatgaaggtgccatagagcgagttcacaacaacagtttgcaggggaaatttacaaattctgtggactctcagatttatgtttttaaaaaggcataaaatgataaaagttgataccttttgctgtttagccctttgctatttatagagccccttctcattgatttatcttcattgatcctcctgaaaacccagtaagtttgcagtatctcttcctttttgcagctgaggaaatcagggtttagaaaacattaagtctgaaacactgacaatgattggttttttttcttacatcatataatgaatacaaccatcctcacgacttgcatggccctgtaagatggagaaggggggatctctcgtgtgtgtaattgactcatgtttaagtatatcggttaattcaagccccccatgcagttctcataattctattttgacagctcagtaggtagcatcagtaactgaattgtgagatctgctgtccactcaagcagcttccagccccatcagtgcaagtctctttatctgctgaattactcaaagcacctgctggccttccatcattatcaagcacagactggagacagcagaggtcaggggaatgctatccccacgaagctcataatgatacttgcctttatcttctctttttaacctgagcataaggatttaaataggattgatctcatgtatgggcatccttaatcccagggtcaaatagcatattctgacattttttgtgccatttgaaaatgtctgtaatgcagtgaaattgtcattgaagagttacatatgagaaaaatagaatcatcaagcttaggaaaaagactgaaatcaaacaaagcaatgaattggtcaataagtgttaacaaagtattgtgctaagcacaatggatagacagacttatgcaattactgcctttgtacacttatcgtggtgggacaagagaatataaaattatgaaatgtttctaatataaagttcattttcaattgaatatgaaatttagattcccataatcagaaagagaaaatgctgactaaaaagtgtttatgctgaatattgttttagacagttgaaatagtgatttcaaatgttcttatcctcagcatatcctatgtgtacccaaaagttctgacgcgtagcatttttcagtttctgtttattgagaatcttttgtgttcgtgtcactgtggggccacaaaaccacaaatttgtgttaatccaacgtactgttgcttgcccctagggaggttattaagtaccggaagattccaagggccatccctgacatttcatggatactaaattgtagttattgaatgtatgagtgaatgagatgagatctaacatcagataaaaggtgatatgtatctcagaatacactaaggctatgaattataagctaaaactcagaattgtctcaatgttaaacttttctcctggaagtattcctgaaatttgtatgatctatataatagaccccagtacaaaatggtatactgagttatatataagctactttaaagataatgtcacaatattttatggtgctctgccccatgacttttgtgtcttgatcacaacttgggaaccttgctctatagaagttcagagaagaaagtgattgtttccaactcaacttttcagaaagaatatcaaggggtggtggaagggggagagggagcagagcctggaatatgggaacrattttgccttttagagaatttcaaatcctactgagcaacttccagccactaggtggctttcagatactctgttgaggttcataaattataaaggccggttataggtatttgtgagattcctgtggcttggaaacttggctttaatgaagatagaaagaggctgtatatcatagtggtcaatagtgctggttctggggtcagacaagcccaggtgtgggtaacttggacttaactccttggatttaccctctgtacagctaagtatccacctctataaaatggggacaataatggcacatgcattactggattgttgtgcagattcaatgaaatgtctggtccacagcaaacactcaatattttttagtattttattatcaaaacaattcataaacttggagttacagatgagaaaattgggcccagaaaaagcatgttgtttacacaaagtcaaagatctaggcaaaggtagagggggcttgaaccgaggtctaaagttgaatgttgtcagtagataatacctacaaacacttcccatctttgcctccccaggcctgtaggagaggtagccagggaagccatgtactaggcagagcacagaggaacacaagtatttttctggtagagtctgcccaggccttggggtctgtgtttctacagaacctgctgggggagtgctagagtacactgggaggaagtacctgagcagcagtggagatggaaaggcctcttactctctaaccaagtgcaaaatgaggaccaagtacaacctgtctctccttccccatgaccaagtcattaagcaaaagtgcttgctaacagataaagcctttattgtctacagtgattataaaatgtttcttctctctgcatcagaggacagtggcctcaagttctagagtgactgtggaagggaaggatagcccacgtgttaatggcatgtctggagcaggtagtaggtgctcaataaattcagtgactgttctccacattgcctcggtacattgtgttaagtctgtaaagagatggctccactctggttaattctctgtggttggtgagatcacatagctaatgaagcccaaaccagcggtttaatccttgccagtccaatttctatttgctggaaccatgccttcagaggtgtggggccgccagtgtctgttctcagcaccaggttgaaggggccaccctttctagtcagaggactggaggaaaaatgatgctatatgagatgccatagagccagagttgggtttacgtcctagctctgcctcttcttagcctgtgaccaagggcaaatgactctctgagcatcatttctttgtctccataaagagtttagcgcagtgcctggcagatggaagactatcactactcgatgtttgcaaactccaggaacctttaagaaatggatcagtggattaggagcagtgttttcctgtagaaaaccagtactgggaacacagaggcagactgcctgatccatgagaagacagtgaagcagtgaccagctcacaccagggtccctccaggcagtgcttggcccatgccaagatgggctgtcgtactcagctgtgaactgctcaccttgctctgcagggagatcactgtcagkggggagctgctcctctctccctttctgtgcctgtgcctctcattgcagtgattatgtagacagccttggaaacggggcagcttgggagttcagcactggcctctgcggtgccatggcaaccagcttcccagcaatcacccctaataatagccactcgagagctcttccacctgggcagaggctccccaggghgttcgggcttctcttggagtaactgcacaaagctacctgttgggaacaaattatgagagggaaggagggaggggagagcatgctatctcagggggagagacgtgagaaaggaggcagacaagaagtctctagcctgtgatgtgtggagtgggcccaggggcctggggatgctgccattgggttcccggagcccactggctgtaggaatgtgtaattccacagtgggaggtagaggcccatggacacttttgccactcaccaaccttgcagagagtgaaagaccaaatatgagcgctcataaagccagccctcgctgttaccagatttcttcattaggctcctgtcgagatgctcactgccaactcatcatcttgtctggactgcagccgcctcccttacggctgcctgctggagagaatgtgctcagaggcctccttcaatcaatatctttccagaatgacagttctcaaaaaggcaccagtcccgcttggctaataaatgattattcctcacaaaagaaagacaaacagacccacaattaatgaacttgtctgtacatattagcccaaattcagtctttagattgacaggcgaaccctaagccaaacacaggttttcgcttcccctttctttagatcagattccagctgagtctccttcgtaagaaagttctaaccccacagataatgagccttccaatgctgggctcactcagagaccatatggtcctttgggtccctatctctccaagcctctgtttcctcagccataatatagagataattcttaccctagatggtgcccggcaggtaacaggtgctcttgttgtcactggtgttgcctttctgtggggccaattccctaactaaaattttttaactcattgtgaatcctgaacagataatatttaaaaataataggaggaagattagaaggtggccaaattaaccagtaaggaagaaaggatgcagtgggccaagattgtccaggaagtttttctagaaaaagacagtgagccctgaaggttgaataggagccagagaaacaggggagcagggagaggttagggaaggagcatggatccagccccagcacatgccagtgcaccacagacatcaccatcatcactgcagggagttaatcaggtcacaggtgtggcctgcatagcttacagaggacgtatgtttgatcacacgctcaagtttctttagttagttgctaacatgaaaaaattagagttcctcaaaaaatttaggccttacaaattagtctggctgtgctggagccccatttctgcatggctgcattcagccggagcagagtggaaattgcccctttatggttttgttttgtttgtttgtattttgggtttgtttttgagagagtcttgctttgtcacccaggctggagtgcaatctccgcctaccaggttcaagcaattctcctgcctcagcctctggaggagctgggattacaggcacacaccactgcacccagctaatgtttgtattttttttttttttttttttagtagagrcggggttttgccttgttggccaggctggcttcgaactgctgacctcaggtggaaactgccccttttatagggtgtggacactctagtttgccacagtccctactgttccctattgctacccatgaatgtgtcatctatttcactacctgcctggaccctggaggtaggagttattcaactctggtgcaaatgagtagtagatgggtcagacctcaatggagcatttcagcagaatgaagtagagagtaatattggaatgctgacctagggcttgatatggagcccctgaaccaggacaagggggtaggactgttggctatcagccacacagagtcactgtagatgtctgagcacaaagtggcattgctttgggaagattcaaatatttagcacatggtaggattgccggtcgtttcatgttctgctgctaagccctgatgtctctgaggagtttggcttgctctgcctttgcagccgctgggttctggtttctctgaactgtgtcggcttatgggtgtacagcaccagcatcaggaatgctgggaggaaagagtggctgagctggggttcaccagctcccttggacagtgagcctctcatggcctctgcccagaagcagcccgctctggcctgccttccctgtccagctgtataggggcagctgctgaaagggaactggccctggggtgcagggaaataataacagcggctttgcagagttgaagggggaaytcatgaactttgagccctccctttgttgacaaacggaggaggatagttttctatcactgctgtaacaaattatcacatacttaatgaacttagtggcttaaaataacacaaattgattaacgtccttacagttctggaagtcaaaagtcagaagtgggtctcactgggctaaagtcaaggtgtcagcagggctgtgctcctttctggaggctctaggggagaatggctacctgcctttttgagcttcgagaggctgcctgcctcccttggctcatggcacctttccatcttcaaagacagcggtgaccagtcttgtctttctcatatacggttattcagactttgaccctcttgccttcctatttcacttataaggaccatggtcattacactgagcccactcagataatctaacgtaatctgtcttaaggttagctgattagcaaccttaattcccccttgtcatgtaacataacgtggtcacaggttctagggattagggtgtagacatatttggggatgggggcaatggcattattctgcctactacaggggaattgagcaagagatggctggcatggtggttcactcctgtaatcccagcactttgggaggccaaggcaggtggatcacctgaggtcgggagttggagacagcctggccaacatggtgaaaccccatctctactaaaactacaaaaattagctgggcgtggtggcacacgtctgtaatcccagctactggggaggctgaggcacaagaatcgcttgaacccaggaggcagaggttgcagtgagctgagatcgcgccactgcactccagcctcggtgacagagcgagactctgcttcaaaaaaaaaaaaaagagagagagagagagagatgagaggaagccccagccatggtagataagaagccccactctttgttgaaggagcgtaggcatggtatatctcttgctcactcttgtaactctagcacctatcatagtgctttacacacactgggtactcaatacctgttgtttaaatggtgtgtgacactagaacttgttgacgtctttttatgggtacagaggtgtatatatttatgaggtacatgagatattttgattcacacatgcaatgagtaataatcacattggggtaaacggtatattcatcacctcaagcatgtactctttatgttacaaacgatctggttatactcctttatttttaaatgtgcaattaaattaatattgactataatcaccctgttgtgctatcacatactagttcttattcatcctttctatttttttgtacccattaaccattaacccacttccccctgccccccaacctctggtaaccatccttctactctctatctccatgaactcaattgttttgatttttagcttccataaataagtgagaacatgcaaggtttgtctttctgtccctggctcatttcacttaacataaagacctgcagttccatccatgttgttgcaagtgacaggatctcattctttttcatggctgaatagtacttcattgtatataagtaccacattttctttatccattcatcagttggtgaacacttaggttgcttccaaatcttggctattgtgaacagtgctgcaacaaacacgggagcgcaaatacttcttcagtatactgattttctttgtttggggtatatacataaggagtgggattgctggatcatatagtagctcaatttttagttttttgaggaatctcgaaactgttattcatagtggtttttcgaattttcattcccaccaacaatgtacaagtgttcccttttctccacatcctcatcagcattattgccttttagatgaaagccattttaactagggtcagatgatatctaattgtagttttgatttgcagttctctaatgatcagtgatgttgagctcttttttgtatgcctatctgccatgtgtatgtcttcttttgataaatatctattcatatcacttgctcatttttttaaatggattagatatttttttcctatagaattgtttgagctccttctatattctggtaattaatcccttgtcagatgggtagtttgcaaatattttccctcatcctatgggttttcattttgttgactgtttcctttgctgtgcagaaatgttttaacttgatcccatttgttcatttttgctttggttgcttgtgcttgcggggtatccctcaagaaatatttgcccagtccaatgtcctggagactttccccagtgttttcttgtagtagtttcatgctctaaggtcttagatttaagtcttcaatccattttgatttgacttttgtatatgttgagtgattgggatctagtttcattcttttgcatatggatatccagtttttctagcacaaatagttgaagagactgtcttttcccccagtgtatgttcttggcacctttgttgaaaatgagttcactgtagatatacagatttgtttctgggttcttgtgttccattgatctatatgtctgtttttatgccagtaccatgctgttttggttactgtaactctgtagtataatttgaagtcaggtaatgtgattcctccagttttgttttttgcttaagatagccttggctattctgggtcttttgtggtttcatataaattttaggattgttttttctatttctgtaaagtcattggtattttgatagggattccattaaatctgtagactgctttgggtggcatggacattttagcagtattgattcttccaattcatgaatgtggaatatctttccattttttgtgtccccttccttttctttcatcagtgttttttaattttcattgtagagaccttttacttctctgggtaagtaagttaaatccttggtttttaatttgtagctgttgtaaatgggtttaatttcttgagattatttgctgttgagatcatttttgtatcttgattttgtatcctgcagttttactgaatttgttttcagttctaatagttttttttttctttttttttttttttaatttttttttttattatactctaagttttagggtacatgtgaacattgtgcaggttagttacatatgtatacatgtgccatgctggtgcgctgcacccactaacgtgtcatctagcattaggtatatctcccaatgctatccctcccccctcccccgaccccaccacagtccccagagtgtgatattccccttcctgtgtccatgtgatctcattgttcaattcccacctatgagtgagaatatgcggtgtttggttttttgttcttgcgatagtttactgagaatgatggtttccaatttcatccatgtccctacaaaggacatgaactcatcattttttatggctgcatagtattccatggtgtatatgtgccacattttcttaatccagtctatcattgttggacatttgggttggttccaagtctttgctattgtgaatagtgccgcaataaacatacgtgtgcatgtgtctttatagcagcatgatttatagtcatttgggtatatacccagtaatgggatggctgggtcaaatgggatttctagttctagatccctgaggaatcgccatactgacttccacaatggttgaactagtttacagtcccaccaacagtgtaaaagtgttcctatttctccacatcctctccagcacctgttgtttcctgactttttaatgattgccattctaactggtgtgagatgatatctcatagtggttttgatttgcatttctctgatggccagtgatgatgagcattttttcatgtgttttttggctgcataaatgtcttcttttgagaagtgtctgttcatgtccttcgcccactttttgatggggttgtttgtttttttcttgtaaatttgtttgagttcattgtagattctggatattagccctttgtcagatgagtaggttgcgaaaattttctcccatgttgtaggttgcctgttcactctgatggtagtttcttttgctgtgcagaagctctttagtttaattagatcccatttgtcaattttggcttttgttgccattgcttttggtgttttggacatgaagtccttgcccacgcctatgtcctgaatggtaatgcctaggttttcttctagggtttttatggttttaggtctaacgtttaaatctttaatccatcttgaattgatttttgtataaggtgtaaggaagggatccagtttcagctttctacatatggctagccagttttcccagtaccatttattaaatagggaatcctttccccattgcttgtttttctcaggtttgtcaaagatcagatagttgtagatatgcgacattatttctgagggctctgttctgttccattgatctatatctctgttttggtaccagtaccatgctgttttggttactgtagccttgtagtatagtttgaagtcaggtagtgtgatgcctccagctttgttcttttggcttaggattgacttggcgatgcgggctcttttttggttccatatgaactttaaagtagttttttccaattctgtgaagaaagtcattggtagcttgatggggatggcattgaatctgtaaattaccttgggcagtatggccattttcacgatatcgattcttcctacccatgagcatggaatgttcttccatttgtttgtgtcctcttttatttccttgagcagtggtttgtagttctccttgaagaggtccttcctatcccttgtaagttggattcctaggtattttattctctttgaagcaattgtgaatgggagttcactcatgatttggctctctgtttgtctgttgttggtgtataagaatgcttgtgatttttgcacattgattttgtatcctgagactttgctgaagttgcttatcagcttaaggagattttgggctgagacgatggggttttctagataaacagtcatgtcgtctgcaaacagggacaatttgacttcctcttttcctaattgaataccctttatttccttctcctgcctgattgccctggccagaacttccaacactatgttgaataggagtggtgagagagggcatccctgtcttgtgccagttttcaaagggaatgcttccagtttttgcccattcagtatgatattggctgtgggtttgtcatagatagctcttattattttgaaatacgtcccatcaatacctaatttattgagagtttttagcatgaagggttgttgaattttgtcaaaggctttttctgcatctattgagataatcatgtggtttttgtctttggctctgtttatatgctggattacatttattgatttgcgtatattgaaccagccttgcatcccagggatgaagcccacttgatcatggtggataagctttttgatgtgctgctggattcggtttgccagtattttatggaggatttttgcatcaatgttcatcaaggatattggtctaaaattctcttttttggttgtgtctctgcccggctttggtatcagaatgatgctggcctcataaaatgagttagggaggattccctctttttctattgattggaatagtttcagaaggaatggtaccagttcctccttgtacctctggtagaattcggctgtgaatccatctggtcctggactctttttggttggtaaactattgattattgccacaatttcagagcctgttattggtctattcagagattcaacttcttcctggtttagtcttgggagagtgtatgtgtcgaggaatgtatccatttcttctagattttctagtttatttgcgtagaggtgtttgtagtattctctgatggtagtttgtatttctgtgggatcggtcgtgatatcccctttatcattttttattgtgtctatttgattcttctctctttttttctttattagtcttgctagcggtctatcaattttgttgatcctttcaaaaaaccagctcctggattcattgattttttgaagggttttttgtgtctctatttccttcagttctgctctgattttagttatttcttgccttctgctagcttttgaatgtgtttgctcttgcttttctagttcttttaattgtgatgttagggtgtcaattttggatctttcctgctttctcttgtaggcatttagtgctataaatttccctctacacactgctttgaatgcgtcccagagattctggtatgtggtgtctttgttctcgttggtttcaaagaacatctttatttctgccttcatttcgttatgtacccagtagtcattcaggagcaggttgttcagtttccatgtagttgagcggctttgagtgagattcttaatcctgagttctagtttgattgcactgtggtctgagagatagtttgttataatttctgttcttttacatttgctgaggagagctttacttccaactatgtggtcaattttggaataggtgtggtgtggtgctgaaaaaaatgtatattctgttgatttggggtggagagctctgtagatgtctattaggtctgcttggtgcagagctgagttcaattcctgggtatccttgttgactttctgtctcgttgatctgtctaatgttgacagtggggtgttaaagtctcccattattaatgtgtgggagtctaagtctctttgtaggtcactcaggacttgctttatgaatctgggtgctcctgtattgggtgcataaatatttaggatagttagctcctcttgttgaattgatccctttaccattatgtaatggccttctttgtctcttttgatctttgttggtttaaagtctgttttatcagagactaggattgcaacccctgcctttttttgttttccatttgcttggtagatcttcctccatccttttattttgagcctatgtgtgtctctgcacgtgagatgggtttcctgaatacagcacactgatgggtcttgactctttatccaacttgccagtctgtgtcttttaattgcagaatttagtccatttatatttaaagttaatattgttatgtgtgaatttgatcctgtcattatgatgttagctggtgattttgctcattagttgatgcagtttcttcctagtctcgatggtctttacattttggcatgattttgcagcggctggtaccggttgttcctttccatgtttagcgcttccttcaggagctcttttagggcaggcctggtggtgacaaaaatctctcagcatttgcttgtctataaagtattttatttctccttcacttatgaagcttagtttggctggatatgaaattctgggttgaaaattcttttctttaagaatgttgaatattggcccccactctcttctggcttgtagggtttctgccgagagatccgctgttagtctgatgggctttcctttgagggtaacccgacctttctctctggctgcccttaacgttttttccttcatttcaactttggtgaatctgacaattatgtgtcttggagttgctcttctcgaggagtatctttgtggcgttctctgtatttcctgaatctgaacgttggcctgccttgctagattggggaagttctcctggataatatcctgcagagtgttttccaacttggttccattctccacatcactttcaggtacaccaatcagacgtagatttggtcttttcacatagtcccatatttcttggaggctttgctcatttctttttattcttttttctctaaacttcccttctcgcttcatttcattcatttcatcttccattgctgataccctttcttccagttgattgcatcggctcctgaggcttctgcattcttcacgtagttctcgagccttggttttcagctccatcagctcctttaagcacttctctgtattggttattctagttatacattcttctaaatttttttcaaagttttcaacttctttgcctttggtttgaatgtcctcccgtagctcagagtaatttgatcgtctgaagccttcttctctcagctcgtcaaaatcattctccatccagctttgttctgttgctggtgaggaactgcgttcctttggaggaggagaggcgctctgcgttttagagtttccagtttttctgttctgttttttccccatctttgtggttttatctacttttggtctttgatgatggtgatgtacagatgggttttcggtgtagatgtcctttctggttgttagttttccttctaacagacaggaccctcagctgcaggtctgttggaataccctgccgtgtgaggtgtcagtgtgcccctgctggggggtgcctcccagttaggctgctcgggggtcaggggtcagggacccacttgaggaggcagtctgcccgttctcagatctccagctgcgtgctgggagaaccactgctctcttcaaagctgtcagacagggacacttaagtctgcagaggttactgctgtctttttgtttgtctgtgccctgcccccagaggtggagcccacagaggcaggcaggcctccttgagctgtggtgggctccacccagttcgagcttcccggctgctttgtttacctaagcaagcctgggcaatcaatggcgggcgcccctcccccagcctcgttgccaccttgcagtttgatctcagactgctgtgctagcaatcagcgagattccgtgggcgtaggaccctctgagccaggtgtgggatatagtctcgtggtgcgccgtttcttaagccggtctgaaaagcgcaatattcgggtgggagtgacccgattttccaggtgcgtccgtcacccctttctttgactcggaaagggaactccctgaccccttgcgcttcccaggtgaggcaatgcctcgccctgcttcggctcgcgcacggtgcgcacacacactggcctgcgcccactgtctggcactccctagtgagatgaacccggtacctcagatggaaatgcagaaatcacccgtcttctgcgtcgctcacgctgggagctgtagaccggagctgttcctattcggccatcttggctccacatccagttctaatagttttttggtggcatatttaagttttttcaaatacaagatcatatcattggcaaacaaggataattttactttttcttttccaatttggatgccttttcttcctttgtctgattgctctatctaggactttcagtactatgttgagcaacagtggtgacagtgggcatctttgtcgtgttccaaatcttaaaggaaaggctttcagttttttccccattcagcgtgatactagcggtggctctgtcatatatgacttttattattttaaggtacgtttcttctatatccagttttttgagggtttttctccttcattctgttgatatgacatatcacattgattttcgtatggtgaactgtcttgcatccctgggataaattccacttggtcatgatgaatgatctttttaatgtattgttgaattcggtttgctagtatttttttgaggatttttgtatatattcatcagggatattggcttatagttctcttgatatatctttgtccggttttggtatcagggtaatactggcctcatagaaggagtttggaagtattccctcctctatttttttgtaacagttggagtagaattgacattagttcttctttaaatgttcgatatgggcttggtgacttctgacagtgtaccaggcactgtgctacatgtcttgtttgtttttgagacagagtcttactctgtggcccaggctggagtgcagtggcatgatcttggctcactgcaacctccgcctcctgggttcaagcgattcttctcccaggtagctgggactataggcatgcgccactatgcccagctaatttttgtatttttagtagagatggggtttcaccatattggccaggttggtctcgagctcctgacttcgtgatctacctgcctcggcctcccaaagtgctgggattacaggtgtgagccaccatgcctgtcctgtgctacatgtcttatttgcttttatctcttttcatttttataaccaggcaaataagatattgatgtctacattttaaagataagttgcgtcttaacaagataaggaaaactgacaaagacaatccaacctggagatgatgaagcccaggttctagccccaatatgtctgactcctaagttcattccatgtaccatcctgagagatgtagtttargaaagaaatttgcagtttaagcagaaatctcatcttccagcccttctacatgatctcatgktgctaccagtcctaggggcccactgtcccacaaaaatgcattgatcaccccaggcatttattcatgctgattcccctgtctagataggatgccccctcctacccctcaaacaccattatcagggctcagcaaactatggcatacagccaagtctgactcacaacttttcttttttacaactctagcaaagaacagtatttttacattttcaaatagttgaagaaatcaaaaaagaatagtgttttatgacacataaaaattatacaaaattgaaatttcaatgtccatatgcaaagccttcatgtgggatacatgctcatctgtttacatattgtctatgctgctttcacactacaaaggcagagttaaacagttgtaatggagaccagatggccctcaaagtctaaaatatgtactaacctcttatctatccagtgcttcttgatcatttaaggctcagcttcttattaagtctttcttggtcataccagcccatttgctcctcacttctccccactatgaatttttggtctgtttttcctgtctgggaaaagaaaaggttttgattcattatttcttaactttgaatgaatgattagttgttaaaagacatgttgtaaaagaagtatagtagatgcagaattattttgaaaagttatgtaaaacttagggaccaatataatttcttctagattaacttttcattcttcatcacgctatgcattgtatgccttgtcttgttaaagtgtcactgtcaaacaactgtttgttgaattaatggagggctatatgaaaagcaaactgcaagggttaagcaacttggtttcattatttcccaattcagaatccttcatctgagtcttaatacgatctaaatttgcagtctccaatctgtgtctggagactatgtcattaggcccctggtagcacagtagccactaattaaatcttaaacctcttctctcactgtcctcagctggataaaggccagtattgtcagtccgagggagttcttaccctctgtgggaaaattgttggccgtttctctcactgggcaaaattattggatgtgtcttctgtatagtaaaaattactggctgcatctcaatcggcgaggcttttctctccaggggcaaaactgttgcctgcatgtctctgaaggaaaattgccatctgcctcactctgtaggaaaattgccagttgtgtccccattatggagaaattgtcaaccatgtctccaaacggaagaacgtgccagccgtgcttccctgtagaagaaatgtcagcaaaagtgagcaatttaaagccctgcgcatgattccgagcccgttcctttttcatcgtgagcggaccctcatgtcccactggcttgtttcctgtacactcactctcatctgcccgcgtcatcacagccagggtgggggtgacattgaaatgagagacacttggaccaaggaggtgtatttcaagggatagttcagaaacaagctagtatgtgtctgtgtcgcagcccagacagaaaacccagaaatcagtaccacaactggttcttaagatctgcctcaaacggaaaaacactaggcttttggactcattgcacaccaagcttgccttaagcaatgcctacttctgcattactgctgccttccctattgttttgggtacagacgctttgctaagtgattcacaagcaagatctcgtctattctcacaaccrccctagaacataggtactactattatctccattaaatgaagcttggaaggagtcaagctgcttgttcaaagctccatcatttataagcagcaaagctggagtttcaacccaggccactgtgtttggaaccacctatactgttagtcaccacaccatctaagacagagtgaacaggccttcaggatcagctgttagtggtcttgggcccctccyaacccctctacatgggcatgagttcctgtgaaattaatgaaggtccagtgtaaggtcaagagaaaggagccacacccagcaacagcctgcacctrtggttacctaatctctctcttctcctatccccagagtccacaaccagctcactgcatgcctcctttctgcccttgctccagttgtaatgaatgctgtttcactttaggtttctctaaagttggcagtcttcttcttaattctttctcttatttttgaattcttgaataactgaattcaagattttccccagattctggaaccttatttatttacccagtcatctgagccctttcagggggctcccacaagakacttacagctccatggagatctattcatatctgtacatgttataacagaaaacacgtctacacaaggcacataagatagcctatggaattttaaaggcagtattcagttgttttgactatagcaatataacccaaagtgtattctgaggaagcctgtactagaaaaacactgagctgcaaatgatttgccaaataaaaataaaatggagtggggagaaaggtatgatcaaataatactctgaagtaggattaaagcagtgattctcaaccaggggcagtcatgccccctggggaacatttggcaatatctagagacattttggttgccacatgtgggcagatggagtcagcagggcagatctagtgagtagaggccagatatgttgctgaacattctataatgccccaacaatagggtaattgcgttgtcaactcccaaaattgtcgaggtttcccaagcttatttgactttggaatctggaatgcctgacatatcacaggttgaacattttgctgaagtcactttggaaaggctacctagagtagtggggattaggaaagggaaatggaaaagccagtggaatttcatagattttagaatccaacagctgggagggacctggtaggcaacacttactccttcatattacagagaaggaaacagggtcagagagttgacagttgctgaaagccacacagatgagagagagtaggacagaggttaagaacataagctggaagtatactgagttcaaattctgcctctgttcctactagctgtgagttgtacctgagttgactgattagactaatttgtggaaaagtactaaaacctatgaatagtgagtgagttaatacatgtagagcacacagcacaaaagctcagtagatgataggtattatcaaaagccagcctggactwgtgcccagcctggattccagcccagcatccctgagtctgatgttctttccagtgtacctggatgggcacaggaagaggtgaggagcaacagaggcaccaaagtgggactatacaaggtatatctagaatgtgaggaatcctggtttgacttgtttgaacagggaaacaatattgacaaagcaaggcaaggccctgttgtggaggtggtgtgacagatgggcagagtcaagagcccatctctaccactgcctagctgcatgatcctggtgacttactgaacctttcctcctggtctgtctccttatctacaaatgagaagagtgatagtaccttccttagaagtttgagcattaaaatgcaataatgtatttaaagcttgaggaccaagaagtggtagcaaatgtcattattgttgttactgttactattggggtctccaagacatacgctcctgttggtgaacctgacatacccccagtggctaggactgggctatcaggtttctcaccaagactgcttccttacaaagggagcaaagctcttcttgtctctcccttagttctcttcctctctcctctcaatgtctctattttctggtagctaattggaaaccttgcaggtcagcagattctctactgtcatgccaagccaagggtctccaggagaaaggctagtgttgatttgtcctaagttctatcactcaggcaccagatactgttgttcaacaaattttgcacatctctgatattgcagggggcatgagaagtaaattttatggaacacacactggtgttccatttaccttccactagccagttccatagcaccatgatttccgtctgataacacagtaaaatcacacttattcacaactgtaaccacatttgtgtgattgctaaacatttgtcccctcctctatcctgtgagctcactaggagtagtgctggatctgtcttgttcattattgtgtctttagcatttggtacagggcctggcacgtatcgaaatactttttacttgtggactctagctaatatactatattgtgcatgtgtgtgtgcctgtgcatacaagacacttaacttataaatgaatgctcagcaaggtcttctacatggcatcatgattaagaacaaagattttgaagtcagatagatgtgagttcaaaatgcagctctatctcagtgtgtccctggactggttataaaacctctctgtgccttagttatccacatatataaaatgaagaatcataattcctacttcataggctgttttaacaactaaatgaaataaaacatgtaaagcacagggcctgcagtattataagcttcccatcaaaagtaattattaatactattaaatgctattacccaaggaakgaaaataattcctggagctgctattaaaacttgaatatacatagatatgtcatgaactacaaagtgctgtgctggtatgttatctgtaccttgccctctgtgtgctacctaaagccggcactccacaaataaatggtggtaggttgattgaagaattgtcatctttcatttcacatccatcttgtgaaggtgtcattgtgaggctttacagtgttgctgcactggcttcccaatatgccaagtatttgggaaacagattcctatgtataacattgaaaggcaccataaacatatacaattttgttgtcaatttaaacattataaaatagatttgagtttaaagaagagaaaatgtaaacattctttatgtctttcaaatagtccgcaggttctgtactccttggtcccaaattctcaagagtcttgttgaatgagatatgactggccagcacagaagcagtgcatgctgaaaatgaaaatagtgatggcatatactgaggacctactgcgtaccaagcttatatgccaagcaatgtggctcctctttttgcagctgggaaaactaaagctggagtagtaaataaaatgatcatggctagtaactgacagaggcaggaattgatgactccagagcacaatttactaagcccatccactttactgcctctggatcaggtgttttacttggaatttccaaacctccaatactaatgacatagctgttagttgaaactaatgtgaaaattttcttcctatctagttctcaactatgaagataccaatcagaatccaggggccttcactaatactcagccgaagcccaaaagctgagggcagagactaagacattgggtcagaggctgtaataagccatgtttttctgtttcaatgatttttttaaaatttttgcaatttcaattctgattgatcagggcttttgttgctattctcttcaatggttctgtgaaaattaacgttttggcttagttcacggtttaattcagcaacttaattatatacttgggttctttatatagaattcattactgactatgcgagtgcattgagcaggcaggaaagaagtagtcttggaggataagttaactcagcaacctgcaggccagtgtttggttcagcctaaaattgtgatataaacccttattcggtttagccatacacaattgccatctttgtaggtcaaaaataattgaatgtcagcaaatgcatatgtttcagctgaatactatacatgctaagcacccagaaggcaaagaatctgttaatttatctggctttggctccagtgaagcaacaaatattcattgaacatttgtgagtaagactctgaatacgaaaataagaccaaaatcctgttctcaggaagcttatgtcctagttgaagagataaaacaaactcatcagttgttaaaataataataataatgtgaaaaatgatagttccattgtaagagagtacctgagcaaatactaaataaatgaccagaccaagcatgatagggcttcagagaaaagaaaagatcatttggggtgaaataatatgtagtagatgaggtatatgcatcaaagagtatttggatcagtgaagaaagaatcaggcaatgaatagaagtgggaaatatcgagatatactctatacatccaacttaaaatcaaggtagaaagaattagaggcagtttgtgatgggctccaataacatactgagaagccatgcctttttcctgtaagtggaaatcagctgaagctattgagagagataataagaacctggatatcagtgcaaatagacaatccacacaaaagacattgtgggttcaatgtacactatttggctaatggttacactagaagtccagacctcaccactatgcaatatatctatgtaacaaaaccacacttgtacccattaagtttatacaaatttagaaattttgttaattttaaaaagacatcatagttacagtttacatataaggaaacctaaggcacagagaagtatcttgcctaaggtcacacaacaagtaaatgacaggcttagacccaaggcagtccagtaagaaagcaccactttttttatttcttccttttctgaagacaggatctcgatctgttgcccaggctggggtgcagtggcccaatagtagctcatccacccaagtagctgggaccacaggcatgccccaccatgcctggctaactttttatagcaatagaatcttcctatgttatccaggctggtcttgaaatcttgggtttaagtgatcttcccgcctaggcctcccaaagtgctgaatacaggcatgagccaccacacctggccaaagtttcactattaaacaccgtgagccaacaagagaaatgaaaacatatgaccagacaaaaacttatacatgtataatcatagcagtgttattcctagcagctaaaaagtggaaacaactcaaatgctcataaaatggataaacaaaatgtggtatattcatacaatggaatactattcagccataggaagaatgaagacctgatacatgctacgacatggatgaaccttgaaaattttatgccaagtaaaaggagccagtcccaaatgaccatatattctatgattctatttatgtgaaatttccagaatgagaatcagaaagtagatggtgtttacctagtactataggagcagggaatggaaagtaactgccaatggatatggagtttttggggggaggtaaagaacatattctaaatttagattatagcaatgattttgtgattatactaaaaactactgaactctacattttgtggtatgtgaattgtatctcactaaagctgtaaaacaaatttttttaactatcttaacatgactccagattttgtgcagtgacacccagataccaagggaaacagaaacagagttagatacatagatctgtcagtgccagatctatgatgggacgggtcccatgccagtccttccatgagaattaaaatccagaaactaatgacagctttttccgctaccagagagatgacagttctctattagcaacttacattctgcagacaccagccctacttaagactctcagttacactgtcagcttcctagccagtccaaacatgttagagtcagttgataaggattgctaaatttgtcttgttttgcttttgttctgcagtttttgaagagccggaagatccaagcaacagatcatttttctctgaaattatctcttcgatttcggatgtgaagttcagccacagtgggaggtatatcatgaccagggactacttgaccgtcaaagtctgggatctcaacatggaaaaccgccccatcgagacttaccaggtatagaaccccaggcacccataggtatattgaacattcccttcatgagcttttaagtcagcccctrcttccaaaggtttacagtgcagcaaaatggaaggcaatgcatggtgatacattcagtaaaatggtacaggctataagtgccacaggatttaagataacggtacatgtggagaggctagaattcaatttaattgatatggacagagcacttcatgtggaatggayactatagaggtaaacaaatggtcctgctctcatgcagcttaccatctggtggaaaagtcagatgatgaacaaggaattgagtgtgcmtctctgcaagagatggtccagccaggtgagaaaggttttcccaaagaagtgacccttaaactgagtcttaactgccatgaactagtcaggaaatgcatgctcttaaaatagtgtgttcacatggacgcaggaaggggaacatcatacacyggggcctgtcagagggtggggggctcagggaggactagcattaggagaaatacctaatgtagatgacrggttgatgggtgcagcaaaccaccatggcacatgtatacatatgtaacaaacctgcatgttctgcacatgtatctcagaacttacagtgtaataattaaaaacacagtgtgttcaaaggcctggtgtcaagagaaatgagrtgtgttcagggtgcttacaccttgaatatgaatcacaaaggcagaaggatgagcctggagatagaggcaaggggctgatcactaggccctggtaatatacagtaggctgttttgcctgtggactgggtacaatggaggaccattaaagttttacaccaggaaataacattgtgagttttactttttactgtgtgtttcactttgcagtttgccaaacagacaatttagataagaggagatgatggcaatttggtctggtgatggtagcgtgcagatggaaggatgggtaggatgaagagtcagtgaggtttgcttactgatcaaatgtgcagggagagggaatcaagaagactgtgtggaagttttggatttaagtgttgggtggatggtgtaaatgcaaggaaacaaaggaaaaggcattgtatagggtggttttgttgaaagaggaagaccagactttgaagtagagaggacttaaagaagcaaaatccaggtccaagcaagagtataatgaaagcaaagatcaagtgctggagataaactaaccctattttaagctatttggggttagataaaaagaagtgggggattctagacagaaggatttgacttacattttttccttgagatataatgtacataayaatcagcctttcaaagtgcacaattcaatgatcttagtttactcacaaaccaccattatctaattccagatcattttcatcattgacatttttaaatgaacattctggttgtgctggggaggagaaactgtgggagggacattggaagagacaggagaatagttataacattctggcaagcggcaatagtagcttagatgagtgtattagcaatgaaggtagccagattcttgatatatctccaaggtaaaagcaataaggcttgaggacaaatttgatgcgggatataacaggaaaagaaagaagcaycaaggattactccaaaatttttgtcctgagcaattagaaaagtagagttgccaagttatttagatgagaaaatcgaaagtttggttttggctctgttaagccaattaaacatccaaacagacacagcaggtagacacttcaatgtgagtctggatatatttagcttcaagatataaatctgacactcacaagtatgtagagggtatttaaagccataggactggatgagatcttctagacaattagtataattaaagaagaggtcagaaaatatgacctagttgagaataggaagaggatttggcaagagagatttggggaaactagccagtgagatgagaggagtgactaggaagccaaatagagaaactgtcttaaggaaaaataagtcatcaactgccaaatgctttgctgaatcaagtacagaagactacgaacttggatttagtaagtggagattatcagtaacctgaatgacagaggaacagcagtagagcagtgtgaataaatgtccaattggagtgagttcaagaaactgaagatgggaacattatgaggacagacaactgtttcaacaagtttrctctgaaggagaacagagaaatggaagggtagctgaaatgggattctggctgaaggaagttattacagcatgttttctgctgataggaataagccactagagagagagaccattagagagagaccgctgaaggagcaaagcccttgggggaagccagaggggatggagtccattgcagaattggctgtagatggtaagatgcaaagataattcatctatcaaaggaaggagagtagttttcttatatagatgaagtaggtttgtgaattttgtgatgggaacatgtaggtgttttctttagtaaaataagtagtaaggtcattagctgaatgggaaggaagaaaagtggtaaagtactcatctaagagaaatgttgtagggtggtagggttgctcagggatccacttgaaatctatataattgctttaaagggaaattaacctgtatgattttatgtttcttcccagccacattcacctgcttggtacaggtaaacaaagsgtagaaagtaagatttaaccagtgatggagttttgccaaatgagtacaatggaaagagagagcaagaaaggcaagcttgttgaatatatatgctaaaggagtgattgattgtaacgatgtactgctgaatcgaaggtagggaaaaggggaaataatgaattttaagaattgatagaatcaacatactagaaggagtgaactaaaaagacaggaggtaacaacagcaacagggatagcaatgacaggtacagggatagcaatgacaaggttcataatatgaccaaggaagcaaaggacaaaacacattgaatagatgagaccaygtaagagagagactagagtgcctgaataactaaaaatagtggcaggaatagtaatggaagagagacagagatacaaacttgcttcaagggatgaggattagggactcagaacttttgrtggctgaaagaaggacaggtagcaggaagcttagtttgatggcatgacttcaaaggagttgaagactttaaataggaatagttgtctggagcaacaaggagcccagctacccaacactggcatgtggagtgacagcaaaattctagctaccacttgagtgtcttcagaggagatccaaattccagtcagaggaagaagaaggaaaggttcagagaggaggttgaagactttgatgactctgtgttccagcagggctggagaaaggtttgggagccagaattcacagccatatatgtagtggagatagctttgtttcccctgtggtccatcgtactccctgttatttagtgttcctgtctcctgaatcctacctcgacttcagggcttggctccacatcacttgcccccaagctttcatttgcagcccttcatctttagcccaggactagagtcacctcagtgtcctcttccagctgcataagacaaaccttacaggattcgaatccttaatgcaaaagaaagggcagtgggaactaggacccrtgtgtggctgctggggagccttaactaggaagagtagatttaggacaaagctagttttagaacacagccagctagcttttacgtgaagtaatttaaagatgatggtaaacaaactctgattcagtgagcctccagaacaccatgatagattgtgaggtccagtgggaaagaaattagttaataggttgtgaggtccagtgggaaagaaattagttaatgaaagatcagttaataatgcctgccctgggcaaggagacaggtaatgctactattatacattttcatacatgcmttcacagatctcaatcacatttccgtgaataaaaggctgcagacttaagtatgattagctattttcaagtttttccatagaacaagggttggcagactgcaacgtgtgttccaaaccagccccctatttgtctttgtaggtaaattttattaagacacagccatgtacagtcatttacatatcttctatggctgcttccatgcacaatggcagagttkagtagctgtcacagagaccatayggcccacagagcttaaaatatttactatccggccctttggagaaaaagtttgtcaacacttgaaatataagaacggaccaatagagttggctctttgtttgcctcatagcagtccactaactatatgacactggactcccacaaataaatatgagaaacactgtactgggacactcagtctggcgtccaaaatcccatgcacaaattaataggatcatagaaaagtcatactaggaacatgaagaaagaacatcaaataggatgagttttaagttctctcttgctccaagctctagaggttgctcatgtatacatctcactttattctttcctctagtagaaaaaggtccctctggtttgcctaagaagactttttttctgtgcaacaaaacataaatacagcataccttcatagtagacattctttttctttaaatgctgtcaattggaggcagataggagctacccagaccttaggtatggtggagaaataatggttcagactaggttttcccttgaatctatcccaacttctatctttcaagaattatttacagagttctcagcaatgtcattcctgctaatgggcgtgacttccaaagcacacatgttttgacacttatagaaacactgcaggtgagtaataagacaaaatgccgaaggtgaatggtgacagatgwggaaaggttcatcacaaagcrgacatatggaactagaccttaaaaaccttgccactgcccagtttatatacctttactgctgtgccccctagygaaggtgaatgagttagtttatagcagagatgcctctgtaagggcaggacacagcctcacccttgcagcccccaaatgcacctaacaatgccaagagcactgctgtaggggtattcccttgtcaccaaagcactgaagctgttaccctgacaaggcctggaactgtttggaagtgagagagtaaaggtgggggaaaattaatttgcagagttagaaataacttcctctgtccaaataactcagagcttttcaaatacccagaacatctaatggaacataggatgagcctgacctcgttcctttgcccaagactaagagcctgaagctctgcatccagcagaactgttggagtcgaaggaagagaaagagccgcagttgcaggaaaaaagagatcgaatcatcactcttaacttaaacaccaatgcccttggtagcctccctctgctttcacacagttctatctccttctctctcagcctcacttgagttcattatcacagctccygtcaaggactgaggacccaccagagcaagctggaggcaggttgctagtgcagctcagagtgtgcactccagagcctgataccggggctcagttccctccccttctgtcactttttctgtgtgatcttggacaaatgatgtcwtatctctgtgcttcatgctccattaaagtaaagagaatgaaagtacctacatcataagatggctttagagatgaaatgaggttttgacagataaagcacctggctaataatgacaagccagcatattgggtatgcccgttattattgccactccgtgctagtgggttcaggaaggattaccttcaaaacagagaacccaggctastactctctgaaccttattcatctatttggcatctacagctgagttgctgaatgtagctggagaaaaatattcaactatgcttgatgagccttatttgacatacatgtccaacaacgtcaagtgtcccctggtgccttccagaaatctgacactgtttctcaaccctttctctctcctgctcactcttagttgataaccatgctggctgctttcactggaaaagagaaaccaggaaagaatcgccacatactccaggacagcacctttcacctcagagtctactcgacagctccacatgtagacatctctaaaccattgtacccaaaagtgaacatggtacctactccttccacttgctcaggagaaagatcagggagtcatctttgactcctgtttttctctccacacctcagagttgacccaagtcctatctgctctttccctaaacaaaaggagaatctgaccagtccccatcactgctcatgccctggtccaggccagaatctatcactcaggttataactggtctccctccctttgcctttgcacccttaggatccattgcaacacagcagattcagcaatcctttctgtgaggtctcttcttcctcagaataaagggcctatgtaaactgatcatcctctcccccagctgcttactcactcctctcccaccacactccctccaggattcctgcctctaggcctttatgtttgctgtttcctatgcttggagagccttcccctcaccccaaacccagacatcactgtggctcattcatctcctgcaggcttctgctccagtgctacctcatccagtgaagccctgactacttgccctgtataaaataatacacccccgacaagatctcccaggctctttttccatacacttttgttctatgattttatcaccatctaaacatcttatttatttacttggttatataatctgtcacctgacactgggtcaaaagcactgcaaggatatttggctcactgctgcatctcaagtgcgtagtaggtattcagtaaatatttgttgaataaaagactgcatgaatggtgatctctaatgcctgtgagcaaatcagcttagaaaatgagaatctaccacttatttagtcttactggatgccactgtctatacaagcaagcttgattaatccatatcatctacatgagaagctcatcaacccatcctaatgtcctacagctaaaagggccaagcctaggttcagatccaaggccatctgattcaaagagcatgtacaatgaaagatttaacagctcacatcagaagaggaggtgtttgcagaaataattactgtttaaaataataactgaccttctcgatatgtttcctctccaggttcatgactacctccgcagcaagctgtgttccctctatgaaaatgactgcatttttgataaatttgagtgtgtgtggaatgggtcagacaggtaagaaaggctctgtggctgaagaaccttccaaagaytgtcttgaagaggctcagggaatttatcctaagtagagtacagccaaagggaggtcaaaattgggccccaaaacctggctgaaatgcataatgtgggcccctagtgacccttgaagtcaaggctggaaagaagagaaggatgtagtaaggcctttgaatcctgtttctgaactggcacagataacaccttaatgttaataagaaagtcctatctttttcacacaagacacctccagcactaggtcaacatgcctaaatgaagatcacttatccaccagcaaattccagcctgaacagttcagattamtgccaagtaggctttccagatcaaaaattatcccttgaagctgctagtggagacctggccaacggccctggtagttcattaactgaattctagtcaacctcatttatcacattccctcaaagtgatttattactattttaaggcctttgatttgaacagtgcttcataatacctcccaatagttcatttttagtttgacaaatacaaatgattctctgatttccatgagaactaagtgcaagctaccaggggctgatttcgttccttgatgaaggtggcaccaataatagtgtttgaaagcatagaaattctgttatggcaagacattcagagattcaagctttcagtgaatatgaactgtctctctctcacactccacctgtttcttggctttctttgccactgatccaaaatgaatcccctccttagcaggcttggaaggagtctccacgtggcaaaggacccaagtcacactgaccagttggtataggacagagagcaaagcaactgtgacataagaacaaaatccaccatgggaaaaagaagccagccctctcattttattatttatttataggtatttatttattcatatattattatttacatatctgttattattgctcaagtttttcctctatcttagccttgattcaaaaattacacttattaggcacctactatataccaaacacattcgtacacatcattttatttaatcccaaccacagtctaacaagattgcttccatcgttctcattttacagttaaggaaactgaggcttagcaagataaagtaatctgcccaacctcataaagtagtaagtagtagagacaaaagtaacaagtttagagtttgaatcctaagatcaayactctttctataacatcacaactgggaagtttaatttctctttcagataaggttggtagtctttttttttttttttttggaaaataatctcttacttgtttaaaaataagtcgggtcatggtgggcaagcaaacgtcaaagtatgggaagcagtgaggccaaccggctgaatacttatgccccagagtcaaccatatgtgggtttgagggtggactttaccaccaattagcaatgtgacactgagcaaattacttctctgtaaaacccttttaggggataatagaagttgaaacgagatcatggaggcaaagccctcagcgccctgcctgacaaggtgataacagtccactcgagtacacagacacagttcacagtatcagtttgatgagccagagtaacaaaatctaacctttgcttaatttacctggtacaggtgacaaygtgcccaaaaacacatcccccttgctgtggcccaatcttgtcagctttttccttcacctctctacacatcccaaatcatttgagaaatacacgagagttcctgctctcccatcttaaggagccagtcagagctccacccagaaatgagtaggagccccccactccaggggaaccaccgtgtgatggcacttggggtacttgccctggcccaaggaatctctccctccccacctcagcttgtcaccgtgtctgaaatgtcaccattaaacattcagtaccttgcctctggaagacattgggtgtttgccactctcctgatcgattgcagctatgcctaagaggggataacttataaaaatgtggaaaccatctgtccattaagtgtgggaaaaaaaccatataaaatctttttatttctccatcccagattcttttaaaatttgaatttccttacttgtttcctagataagaccatgatgacatccatttcgtagataagttttctaaaaaggccgaattcagagctagttctcggcaggggagaggtcgcgccccgggttcgtgcacgatgccactagcatctctcccctcactgcactgatgccatgaagccttagaggccagacggcccaggaaccctgttgacagtggccaaaccttaaacacgtacaactgcttattgttttcaaaagtgtgtctacttcgacaaacctcattctagtctcacattcctgatgggaggtaggtaggactgggatcattaaaaccagtggacaccttttctgagccaaagaagcaaaaagaatctattgagcaaaagcaaattacaaggagagttctcaccatccctcatttccaaacccagccaaaaatcctattgctttcagtgattcaaaaaaaaaaaaaaaaaacacaaaaaaaaaacaaaaagccaataatcacactgcagagcctgttctcattttttggtttttgtttttaataaaacctatggtgtcataagctggccataacatggtatcatttgctccaaaaagaaaagacagtgaagatatgtcattgcctttgctctctgccttgcagtgtcatcatgacaggctcctacaacaacttcttcaggatgttcgacagaaacaccaagcgtgatgtgacccttgaggcttcgagggaaaacagcaagccccgggctatcctcaaaccccgaaaagtgtgtgtggggggcaagcggagaaaagacgagatcagtgtcgacagtctggactttagcaaaaagatcttgcatacagcttggcatccttcagaaaatattatagcagtggcggctacaaataacctatatatattccaggacaaggttaactaggtggacaagttattacttaataatctcacatactgaatactagtcaaacaagtttttaaatgtttctttgggtcttcatttgatgcattgactttaatttccctatacaggaaatgattggaatagaattaaaaggagtccaacattcccagctccccagttctaagaaacttttgtcaaacccaataggtttgggacacttctgtttagaattgaaagctgccagctaacagtaattcttccatagttgacttgaacttctgatgcttttattgcccagttttctctggtgggtccagtgttttgttcctaggtgtctgctgcgataaaatgaggttgtctgtagtatttaaggagaaaagagataagttttttttaattaagcaattccatttgattgaaaaaaatcaacaaaaaataaacaccgtttactcttagacaaattcttcttgttttgtgaaaaaccagaactagtcagtatctcctgcccctccaccatttttttttccattttccattttcctttgaacaatttcatttaagccagagatttattgcatgaagctgagaagaggatgcagaatgacaaggaaagggcacatcaaccctgctatgctctttttttgtaagctccatagaaacagcctgagaatttggctagggaacttgaatgcttcaggggacagaaagagagcactttcgacacagtgcttcccagagtgagcttggcagggccaggcggggccaaattccatcwgctgccttgttactcttgctttttgtgctcttaaatggctccatataatcttctacttacatgttccttggcttttttytcttcaaccttttccagcttatttattccattgacttctaaaggccgagtcctgggtgcttattatctggtgttctaaatgaagcagtaagttggaagcagtgccaccacccctgagtccctgagaaaggctggtctgttctttttgggtgtttctcctaagcagcaccctcccctcctcctggttttggtaaccaaaagtaacaatccatcaacctccattgtacctagaacaaaaatagccaataaaaacgytgagttgtgaagtccaatcaggcacttctaactcaccccaagctcgccatctggaaaaacagaccagaaggctctcttctacagaaatgaactgtggggaaatcaagcagctgtgacatgaagtgaatgaagtccacttgaagctgtggaagatggttcatccttttccccagttgaggatccagatttataacttctagaaagccatttccagaaggttctatgtggcacacccctaggaaaggcactaaatgcatgcaaaggatttataaacttaggaaagtagatgggtggagtccagaaaactggttctgggttaatatctctacatctgtcttgatgactcatttctcctaactcccatttagtgcagggtaaatggtttgagatgagagtttttcaatgaaagggaaattttctttcagtttacagatgtattagaagtcctgactttcaagtgtaatttgctttggaggaggaaaaaatagtgaaagaatcattttatctcaattctaagctactatccatttactaatagctttttggcaaggaaataactgtcaccttaggtaaaaacagtcttgttagatgcagcccaatttcaggaacattaaaatgtaaaaaagtacgtctcagaattgagggagcatgggaacaaagacgagactttctcagtatttctcatttttcctgcaaggaaagcctcgccttaggcatctcaagtaaagtggctaaggtgtaaactctctgggcaagatttctgtcctgactgggacagtgttcttggaggagacatgagagagtcagaaacttctgccagtcatagagagtgatgattttgcagaaggccactgggttattggcctacatttaccaccgacttcctttatggccttttctccacttctccggactcagctcctctgtctgtaccacgtcgggggttgggaccaatcattgtatctcaaacttaagaatcaactcacatttgtactattactcatgtaacatttttttaagtcaccttttcttaaaagcaagacttagcctcctccaaagaaataatatgcatgaaatttcaactctgatatgctaggtttttccctaacattaatcacataattatcaatgtaacaaacatgcacccacataccacctgaaatcattttgtgaaccaccaggagcatgtgtatcaaactttgggaccctgagtaactgatatgacagaagatttatgcccttaggggcatcaaagatggtggttcttcacatattagagtcagcagggctgcccataacacacacaggaataatttttgtcatggtttaaggagttcataggcccctttgcagtttatctgcgaactccaaataaaagcccctacactagtccaacacccttagcatatagatgtacaaactgggatccagagtaggatgagtttgccagagaagaaagagcagagggcagccatcctctcctccatcccctgcaaaggatgcattagagcaaacacccaagactcctggacgggaacaggaggggaaagccctagagattaggcctcagggagcaataaccaccacgatgtttcacaaattaactgttctttaccaggtactgaactaggtattttacatgtgtgatctttcagccccagtactggcaatatttcttagttagtggcacatagaagtcagtctgttttcctgctgacactaaaaactacttgaaggctgatttgctaccttgcaacagttggttcgattctaagggccctatactactttaccccacaaggcctgctgcttggtaagagccatcagattacaactggagggtgtcagttgaatgaaggaaaatggaagccacgccatccctggcttttacaaaaaccatccttgcgcaacattcagttcctgacgttaaaaacaagtaatgcaaaaagctgaactttggtagacattcgtactcttctgtcaggaggaggaagattagttagaaaaaacaaaaaaggaagatactagccagcatcaagaagtgggatatataaaggcagatgggcagtgggaatcaagttgcttcttaactccttcaagtttggctcctgcctttactcttccattgaaaaaaaagcacctttaaacctctcattgatcttgtaattaattcaaccaaatcaacttctattaggcaaccagcatatataagatggaacaattgcaaggtggaataaagatgaagctaaaattctgctagctcagtggcccaatgaaataagtcagctatctccactaaacttcctttgaatattctagggtccattataataaaaggtacacactcaaatgcccaatttctaaggacttgaaaagccataatttccctcccttcaagcctacagagcaactgcctaaagcttccctccccagacaaccccaggcctcatttctttttcagtccctttgctagctgcctgcagggctcaagaaagccctggtaggcctcataatgaggatttagggatgacactatagtccacagcctgaatggtggaacccttactaattttccctcttccgtgatgaatgtgtggatgaagccggtgtgtttttaataatgccaccccacttccaaaacaaatcccctgacacagtctttggacataccaccctgaatgcacccgatctcatctgatcttggaagtgaaatggagtcaggcctggttagtctttggatgggggaagtctagacacaccactgagaaacattcacactgcaacctgattcactgtgcatccaacatgccttcatccacctcttccccctgaacttctaagtcaactctcagggactgctttccaagggagcaaccaacctggtcagtggaaaaaggatgagactgggagacaggaaacgtgggtcctgctcctggtaaccatggaacttaagctacccactcagtccctatgtcagtgtcatcacctgtaaaatggccagaaagacatctatcctagctcagagaattgttattgggagaacaagaaatccatttacttacaactattttgataggtttaaagcaccataaactaataatagcaacaacagtgatgggtaatatactattgctttccatgcctcatctcattatctcctctcccagaccccatggtggcattagtatttccattttgcaaatgagaaaatagactcaagttgtcaacctagccaagggcacaaagcccgagagagatggaaccaggactccaactcaaggtatctgactctaaagccagagctgttaaaatacagctctaacatacaatagttgctaacatttattgagcacttattataagccaggctttgttctacaaatttcacatgtattgacttatttacccctaaaactccagatgcagatactattgttgttctcattttatagatacagaaacagatgaatgacaaccaaatttacacagttcacaagtgacaaagccaggcagttttagttaaagttcttatccactatccccatcatacattatgtgtgtgtgtgtgtgtgtgtgtgtgtgtgtgtgtgtgtgtgtgtgtgtgtatgcatgtagatggaagttactgatcagaaaacaagccccagtaatgacccataagctcaatgaattaaagattcattggttgcctgggatgtgtcaggcagccaggttctagacaaggggctggagttactaagatatttaaaccactggcccctgccctccaagagatgacactcacataggagaaagtgcatatttgcatactgtaaacatttttacaatgagatatctatgaagggcagaagtcatacagaggaagaaatagttaatcaatgagtgataagaaaaggttctcagaatgtgtcatctaagcagaattttaactaaatttgctcaacaaagcatgatacagcgtttccaataggtagaccaacatataccagaatatgaagcaaaatccatatggcatggaaacagaaagccaatgtttctctccttccattagaaacacattttcgacatactagaactagcctacccctttttccttttgttcatccaataacaaatatttattaaaccttattttaagcactgtatttaagtgtaaagtagacggaaagaataaaaggaaaccaatatttcctgagtagttattgcaatgacaggcattgggagaggcactgttttaaatcattgttaatcacctgataggtagatgtattattccatttttatagcgagaaacagactcaaaagggttagatgacgtagcaggaagttttatctagatctatcctgttccagatcctatacttcttccatcacagttattggtaatgcagagttaccttggcttgattattttccctagcgtggatactcacaaacacgccatttctctgtgactaaatattgcctgacagctgaccaagaatacaaatttggtctgtcatcaaagcagagagtgaagtcaagtggctcacaggtctccaacttctgactttgaccttattatgactgattaactgtcccccaatttagatattccatgccccattggttaaactgctggtggcagaaccatcatgatctgccatctccgctgatccctgcctcagctgcaatcaaagcaatgatcactgtcaggccagaagaaggggcttagccactgccaagacagatcccagtccactcccagccttcccgcccctgctgctcattccccaaaaagtcaacctgggttttcctgggtgaacagtgcccactgaacagctcctgcttgcccatctcaagccctctcagttgccactccaatcattttggctgctgtatttggtttgagaaagagtggagaggacacttcttcataactcatatttgacagaaacccagaaattgtaggaacaagccatgattgctgtgattcttgctctggttggctagggatgccctcccttccagccagagtaatacatacttgtgggagtcatggaagactgaggaagctggagtagaagggaacaggggctttcctcagtggtaaaaggaaaagcaacattttggaactctaaacagttgctcagttgggcgaatttcatgcattcattcattcatttactaaatggttaatgattgttcatgtactgcctgccaagcccatgccagggtggtctgtggaagcagcagtgacagctccatcttcacacagctcacagatagcgggaggtgcagacaaactcacaggcaatggtggcagtggaatgtcaagagcccaggataccgagcctgccagcctgcctgcctgggttaaaatctgagctccaccatgtaaaagctgagcaacctagaaaaatgacaacctctctgtgcctcgattttctcattatgagataaggataaaaacgacatctatctcataaaattgctgtgaagattgcatgatttaatatgcacaaagctcttagaaggatgcctggcccacaaatatgcattcagtgcacatttcttgctacagttctgctaatcctataaaacatatgcactatgatggatgtgtctgggtgccaggaggacacaaaggagcactaactcatccagaccagaagcttcccagaggaggtgattcccaaggtgaaatccgaaagataaagggagtgagttatccaggagaagagaaaggaaaagcatattccagacatcaggataggacagtggaggcaaaacagcatatgctatatatatatggaattcacaacactctggtatgactgattagtaaaaagtaggaaggcagaccaagagaaataaggagacatggtaaggtgagtgggcaataatgcatgatctgaaaaataataatgcatggacttagtgtggttcacatatcaggagcttctccaatagccaggctatgaggcactaaaatgaggaaatatggtttccaaacttcgcaaatacttatagtccagccacaggggatatactgataaactcagctcaaatgtcacctcctcagagatgctttctcaaccacccttagttccatgaggactgcatcattgtttaggccactcctgtatccccagagcacagaacattgtctggctcatagtaggtgctcaaaagttttgttgaatgaatgaacaaataaacgtgtaaggaagtcaggcacagcacttgcccacaggaagcttataagatgagcggcatgccattgggagtttgaatgatatatggagatccaaacagggcatcagaggactgctcagaggagtcagggaattaagaaaaaattgggagccagtgagccaagatgtgttaaaagcaagtgatcaagcttagattgcagtgttagttaatagagcatatgtgtccctgcctgatgcattaccttccctgcagtagttagccttctgggaccctgaaaagcat

SEQ ID NO: 94316 - DNA, 25998 bp, Homo sapiens
tctttgctttaagtcactcttaaatatgtgtatatggttgagaagtgtgggaaagccagagagaaacatctatttattttttcattcccagaacttcctcccataccaggctaggccaggaggtaaacagagcaagcagaaggaataataataaagaaccacaaggccaggcccagaggctcacgcctctaatcctagcactttgggaggccgaggtgggtgaatcacctgaggtcaggagttcgagaccagccccgccaacatggtgaaaccctgtctctaccaaagatacaaaaattagctgggcgtggtggtgtgtgcctataatcccagctactcgggaggctgaggcaggagaatagctggaatccaggaggcggaggctgcagtgagccgagattgagccactgcactccagcctcggcgacagagctagactctgtctcagaaaaaaaaagaacgaaagaaggagccaccaccaacactctgacctagaggaaaaggggagacactcatctcagaagggggcccatgtgctgtttaacttcaggctcagccgcccagccgaggcttactctgcgctggcttgggaatttgaaatgtggcagtgaaaactcagtcatcctcatcagagaggtggagggagcccgctgaggataaaggatggagcacacacccttggcattcccagagggaggcctttctgccctaaaacagctctcaacagtgaagtaacctaggttgagaccaaactggacaataaaactgtgatttcggccagggatgatgcgatggctcaagcctgtaatcatcccagcactttgggaggccgaggcaggtggatcactagatgccaggagtttgatacctgcctggccaacatggtaaaactctctctctactaaaaatacaaaaattagctgagcgtggtggcgggtgcctgtaatcccaactactcgggaggctgaggcgggagaatcgcttgaactcgggaggcggaagttgcagtgagccaagattgtgcgactgcactccagcctgggcgacacagtgagactccatctcaaacaataaaataaaataaaataaataaaaataaaaactatgacttccccttagaaagaaaagcccccaaagaagatggttctatgggcattgcctggttctttctcttgcagctgtcggaggaaggggagatcgtagatttgctgctgatgaaaatactcagtttcctgggcattaagtctaagagagaggagcctggaagcagcagggagcagcctgggtctctgtcccagactcgccactctcgaccagcacaagctttgcccaaggactaagctgttcgtccacacgccaccatctaccagtggggacgcccagggcctcgggcgtacgcttaccagcgactctatagtctctctaggtcatagctttcatgtccattgaagaattaccaagcccagcaagtaaaaaaaattacaataacagagatatatgtaaaattgccaatactatgagagcttctttgttcaaatgtatttcctcttattataaataaaacaaatattacatggagtttggaaaatttcctgcacagactaattatttcgtctttttagtccgttgggggttgcttttgaatgattctagttcagggcttctcaaactgtctgagagatgctaatggatgctgtattagtttcccagaacaatgtatcacaaacgaagtggcttaaaacgacagaaatgcattctgtcccagctctggagcctggaagtgtgcaatcaagatgttggcagtggccgggcatggtggctcacgcctgtaatcccagcactttgggaggccgaggcgtgcggatcacttgaggccaggagttcgagaccagcctggccaacagggtgaaaccctgtctctactaaaaatacaaaaattaaccaggtgtggtggcgggcgcctgtagtcccagctactcaggaggctgaggcaggagaatcccttgaacccgggaggcggaggttgcagtgagcctaggtggtgccactgtactccagcccgggcgacagagcatgactccgtctcacaaaaaaaaaaaagaaaagaaagaaaaaagatgttggcagtgccatgctccctctgagggctctagggaagaatccttcttgcctcttccagcttttggtgttggccagccagccttggtgtcccttggcttctagatgtgtcactcccagatgggaagaagcttgctgggagcctgtgttccttctccttttctcagcacaccagccatattgaattaggggcccaccctagtccagggtgacctcatctgaactaattataatacatctgcagggatcctgtttcccaatatggtcacatctgaagaactgggacttaggactttgacatacctctttaggagccacaattcaaaccagaacaggtgtcattcctccaaaaatgtttctgggtcaaataaatatggggaatactggtttataaaagtttttttgtttgtttgtttgtttgtttgagacagggtcttgctctgttgcccaggctggaatgcagtggcatgatttcagctcactgaaacctctgcctcccaagatcaaatgattcttgtgtctcaggcttcccagtatctgggactacaggcacacaagagcatgcctgggtaatttttgtatttttttgtagagacggggtttcaccatgttggccaggctggtcttgaactcctggcctcaagtgatctgcctacctaggcctcccacagtgctgggattacaggcatgagccaccgcacccagtctactgtattgttataagaggaaaatatgtctatcagctcaaagagatgaatgggcccctctcaaaacacctggaagaaatgaccacctggaattttccagagcttatactcaatgggcaacgagatgacctttaaaatctcaaaccaggaggttacaaagattactaggtagaaaaagaaaaaaaattttgactgtcttcaatgctttttaccaaaagaaaaacacatgtcatattttttggtggaagggcctttttgtagcccatatgttgatgttgatgtgtgatctttttcttcccatcacatgagttagtgaagctgagaataaatatgttagggtgtaagtggcacgatgctgcactgtcttgtaatgaaacaacaatagaaaacaaaatcttgacattagagaaggtagccaagatctgtagtgcagggtagaccagcgtgatccagtcagcatcccaaacgaaagcaagcggagcagagcttaagagcaattgctggccaggcacggtggttcatgcctgtaatcccagcactttggaaggccgaggtgggtggattacaaggtcaggagttcgagaccagcttggccaacatagtgaaaccccatctctactaaacatacaaaaattagacgggcgtggtggcacgtggtcctgtagtcccagccactcgggaggctgaagcaggagaattgcttgaacccgggaggcagaggttgcagtgagccaagatcacgccactgcgctccagcttgggcgacagagctagacttcgtctcgaaaaaaaaaaagaaaaaaagaagagttgctttctaatcagtgtagaggccaaggtctactactgccacctaggagctacttaagccacaaaaacgcctccccgatcccactcctcggaagtgccttcacctctgagcctcatctatgaaatgagtgtaacacctgccagaaagaggtttggagaggattaaaaagatgtgtgcatagtgccaggcacatagcaaaggctcaatagatgggaatgatttgctcaaaagaaagtgggcatgacggcccttgcaagccactgcacagatgtggtggcaaccctaagttcatagcagggcagaagctcagtgcaacaacgtatgggctccccaaacacacacacactccatggtgtgcaccctatggtactgtttccggtgtttgaacaagaacaactccattttgaatatgggctgggtaaaatgaggctgagacttggtgggctgcattcccaggaggttaggcattctttttatttgtatttttttctgaagcagagtctcgctctgtcacccaggctggagtgcagtggcgtgatctcgactcactgcaacctctgcctcccaggctcaagtgattctcgtgcctcagcctcctgagtagctgggattacaggcacctgccaccatgcctggctaaactttggatttgtagtagagacgggggtttctccatgttggccaggttggtctcgaactcctgacctcaagtgattcacctgcctcacttagtcacaggatgagctagggttggcacaagatacaggtcacaaagtccctgctgataaaataggatgcggtaaaggagctggccaaaactcaccaaaaccaagatggcgacctctggtaggtctcactgctcattatacgctaattataatgcattagcatgttaaaaaaaaaacaactcccaccagcgtcatgacagttcacaaatgcaatggcaacgtccagagaagttaccctatagtccaaaaagcggaggaaccgttagttctaggaaatccctgccccttttctggagaactcttgaatgatccaccccttgtttagcatacaatcaagaaataactataagtacacttagtcgagaagccatactgctgctctgtctacgaagaagccattcttttttttctttacttctctattaaacgtgctttcactttatagactctccccaaattctttcttgcatgaggtccaaaaaccctctcttggggtctggattgggagccctttctgtaacagtactaaaggtgtgtgtgtagcttaaggtgtttttcagaacagtatttctttgctgactcatggccactccataaaatctgtgttaaaggtgaggtttttcccagaacctaatttttttctgacttcttggattgggatgatgacttcggcttttctcggaaggccttggtcacaccgctggccgatgaaacaaggaattgtgcacactgggtctcagctctctgcgttttgaatatttctgcattagtgactggcttgggtccagtctccaccaagaagccacttatgacccttggacaagtctttattcctttttaagtaagcttctggattctgccggtcctgtttggggtccctggggctctttgagacaggaacgttacagagcagttgaaggagaatagaaacttccaggctgcagttctgtctaacaaaaggaaactgttgaaatagctgcacaagctatgggctaagaccctgaaaaaccagggtgtgggtcaacctggctaaaaccaactggacccaacgtggtgtggctttgacctaggcttcacctaggactcattaacatactaagtcacacacccaccggcaccacaacaattccgggaacacccatatttggtgtaaaaatgggtggcaccacagttctgacaagtctccaccttattccagaaacctttgtgcatattccatttctcaaagaaacccataaagatggaaaccccaagccccattgtgtggccctcttttgagtccgccctttcttcagtgtgtactttgcagtaaacctctgtactttcacgactttccgacttgttcttgaattccttcgtgaggtggtgaaaccacctttgaaaacttatgacagaggcagtaaaagagatacacatgtggaaaggaacccagtctggggctaggccccgcccccctcctgcgggcagcccaatcatacccaggcccgccgcgctagtctccgcctctcggtgctgcctcttccgggcctcaggttcttccccatgcccacgcccctctttcgcgtcgccgtatccgaggtcgcgccaggccctggagtccccagtctccgcgtgctggccaatcagaccctgcctcgccccctcgcctgggagtctccgccctccacgctctgcccagtcaggctctgtcccgcccccgcggcaccgcctccgcgcctccatccagccggctccctccggccgcgaactgcccctccccgccccgcctcccggcgcgggtggccgaggcgtagcgctgcgacccccgcacccctgcgaacatggcgctgcgagtggtgcggagcgtgcgggccctgctctgcaccctgcgcgcggtcccgttacccgccgcgccctgcccgccgaggccctggcagctgggggtgggcgccgtccgtacgctgcgcactggacccgctctgctctcgggtaagcgcggcgggcacgtgggcggctgctccctccccgcctgggctgcttgtcccgggcccagcgggacacggaggacgccggggyaccgctcctgagccaccggggcggagcgagcgcggaccctgcccccttcttatttctgttgggatccctggctctgcggccgcttctcccccttaagtagcgggaggacccgcgagtagcctttgccctagggattgcatgcagccgggagggkaggcctgcgggacaccgaggcgggggtggcccggcgggtccggcgggcaggtcggccgcttgctgcagaagccaggcaygtgtcgcttaagcgtctcggtggccttaagtttatctcccatctgcgtgcatcgttgagaccccaaatggggaggcctttagtttactaaatggaccgttactgagaactccgaagtaaaattaaaacagaagcgcttattaaaattaaagcaccaggcagggcgcgttggctcatgccggagggcggatcacgaggtcaggagatcgagactatcctggctaacacggtgaaatcccatctctactaaaagtacaaaaaattagccaggcgtggcggcatgcgcatgtaatcccagctactcgggaggctgaggcaggagaatcgcttgaacctgggaggcagaggttgcagtgagccgagatcgcgccactgcactccagcctgggcgacagagcaaaactccacctcaaaaaaaaaaaaaaaaaaaaaaattaaagcgccagatctagatttttttactagataaaacaatcataactttgaagattcagctatttccccaaaacaagtaagataaagtcttctggactcaacagaagttctgctaaagtttgtattggatcattcatgtgtgtgcttgctgaaatgagccctaactcaaacggacttgaaataactgggaaacctgcccatgaatgtttcggccatttgtgctacttcagcacaattattgcaggggaaaaacaattttctttttttttttttttctttttattgagacggagcctcgctctgtcgcccaggctggagtgcagcggcgtgatctcggctcactgcaagcgccacctcccagattcaagcgattctcttgcctcagcctccygagtagctgggttcactggcgcccgtcaccacctccagctgagttttgtatttttagtagagacagggtttcrccacgttaggmtggtctcaaactcctgacctcaagtgatccacccgcctcggcctcccaaagtgctgagattacagtcgtgcgtcaccgcgccaggccaacaattttctttaygcccaaatgtttgagacactgactgctcctctgcttcgattgcgtagatcagtgatggctcttgtctcattagctcattgttttagaaacctgtttggagctggaatggttgataaatttattccaaaatttgtagcataaagatttacttatgctgtcttgctaatagtctgttcgctctgtttctgatagggatccctacatcactaatttgaatacaaaggtaaagcatttctcagataagaatttagtttcaagtctgtggttttcgttccttttttttttcttcttttttgagatggagtctcgctctgtcgcccaggctggcatccagtggcaggatcttggctcactgcaaccttcgcctcccgggttcaaacacttctcctgcctcagcctgtggagtagctggacgacaagagcacacctccatctcaaaaaaaaaagagaagaaaaattgactaatactaatataaaatattttatctgactagtgacattgaaaaaggaaaatgcaaaattttcataaattgctcacaactcctaattttccgaggccaaaaaccacctttttcaaggcccagttagaaagtaattattgtccaggcacggtggctcatgcctttaatcccagcactttgggaggctgaggcaggcggatcacctgaggtcaggagttcaagaccagcctggccaacatggtgaaaccctgtctctaccaaaaatacaaaaaattagtcgggcgtggtggcacgtgcttgtaatcccagctccttgggaggatgaggccgaatcacttgaacccgggaggcagaggttgcagcgagcctagattgcaccactacactccagcttgggcgacagagtgagactctgtctcaaaaaaagaaagtaattatttacctaatctatccacttcttcctgtcgggccaagggttaaaggagaattgtactaatcattgcctttagcctaaacagcatgcttagtaaaataaagacttaggtctttgaatcactgcaacctctgcctcccaggttcaagtgattctcctgcctcagcctcccgggtagctgggattataggtgcccgccaccatacccggccaattttttgtattttagtagagacggggtttcaccatgttggccagggtggtcttgaactcctgatctcaggtgatctgcctgcctcggcctcccaaagtgctgggattacaggcgagagccactgctgttggccaggactgaggggtaacattacctgtaatgttgccgtctccctctaaacttggggccaacaattttctttacacccaaatgtttgagacactaactgctccttgttaaggagaattgtactaattacaattagtaattgctcggttgctaaaatgagggtcacagcagccttactcctaaarttatcttcacaggtaggcaagatggcaaggtcaaagaaggtagtctcaggtggtgtttatagttgtccagtgcttactttgaaaaggtgttttagcttcaamctgctcataattggcatataaccggcgatttgtagcagagtgagagaattaagtgttaaagacaaataactatatactatctattttcctcagaatcctcttaataaactttaaaaaatcacgtcattctgcaactttttttttttttttttggagatgaagtttcgctagtcgcccaggcaatggtgcaatctcggctcactggaatctccrcctcccaggttcaagtgattctcctgcctcagcctcccaagtagctaggattataggcgtgtaccactacacctggctaatttttgtatttttagtagggacttggtttcaccatgctggccaggctggtcttgacctccttacgtcaggtgatccgcccgccttggcctcccaaagtgctgggattacaggcatgagccactgtgcccggcctgcaacatgataatttaaggggaaaaatatatatatttttctcccaaagtgttgagattacaggcatgagccaccacgcccagggattttttttgtttgtttkttttgagactgagtcttgctctgttgctcaggctggagtgcagtggcgtgatctcagctcactgcaacctctgcctcctgggttcaagcaattctcatgcctcagcttcccaagtcgctggcattacaggagtgtgccaccacacctggctaatttttgtatttttttagtagagatgtggtttcactatgctggccaggctggtctcaaaccccggacctcaggtgatccacccgcctcggcctcccaaagtgctgggattacacgcatgagtcactgtgcctggcctgcgacatgataatttaaggaaaaaaaaaattatttcattccttcagcttttgagtgcttgctatgtggcaagcactgtatttaaaattgggaaaacaaatgaaaataagataaaccttgctgtttcttggtgggtacacagcctacttcctggggagactgacagatgatctctagtatgttcagcaccgtgtgtgtgctgggggatagtggtacagggtgccgtaagagcatgttggctggcctaagaacctagacttggttagacaagcctttgggcaggaacggacttctgaatctagaccggaagtagttagtaaagatggtagggagagtctttcagtcaaaacacagtgtacacatcttaaactttcttacctgaacgtcagagtgacctgaaacattcagttctttgaagtggaatgaagcaaaataaatttcttagtgacacattttttgacttcttccactgaaggggtatgaactttagaaagtttcataattaaggggaaaagaaagcaatattgaattatatacttggctaggcacggtggctcacacactattatcccagcactgtgagaggttgaggtgggaggatcatgagctcaggaatttgagaccagtctggacaacatagacccccccatctctacaaaaataaaaaataaaaataataattatacactctacttacgttgtgctgcgtatcagagctgtaaccaaagcaattraatgctgttttaagtactactatcctttgggtaaggggtaaaatgagccagtgaggcctctttaaaacagtatttgagttaaccatttttctatgaacttacgttgcattgtttttagaaaaatacttggtgtcagaatatgaactgtatttaatatagcatatgctttttaaaaaatattattctctaaggcaagtacttttaactttatatcctaaataactctttttactcttgaacattggccggtccttctttcaggattccctgaatcgtttgaccgtatctttagagaagtgctcagtaagtcgagggctgaacctgtccagtgagtggtgagcagagcttgattctccaccaacccatggcttagctctgagaagactgttgagttgtgatcttaattttcttctttaagcgatggtagtgctatcttcaaggttaggcttgaatttgattaaagtagaattttaagaacttagtcaaattatagttgttccaggaggtcagtttcattcctgtaaaattttactttgtaacccaagctgcactgaagctctcttaggtcaactctgcctaaagaggcacctgattattactgttatttttttttttaggttaaatcatttcttatatgagccatctttatgctgcctccctaaacctcatcaccccaaatttgtcttcagaggcacagatttttttttctgcaagacagaccagtaatagttaagtatacatttgaaatatgctccaaaattttcttttgtgatttaggctaagtaatgttaaagcagataatccaatctccaaaagatgcacaaggtgttcagatgaagccatctttgcttaaatggtactgctgtttaaatgcgtcatctctatacatgatcttcattctttcctgagccatgcactatttaaaggtagtgtcaacaggtcaaacagaaattctgggaaagtcttttgaaagcaatggtaatgaaaagtgcttcttaagaagtaatgctactgcttttctgaaatgttggtcttctgttttagtgcgtaaattcacagagaaacacgaatgggtaacaacagaaaatggcattggaacagtgggaatcagcaattttgcacaggtattggattatattgaaatatttgtcccagtgtgctcttgcatgatttgcttyatctctacctttttaaaagtgtttaggctgcgtgaggtggctcatgcctgtaatcccaacactttgggaggctgaggcaggaggattgcttgaggccaggagttcaagaccagcctggtcaacaaagtgagaccccgtctctaccaaaagttaaaaaaaaaaattagcctggcatggttgctcatgcctgtggtcccagctactcaggaggctaaggcaggagggtcgctggagcccaggaggttgaggctgcagtgaaccatgatcatgtcactgcaaaatacaaaaattagctggtcttggtggtgcacacctgtaatcccagctcgtcaggaggctgagacagaagaatcacttgaacctgggaggcagaagttgcagtaagccgagattgcaccactgcactctagcctgggtgacagagtgagactccatctccaaaaaaaaaaagaaagaaagaaagtaagaaaaccaaccagagttgaattaagtaaaacataatttagttagggcattatgtggtgttttaagagatgttgcaagcttaacactgaaagtaggaaacatgtcctattcaagaaggaaatgtgtgtgttttgtactgggcaattaaggaaagaggaaaaagaagagcagggtgttgccaccattttgtgggtccagtgatacacacgtgaccaggaggacgggaagaaagaaaacctcaataggcacagatgacacaaagggaaggcttttattcagcccatcttttctctgtaaattcccctcaattccatatggcgatactgtttaagagaaaatgagaagccaaatactagcgtgttcagtgattttcaactggatgtatgtattgggtgaggcggggaaggggggatgttaactgatgggaatgcactcgtgtcacttaatgatggagctatgttctgataactgcctcctcggggattgcgtccttctgtgagcctcctagggtgcccttacacacacctagayggtacagcctattacacaccttggctgtatggtacagcctttgctcctgggctacaaacctgtacagcatgttactgtactgaatactgtaggcaatcgtaacacacttggcctatcaaaacacagaaaaggtacagtaaaaatatggcataggttgagcatctctaatccctgaaatactccaaaaatctgaaactttttgagcaccaacgtgactcttaaagaaaatgctcattggagcgttttggattccasaatcttggatgaggagtgctcatgtattaagtataatgcragtattccaaaatctgaaatccaaaacacttctgctcccaagcattttggacaagtgatactaactatattataatttcatgggaccactgtcatatatgtggtctgttgttgaccaaaatgccattaggcggcacgtgactgtacaaaattcctcagacatgtaagatgcttgtgtgttgataatcacaattatatcttccttggcatctctgtatacctactatgaggcccagtgttggatagtttttgagatgttgtgtaagatgtcgtccttacctcctagagtttatttgtgaggggaattacctacatgagaatgacttgcaaacattacatgatggcatcggaacggtggggttgtaattcacttacctgatggagagaccacttctttctggagtcagggacttcagggagtacaaggtgtgaggactatgatttgtagaatcagtgagcaggatttcagcaaatgctttgggggcaatggtgtacataaaactacagaggtggaagaacaccaaatatgttcatgcccagaagagctagcagtgtttgccgggcgcagtggctcacacctgtaatcctagcactttggaaggccgaggcaagttgattatctgaggtcaaaagttcaagaccagctggccaacatggtgaaactgcatctctagcaaaaaattttaaaaaattaaccaggcatggtggtgggcacctgtaatcccagctacttgggaggctgaggcaggagaatcgcttgaacctgggaggcagaggttgcagtgagctgagatcaggccactgcactccagcctgggcaacaagagagaaactctgtctcaaaaccaaataaaacaaagagctagcagtcttgtgtggggcaggaggcttgtgttaggttgctaaagcctgtgagccagatctggctggcggctggtctcttgcagctcctgagttgagaatagttttttaaaatcattttattttacttagttttggagaacagggtcttgctatattgccaaggcaggtctcaaactcctgggctcaagctatcctcccacctctgcctccctaagagctgggattacaggcatgagccaccgcacccagccatttatttttattcttgacatggagtcttgctctgtcgccaaggctggagtatacaggtgcaatctcaactcactgcaacctctgcctcccagatttaagtgattctcctgcctcagcctcctgagtagctgggattgcaagtgcctgccaccacacccagctaatttttgtatttttattagagactgggtttcaccatgtcaaccaggctggtctcgaacttctgacctcatgtgataacacccactttgggcctttcaaagtgctgggattacaggcgtgaactaccacacctgactgagagtagtttttacatgtttaaaggattttaaggaaaactcaagaatgtagcccctccagtataaaatatatactaaatcttcattatagggrattcagtgtttggcttattctgtttactggagggtttagttataacttcttagagatttttggttttgtcttgttttatttaggaagcgttgggagatgttgtttaytgtagtctscctgaagttgggacaaaattgaacaaacaaggtgagtgtkcttaggatcttagaatgatccatgccatgaattttgtttacattgaatagtratttgtttgtaccctggattaattagagtgcttttttttttttkgagacagtcttgctttgtcacccaggctggagtgcagtggcaccatctcggcccactgtaacctctgcctcctgggttaaagcgattcttgtgtctcaggcacgtgccaccacgcccarctaatttttgtattgtagagacagagtttccccatgttggcmaggctgktctcgaactcctgaccycragtgatccgcccgccttggcctcccaaaatgctgagattacaagtgtgagccaccgtgcccagccaattagagtgcttttgacccaagtattaggttggtgyaaaagtaattgctactcagaggctgagacaggagaattgctggaacttgggaggcggaggttgcagtgagccgagatcccatcactgtactccagcctgggcaacagagcaagactccgttttaaaaaaaagagagaaaaaaagtctattaatatcgatatgttagataatatccttaaactaatgaatacccttttaagacattctgctaaaggtagttttttaacttgatgtaaaatctacatacagtgaaatgcatggaccagaagtgtacaattcagtgagttttaacaaatgtatacacttaaataaaccttcctagtcaaatagatgacctcttctctcgtttctacaccataggtttattttgcctattctttatatgaaaggaatcamacagtgtgtgttacrtttggctgcttttgggatttaccaagcttcttgaatctgtagattgaattttttttcgattaaatttggagacttcttattttagtcatgatttctttctcttcccacttcattcctttttccttctctgatttgagacatgttcgtcatatcacttgatattgtcctatagggtccctaagactgttaacttttcagccttttttaaactgttctttttttttwcttcttatttttttgagacggagtcttgctctgttgcccaggctggaatgcgatggtgcgacattggctcactgcaacctccgcctcctaggttcaagcagttctcctttttcagccacccaagtagctgggagtacaggcatgcacaaccacaccaggctaattttttaaattaattaatttatttatttcgaggttttggtagaggcggggtttcaccatgttggccaggctggtcttgaactcgtgacctcaagtgatctacccgccttggcttcccaaagtgttgggattacaggcatgagccgccgttcctggccagtagttcagagttcataattgtgttttttttgtttttgagacggagtctcacactgtcaccaaggctggactgcaatggcatggtctcggctcactgcaacctccacctcccgggttcaagtgattctcctgcctcagtctcccaagtagctgggattataggcgcccaccaccacgcccggctaatttttttgtattttagtagagaccatgttggctaggctggtttcaaactactgacctcaggtgatcttcctgccttggtcttccaaagtgctggaattacaggcatgagccaccacgcctggcccagagcttataattgttatctgatacagggtacttcactgtcactggaacattctaaagttttcattttgtttttttctgagccacagctaagttgcaagaacatggagttttactgaacctacacacatctggcattcaggcacatcaccatttgttatttactgtgtccaggacacacagataggtccactttattgagacaatatatacccttctcgtggttattatagcctgacaaaacttatggttttatttttaattaaagaaatgtaggccaggcacggtggctcacggttataatcccagcactttgggaggctgaggcgggttgatcacgaggtcaggagttcaagaccagcttggccaacacagtgaaacgctgtctctactaaaaatacaaaaattagctgggcgtggtggtgcgcgcctgtaatcctagctacttgggaggctgaggcaggagaatggcttgaacccgggaggcagaggtggcagtgagcctagaacacaccattgtactgtagcctggtgacagagcgagactccgtctcaaaaaaaaaaaaaaaaaaagagccaggtgcagtggcttatgcctataatcccagcactttgggaggccgaggcgggcggatcacgacatcaggagattgagaccatcctagctaacacggtgaaaccccgtctctactacaaatacaaaaaattagacgggcgtggtggcaggtgggcgcctgtagtcccagctactcgggaggctgaggcaggagaatggcatgaacccttgggaggtggagcttgcagtgacgtgagattgcgccactgcactccagcctgggcaacagagcgagactccatctcaaaaaaaaaaaaaaaagaaatttggaattttaaaatcatagctatatgacaggaatctactttttcgtattttatgttttcaagtaactgacttttaacatttcatgttttctttaattttttttccacttagatgagtttggtgctttggaaagtgtgaaagctgctagtgaactctattctcctttatcaggagaagtaactgaaattaatgaagctcttgcagaaaatccaggacttgtaaacaaatcttgttatgaagatggtaagctgttgctagaaatttctcaaggaattactactacagtaaatattttatctagaatttaaagcaagtttagctgattgtgacttcatctttttctacttcttggtactaaatagagatgttctgctttaaaagaaaaacagaggttagttgaatacttaaagttatgtttaagatttctggctaggcgcagtggctcgcgcctgtgatcccagcactttgggaggccaaggtgggtggattgctttagtccaggagttggagaccagcctgggcaacatggtgaaactctgtctctatagaaatacaaaaattagctggctgtggtggaatgtgcctgtagtctcagttactagggaggctgaggtgggagaattgcttgaacctgggaggtcaaggctgcagtctatagtgagccaagatcgcaccactccactccagcctgagtgacagagcgagaccttctcaaaaaaagaaaaaaaaatctctgatgataaaagcattaccttattttgcaggttcttgatatcagttgtagattctttggttttggtgtaaacatctgcaaagtatttactttttcagacataaagcagccactcatattgtgtgacatgggaggtaaaaaaatatatattttgcattaatttttggttttctcacattttcacccttataatctaatcaggtaagctaacagcaattttctctattttgtagatgaatagaggctccaaaggatttatctgtcagggtctcatggctgataaatggcaaagctaggattaggttgtagttctcttttgtctgtcacctagcccttctaattactactgctttctaatcccgttaacctcagtagttagtgttccatttgttaaagacatacctggtcttgtgtatttggatcatatatttaaggacttatttttattatttttttgagacagagtctccctctgtcgcccaggctggagtgcagtggcgtgatctcggtgcactgcaacctccccttctcgggttcaagcacttcttctgcctcagcttcccagtagctgggatcaagggcaactgccaccacgcccagctaatttttgtggttttggtagagatggggttccactatgttggccaggctggtcyagagctcctagcctcaagtgatttgcttgccttcgcttcccaaagtactgggattacaggcatgagccaccgtgcccggcccttaaagatttaaatgtcattttctgatgcttattacaacctaagagttcttaatttattatggtggaatctattctagccataattattttcatttgttatatacaagtattttaattcttaaggctaaaatttaaagttctatgaacaaataatgtatggtttttgtaaagaatacaagattgaggcgctcagaaatttattttacgttttggatgaatttgactttttaaaaagttaatgtggaatataaggttgtcttttggttgcaggttggctgatcaagatgacactgagtaacccttcagaactagatgaacttatgagtgaagaagcatatgagaaatacataaaatctattgaggagtgaaaatggaactcctaaataaactagtatgaaataacgcaagccagcagagttgtcytaaattagtggtggatagaagacttagaatagaaacttttagtattaccgatggggaaaaaaaaactactgttaacactgctaatgaaagaaaatgccctttaactttctaatgattrtagataaatataatatrygtctttttcacaatatcctatgatttttagactaggctctagtgttcagaattcatgaaattatccatggtaaaaactagttataaaaattacataattcaaagataacattgttattcttaagccttatataatattgtaacttgcatgtatccatacctrgatttgggatgaaatacttaatgatctttccattggaaataactggaagtgaagargttttgttgcttgtacagtgtcagatgargaacaccactatcttaattttgygatacactgcatttgctggtgctatttttatacagtgaagcaacagctttgcagcaaaataataaaatacttcttcgttaatcatgtttgttttgatgttaatatttcatttagtaactctgctagtatttgtgaaagtgctaactttaactyacggaaagttacttyttaaaaggmaatttaagccagaacaatgcaaagctccaagaaaatgttttctttagtcacaaatctggtttttcttaagccaagatctgtcacctttaacataataaaaaataaatcaccaactttgattttctatcatgcgaggtctgaagaaagaagaggaaagacagaggaaggtggaagttttgatcagtatagcacatggtgtttttaagttgttaaaccacgttcaggtttccacttaagtcatgggaataaaagtggacaaggactgaagctttatgagctcagataatggactctgatagtattctttgcagcttaagcatatttagagtgccaaaagttatttccaagtagctaatacacagcatacgctaaccaactgtaatatgctgataatattggggtggggggtctatatgcacatgcaaatatatatatacatacacacagagcaagaggagataaactcctgtatcattttctcagttactagaggaaaagagaagtattcatatagtaccaccttctggtggtgaataaacagcaaatataaggacttagcaaaagtaggtaggtaaataacatacaaatctttcctgctcctcagctgaagaaacttcattccaagcctctgccagtagccatatcactgctgaactatatctttgtacccttaaatcttaagtattggccaggtgtggtggctcacgcctgtaatcctaccactttgggaggctaaggtgggtggatctcttgagcccaggagtttgagaccagcctgggcaacatggtgaaaccccgtctctacaaaaatataaaaattagcctggcatggtggcatgtgcctctggtcccagctatttgggagtcaggtagaatcactttgtgtctgggaggtcaaggctgcagtgagccaagatcacaccactgtactccagcctgagtgacagtgagaacgcatctcaaaaaaaaaaaagtatccaaggtatcctggatgattgtctatattgcgtaattgtcaatcatgttaattgatctgtctgctttgaaaatagatggggatgagtaataattacatagatttaccctttagttttgaaagttctctagacacatcgattactaccatcatttcacaggtatgaaaggtgataggataagaaatttgttaaatagttgggtggtcgtggtaatgattttcatatttcctggtctactcttaatcagtcccttagcaaattttactataaaaatatttaaatgggacaggcgcggtggctcacgcttgtaatcccagcactttgggaggccgaggcaggcggatcacgaggtcaggagatcgagaccatcctggctaacacggtgaaaccccgtctctactcaaaatacaaaaaaattagccgggcatggtggcgggcgcctgtagtcccaggtacttgggaggctgaggcagaagaatggcatgaaccccacatgcggagcctgcagtgagccaagatgatgccatgcactccagcctgggcaacagagcgagactccgtctcaaaaaaaaaaaaaaaaattttaatgggaatctcagggaagagggggaggttgaatgttctaaataaaggtgggaagcaaaagtggccattctagagtatgaaagtccgtgagtggttatagtctctgaagaaggtgggcagttttttatttttcccttttcctgccaaagacacacataacttgctctgtaacaacccctcttttttcaaagagcagaacatttggcaacttgctcttccactatttagaacacagagccaaatccactgtcattgatgtcacagtgctgccaaaaatacaggctttgaatggccctccaaattgactgaatccagggaatttaattttcatgacctcatattccttttgaatggttttggcattagtagagcagattaatagaagttttgaagaaagctttctagtaactaaaacttgagaaactgaataggttaccctgcaagtgttaaattttttttctgctatcacctcccaggtagttttgtcgttagctttaggttttgttttgttttttgttttgtttgagacggagtctcgctcttttgcccaggccctccacctcccggattcaggcaattctcctgcctcagcctccagggtagctgggaatacaggcacccggaccacgaccatgcccagctaatttttgtatttttagtaaagatggggtttcgacatgttggccaggctggtctcaaactcctgacctcagatgatccacccgcctcggcctcccaaagtgctgggattacaggtgtgagccaccgcgcctggccagttttaggttttaataaaccactagggagctctgcatgggcatactactatgaaaatgaggctggccattcagatcagttcctcagcaaatcagaatttctgaattttttcaatttctattctttttctttttttttttttttttttttttgagatggggtctggctctgtcgcccaggctggagtgcagtggcgcgatctcggctcactgcaagctccgcctcccgggttcacgccattctcctgcctcagcctcccgagtagctgggactacaggcgcctgccacctcgcccggctaattttttgcatttttagtagagacggcctttcactgagttagccaggatggtctcgatctcctgacctcgtgatccatccgcctcggcctcccaaagtgctgggattacaggcgtgagccaccgcgcccagctgctgaatttttccaatttctatagtttttctggggctactaaaaagagcacagtttaaaaaattatgctaactacaagcgtgtcttttttactgtgttctttcagaccaaatcacaccttccttcccatacttaaagaggtgcctttctttacaccaggattaaattcctctttcttccctgcaacaggcctttcctgccgcccaggctggagtgcaatggtgcgatcttggctcactgcaacctccacctcacgggttcaggtgattctcccacctcagcctcctgagtagctgggattacaggcgtccatcaccacacccggctaatttttgtattagggttttgaaatggggtttcgccatgttggctgggctggtcttgaacttctgacctcaagtgattgacccgcctcagcctcccaaagtgctgggattacaggtgtgagccaccgcacccacccatctccctttaattttaaaaaatagatatggggtcttgtgacacttcccaagctggtctcaagtgattctcctgccttagcctctcctgtgagtaactggtattacagacgcaagccaccactcctggctttttttctttaaaatacattttatgtgttagaggaagtttacagtcacagcaaaattgaggagaaggtacagttctgtacgcttccattctccgtttttgcaaagtgggatcttactataagtagagtttctggtatcttgactcaattcctatgttgactttttataaacataactagccaaacccttgtcccttcatgtttccactcaatcatgctatcgggcttttacctgctaaatgcaggaatagttagtgtgaaggaagtcaggttctagatcctccaacttccccatgtacttgccgttaggttatttaattaatattcattgagcaaatcttagttaagacttttggtatacttcccagaaacttttttctaatatgcaaggtcttgcactgtttcccaggctggagtgcagtgacacaatcatagcttactgcaaccttcaactcctgggctcaagggagcctcctgcctcagctgggattccaggtgtgagccacggtgcccagctgttttcaatagatctgaaggaagaccaaaacaaattgtcaactgataaaacatttaaatgtttttggttaatacttactagcttgagatacaataaaaccccttttatttgcatcttcctatttatgtgaacaaggtacctaagcttacacgtatgaaaaaagttggaatagaattatagctgaatccgtctcattggagcaatcacagtgctagagaacttagataccaaatttttttttgagacttgagttttgctctccaggctggagtgcagtggtgccatcacagctcactgcaacctccgccacccgggttcgagccagtctcctgcctcagtttcccaaatagctgagattacaggcgcccgccaccacacccggcgaatttttgtatttttagtagagacacggtttcgccatgttgtccaggctagtttcgaactcctgatctcaggtgatacacccacctcggcctcccaagtgctgggattacaggcgtgagccaccgcgcctggcctagataccggttttctacagcagaaatagtcacactttctaaagcagaagggctttggagtcagacccgagctggagtgggggatgctttgcgatctctcttcagcaagctgttgttttagggacgtggggccaccttcctttatttgtataaaagatgccactgcccacttaagagctgtgctgctccgggccagcagttcagcgagtgcccgtcggcctggtgctgtcggtcacgtaagtgggctctttgaggctcacaacgcgtcctccctggacgttctgggcctgttaagtttgtgtccgtgggaaacgctcacggcggttccccagagggccgagggagaaaagtgaggacgtttctggccgcctggcatctgctaaatatcctagcaggcacaagggctccccaacgggactcgccgacccgagagcccgggtgggcctcaagccccgccatctgagaccctccgtcgctggcccttccggcggcagcgcccggagcggataggagatgccacgaaccgcctcgccagtgctaggctttgttgggctacgtcacttccgccgcggtcccgcccccagcgtggtcgtaacccaaggcaacggcccatccggcagcgacctgagtagctcttgccagtaggccgggactagctgtctcggggccttccatccgcttggccccacaggtaggtgtgagcggccatttctccacccctggggcaaggcccgggaccactccaaaggcgacagagcgagagtccctgcctcgttcgaaaggaagcgagagggagcgaaaggcagaggcactatgtgccggggcttccccagagcgggcggggtctggggaggggcggggcctgaggaggatccgttgggagcggaaccctttaagggtgggtagacggaggacggggaggaattcgaacgggcaatccagaacgcttttctgaatgggatagtttgaaagaagggcaggcgtctttgtggcacggtaggaactggcggaggaaggggaagagctagatgaggaaaaaaggcttatggcataaagggaggagcctgatagagaaaggggtgtggcctgcaggaaggggcggggctagatgaagaggtggagccgagcgtgatgcgcctgggctttaggggtggcaggtggagcgcgtgtgtttgatgacttgcgctttgctgtggactgtaagctgtgtgagagtagagaagacggatgctgctttagctttttattctcagtgctaggtacttagtgaattcattaatgtgagttgaaaaaggggaagagtttgagactgagattggaatagatgtggtctgatcgggagggatggtgtagaaactgcgctccttggcatcattctgtgaaatacttgaggttcctgtgacctgtaggcatataataagcagaaggcacatataattaacaaggaggataaaatttatactcttggaaatatgaacaaattgtgcaagttgggtggcgcgggtgcttaactttcagacaaaggttcagctccttccagtgtgtttctaaatgcgactcccaactcattttcctgtagaaactgtgtcacaaatgatcaggatgcccaggtcagtcttcaggacctatttaactggttcatgtaagtgaagattggtcctgtattaagaaacttaacttctgccatggctaacaatatttctaatgattattcctt

SEQ ID NO: 94317 - DNA, 25282 bp, Homo sapiens
  misc_feature (1)...(25282): n = A,T,C or G
agcaaccaccattcggctttctgtctctgtgggttagcctattctggacattgcctgcaagtaaaatcatacaacatgtggccttttatgagttgtttctgcaactggctaaggaaaacatgagtggaatgttttcatggttcatctgtgttgtagcatgcatcaggatttcattgctttttctggctgaatcatattctattgcatgaacatgtcacattttatttatccattcaacagttgatggatatttgggttgtttccactttggggctattatgaataatgttgctctgaacattcctgtacaagttttgcacatgtaatcttgaatatgagctataacaagagcagctaacattgcccaataagtgtctatggggaatacaggcaccgtcttgtttcatcagctcagtactccaacgtgcagagccaggatccaaatctccatcactctgtctctaaaggctatgtttctagtctccttactttatttcctctaaatctaaagattagaaaagggaagtcattcattacttcaagtgaattgctatcctacaagtaagacagtagttatgacattagttattccagtggtgccccacttcctttcccctacacttatctgtgcatgcctactggacctccaaatgttagaacctgcatggttttgcgttgcttttgttatggagaaactggaagtgatggggaagaaatccaccccacgcatattttcaaccaataaccaatacgtgttagtgaataaatagtgaacaacctcagccagcaggtagaataacactgagaagggtgtttactgcgtttccgagtttctccagaaggatttactttatggaacgattaagcccccagcaggattaagcttggttgtcctcagcgataactgatttccttcccttccctgtctcacatctccacccccctactggtagtttctgggatcacctccaaaataaactacttgtccttgaatctttgtctaaaggtctgtttctggcagaactgaaactaagatatggtggttatttctcgcagttgaatcacaccaggattccttgcagagactattctgagacacatcaatccctcgtaaggggaggtcccacatccaagaaggaagtattaatgggtttgtgcatcattttttgaagaggattcaaaagaagcaggttgggagtagatgtctcttggaggatccaggcattatggaataagtatcttttatattcaggttgctgaagaccaatagggtatatgcaacagagtggatgataaatataaccactgcagttgtagtacctaggtctgtcttaactctcactgcattgtcccagcacttaacatgatgcttgatacaaagcaggtgcccaatacatgctgactatcatttaataaagttattctttacagaccagtgagaagaatacatcttcagagtcttccatctttgaatacatccttctttcctggcacatgttgttctactatcttgtattaggataaaggctagactactataaaaaaaaaccctcaaaacatagtggcttaatacagaagccaacacatgtaataaaattgtaaaaaacgaaacacagacacatgcacacgcaagggagtacaagtaaaacgggaattctttataagatctatcaactgcatccaggtcaatatcttggttgtgatattacactacagttttgcaaaatgttatcatttggggaaactgagcaaagagtatgcaggagctctctgtattatttcttacaatggcatgtggatctacaatgatctcaataaaaatttttattaaaaatgtatagtatcatacataacagtactggtaatctagaatggtgagcctagtgagacagttgtactccacaaggtcattcaaagacccaggttccttctatcttgttgctcctatatctcctaggggtactatcttcacctacagggctggagctgagtcaaatctcagtgtcagtccacaggaggggagaaaagagggaaatgaatttcctcttaagcatttcatccagaaatggcatgtatcacttccactcacattatattggcaaaaacttagccacaagggcacatctagctgcaagtgaagctggtaagtggagcttttattctggatgatcatatgcaagtaaaacactattattatggaagaagggaaagacattttgagtaacaactggcaatcttccacaaagcacaaactgatttcgttaattggtatagtgagatgttatttggtgtgtgccaaaaatcccttctttggggaaaaccatgtctgacacgttctatactaacctttctctatccagagccaagagataaggagacaggactctatgatgtctgaggctcgacaactagatccaccttttaagcttccagttacaggagccaagcatccctacttttgatttatctatattgggatggatttctatgatttgcaacccaaagaaacctgatgaacatagtgggtatccttacttctcaattcctgaaaacagtgagacaagaaaatggcaaatataagctttactgtctcaaagggtcctttgtgtccttctaggagagcccctaatgcttcagcactgaacacagagcccttgccaggacactcacaataacatgtaggtttagtcagcactatttaaacacttagtttaatcagtactgagagaggcaagggtaacaataatgaattatttcaaaagtttttaataggaaaaaagaaaagccattgacccaaatagtatgcttgataattcttaataagtgctataaatgcttctaaaagaatattaagttgcttaattgctgaataaatgaaatataaacattatgttacttggagagttctttaatatgtaatgaggaaaaccattttatgaaatgtactgcatgtgataaatgcttgttttcttttctaaaatcaattattgaagccattaaccactgtttaaatatagctcaatttttttctgtctattcccctttatattttttttattagtgaaagaaaataggtttatctaggaaagacagctgcatggtgaaatagatggaatgtggaggatatgggagtcagaagccttggctttttttttttttttttttgagacagagtctcactctgtcgcccaggctggagtgcagtggcgtgatctcggctcactgcaagctccatctcctgggttcacgccattctcctgcctcagcctcccaagtagctgggactacaggtgcccaccacctcacccagctaattttttgtatgtttagtagagacagggtttcactgtgttagccaggatggtcttgatctcccgacctcgtgatccgcccgcctcagcctcccaaagtgctgggattacaggcgtgagccaccgcacccggccagaagccttggcttttaatcacaggtctgtcatttactagttctgtgaccttgggtaagtcacttaaactcacctgatttccagatgcagtgtggaactattacaaggtttctcttacccacctcagagagttgtagtgctactactactaagtcatagcacttttagggcagtgcttatcagcctttactatacataggaattacctagggattttgctgaatacagatttgtatttattaagcctagaatgggatccaagacccaacatttctaataagctctcaggtgatgttgatgttactgatccacacttttggatagcaaagttctcatgtgcctaccaagctcacaataatttccgttctttagaaatgaccacagtttatagcagttcttgtgtccttttgccacagctgacaatggtagaggtgatttctgatccaagctgggccaaaagaaggtgtcgtttgcaagcctgggattttgaacagggacaaccagaaatgtgacatatattcatttgctgattcattcaccagtaaaaaaaaaaaaaaaaaaaaaaaaaaattctgtctctatgccagacactatagtaggtagtggagatacaccaatcaatcaagcaggtctctgcactcacggagctttcattatagcaacatgcaagataatttcagatgagctaagtgctgtgaagagattgaagaatttcaaggggatgcaggagactttaagtgaaagtgttggggaaagccaagctcttacttcctcttctgtagtgaccttggcagccaagagttgaacatgatggcataacaaatgggggaagcctgggtccctgagtgattatgtggagcacagcactcttccccttccctgcagactgaattggactgtgatcggagtgagaaataaaatactgcacacctgtgagtaattgtgacagcaaactgatctttctgagatgcatccactgcctggacatattattgggggaagacaatactaaacaaacactgatatacaaactcacattgaagttaatttctttctccagtcatttctgtcttagatctcttggtcagacctttataaaatcaactcactaaattatgatggaagctaaggaagcaattatagagtttgtaattttcctttaaaacacgcctgattatattttaaaagagtcctcrgtggcacaagaatactaacatttaaattcaccatttctcatgtttatccacacactctaaatctgggtatccctcagaggatcctgtaattccccaaaggaagtctgtcttctttactgcatcctcagtgggtcttttcttccttagctgctggcctcaagagcatatagctggtctctcagccccctgaatacccttcctcttctcttctaatttttatgtatcctaagcagccactgcaaagctgttctttaagactgcttagcacaagaagtctcctgtgacttatgcctgcctaataggtgaggacaagacaggcaggaaagccagagcatcctatgagagaggccagtgccagggactggcacttcttgatttcttcacctgggcttcattaatttttatatcctaggacttgagctttgtccttgtgactgtgtgtgcttagtgaaaactgagcagtaaatcaggcaattgatatgaacctctctgagtctgcctttggtaccagatctatcggcaagagcaccacatgaagtcaaaacttccatcctccaagacactaaaatgaaatcctccccagccaggggtccattccaggatgcatgtccatacacgtgtacagtctgcaaccatccacagaaccacactcatgatgaggagacaaaagatgggcctcaaaaggagacctctgagtgaggatgccaactttcctttctgcattccttggttccttcagcaacaaagattagtcttggcatcactgcctgcttggcgaccagaacaaagagaaataaggaaaattagggacacaggaaaacctatgggcacacatagatatggaaactcagagataatagaaacttaaagagatacatggagagtgaatattctgcctccctatagagccttttccatcatccatccacccaagcaatgctgacctgagtgcctatttatcaggcactggtcttggccttggggataaacaaagatggaggtgaaagtctaaaagcagacactggaggtgggaagagcagttgacgtggccctaacagggttcccaccacggcggaacgcacagacaggggacgtgggggaagacgtgaccctaaaagggttcccgccacggcggaacgcacagccagagaacgtgggggaattcatgaagcgaacctcctgctacctcaacgccggtgaaggtgaaggagacacctgcgcgtcatagagactccgagacctccaggcttcctagagaggcccggaagtggctccaggaggcaggtccgacggcttcggcgccccagctgtggtgatgggtagctaggaggcctgggcctctctgcctgctgtagccgtctgccgcgcccttgttcctgcagctgtgagtgggcctgggctggggttggggggccgccgcccttccgcggggaccctggaccgcctcggcctggaacgcgacaggtggcggtcccgggggtgggggacggtggtgaatgactgagcagggtggcgggaaggagtatcccctttcagatgtcttcctgatcccaggggaccgggcgcagcttggctttctagaatgtcgccaaggcctcaaacactggccctccgcattttttgtttttaaggacatcggggccccaagctccgaactttccacaggtggctggctatacttgattcctgtctttgattttctgcacactttgggagaacgattacctcctctttatcacttggttctggtttgccacttaaaagtggcagtgacaggttcccatttaaactgcaygtatttgttgggaaaaggtaagtaggtttaaacaaaaccttataggctagtcataataccagatgaatcagatgtgacagaaattgtggaggtggagtgagccctgaaaatctgagacgggtctcagttcatttagaaagtttattttgccaaggttgaagacatgtacccatgacacagcctcaggcggtcctgacgatgtattcttaatgtggtcagagcccagtttcgttttctacattttagggagacatgagacaagaacagatgtaagatgaacatgtttttcggtctggaaaggcgggacaactcgaaacggggagggggcttccaggtcataggtaggtaagagacaaatggttgcattattttgagtttgattagcctctccaaaggaagcaatcagatatgcctttattttagtgagcagagatacatgaatagaatgggaggcaggtttgccctaagcagttctcagcttgacttttccctttagcttagtgatcttgggaccccaagatttattttcctttcacagtgataagataatgacctaagcgaatctgtattgtcccagccttattgtgcggcattacatgtagtggttaagagtcatacagacccggcttcaagtcctgaaccctgcccaaccccttatgacctgcataatttgtgggcaaggttcctaacctctgatctattttcctcatttctgaaagctgatgataatactagtaacaacttcggaagattgtcctgaggcttaaatgctaaacctttaaactacctgtattaatccattctcatgctgctaataaaaacatacccaagactgggtaatttataaagttaagaggtttgatggactcacagttccacatggctggggaagcctcataatcatgccagaaggcaaaagaggagcaaagtcacatcttacgtcttatatggtggcaggcaagagagcttgtgtaggggaactcccctttataaaaccatcagatcttttgagacttattcactatcaagagaacggcatgggaaaaacccacccctgtgattcagttacctcccactgggtccctcccaggacacgtggtaattatgggatctacaattcaaggtgagatttgggtggagacacagccaaaccatatcattccgcccctggcccctcccaaatctcatgccctcacatttcaaaaccaatcatgccttcccaacagtcccacaaagtcttaactcattttagcattaactcaaaagtccacactccaaagtctcatctgaggcaaggcaagccccttccacctataagcctgtaaaatcaaaagcaagttagttacttcctagatacaatgggggtacaggtattgggwaagtatactcattccaaaaaggagaaattggccacaacgaaggggctacaggccccatgcaagtctaaaatccagcrgggcagtcacatcttgaaactccaaaatgacctcctttgactccrtgtcccatatccaggtcatactgatgcaagaggtggtttcccatagtcttgggcagctccacccttgtggttttgcagggtacagccccacttttggctgcttccagggctggcgtttagtgtctgctgcttttctaggtgtacggtgcaagctgttggtggatctaccattctggggtctggaggatggtagctctcttctcacagctccactaggcagtgtcccagtggggacgctgtggggtggttccaaccccacatttcccttccatgctgctctagcagtggttctccatgagggccccacccctgcagccaacttctgcctggacatccaggagtttccatacatcctctgaaacctagggagaggtttccaaacctcagttcttgacttctgtgtacccacaggcttaacaccgcatggaagtttccaaggcttggggcttgcaccctctgaagccccagtttgagctgtaccttggcccgttttagccacagctggagcagctgggacgcagagcaccaagtccctaggctgcatagagcagggggaccctggacccagcccaggaaaccatttttgcctcctagacttctgggcctttggtaggaggggctgccaagaaggtctctgacatgccctggagacattttccccattgtcttgatgattagcatttggctccttgttacttatgcaaatttctgcagccagcttgaatttctccccagaaaatgggtttttcttttcttttgtatcattaggctgcaaatttttcaaacctacactctgcttcctcttgaatgctttgcagcttagaaatttcttaccccagataccctaaatcatctctctgaagctctgacttacacagatctctagggcaaggacaaaatgccatcagtctctttgctaaaacataacgagtcacttttgctccagttcccaacaagttcctcatctctgagaccacctcagcctggactttattgtctatatcactgtcagcattttggtgaaagccattcaacaagtctctaggaagttccaaactttcccacatcttcctgtcttcttctgagccctccaaactgttgcaggctttgcctgtaaaccagttccaaagtcacttccacattttcagatatctttacagtagcaccccactacccagtgccaatttactgtattagtccattctcatactgctaataaagacattcccaagactgggtaatttataatggaaagtagtttaatggactcacagttccacgtggctggggaggcctcataatcatggcagaaggcaaaggaagagcaaagtcacgtcttacatggtggctggcaagagagtttgtgtaggggaattttcttttataaaatcatcagatgttgtgggacttactatcatgagaatagcacaggaaagacccgcccccatgattcaattacctcctacygggtccctccaggacacgtgggatttacgggagctacaattcaacaagaggcttgggtggagacacggccaaaccatatcactgcctaacccataataaataataagtgtagccatggttgttgctgtttttattttagggcggaggaaacagaggttcagtgaattgcctagggtmacacagggaattggtggaagagcsaagtctaatgcccagatttccaaactgggagtcttaacccttcatcagtgctacctgtgccacatgggagaagatgggccacctccaattcattttctctgggaactgcaggaaccacaatgaggttgcagaatgtgttaacagtgaaagccctcacaggactcaggtcagtaccaagcacttcaggtaggggctctgcacagcctcgagtgctgctgcgttaagatgaactgtagagtcagatgcacctgggttattggtacagatccctgctctaccatttgctagctgtaggacttggagttaggcactttgtgtctctgagcttcagttttctcacctgtaaaatggaattaacaaattagtactcatctgagagggttgtgaaataattcacagacagagtgttgcacaatgcctggcagagagtaagtgcttaataagtggcagttgatattacttcaattactagatattaattcaattacttggtattacttcaatttatagacgtggcaaactgctgacctagtgaagaagaaagtacaagtgtagtactccttgcagataggacagaaagaggcatttgaagagcttgcaaaatgttctccccatttatatttactgggtctacaatctgctagatattccttgtccctatagatattgccagtctgtactcacatggcatttatactgtagcttgggaaacagatgggaaataccagttacaaaattatttcatttctttgtcatcagcattgtgaggaattgcaaggcacttgtgccacaagtatctaggcagaagtttaggtagccgaacaagatttgaaacacctcaggtgatgaccctgaattatagacagctgtcctgctacctagttatattcaaaaccctgcataaatacccatatctattacgagtatactggttttcacttaactctatgcccttaggtaattttcttccaaggtgtgtttggccttttggttttttgttttttgttttttttgagatggaatctccctctgtcgcctagactggagtatagtggtgcagtctgcactcactgcaacctccatctcccaggttcaagcaattctcctgcctcaaccttctgagtagctgagattacaggtgtgcatcaccacgcctggcgaattttttctgtttttagtagagacagggtttcaccatgttggcccagctggtctcaaactcctgacctcaagtgatccacccacctcagcctcccaaagtgctgggattacaggtgtgagccactgcacccagccagtatcgcccactttgaaaaactttgtatgaagtcattgcaaacacaagcacaaatatacacataaaagctacagatgcaaggccgagcacagtggctcatgcctgtaatcccagagcctgaggtgggtggatcacctgagctcaggagttcgagaccagcctggccaacaaagtgaaaccccatctctaccaaaaatacaaaaattagtcaggcatggttgtgcatgcctgtaatcccagctccttgggaggctgaggcaggagaatcacttgaacccgggaggtggaggctgcagtgagccaagatcacaccactgtactgcagtctgggtgacagagtaaaactctgnnnnnnnnnnnnnnnnnnnncctacgagatactatccacttctaccgggcgattctatagagtctattcaaaaccctgcataaatacccatatctattacgagtatactggttttcacttatctctatgcccttaggtaattttcttccaaggtgtgtttggccttttggttttttgttttttgttttttttgagatggaatctccctctgtcgcctagactggagtatagtggtgcagtctgcactcactgsaacctccatctcccaggttcaagcaattctcctgcctcaaccttctgagtagctgagattacaggtgtgcatcaccacgcctggcgaattttttctgtttttagtagagacagggtttcaccatgttggcccagctggtctcaaactcctgacctcaagtgatccacccacctcagccttccaaagtgctggaattacaggcgtgagccactgcacccagccccttttgaattttatatgtcacatctcttttatctgtatcagaattcttctccttatccctctaactgcatatttatttttattgttttgacttccttgtattaaacacaagtagataattttcagatcatgcatggaatttgaacagcaccatttcgtaagccctctagcatgaatatatttgccagatctcaatataataagaatacagttaccttttacctctggtcagcacttgtacagtgatttaaaacacgtaatcatggggttatagtacttggagatattttttctctctcttaaagtaaatacagtttttttatttttatggtaacagtcttaaattcccgctgttccatactttctattggtgaaatgctaatgacacccatatttctatattgcattatgataccagagggcaagtagcacagtcatcttgaactcatagggatgaaggaacggtgtgcgtaatcaaaggttcttatttctgatctttagcatttaattaggtcttttaaaatgtaaagtactcccagtcatcttttattagttttttctcataacttcccttgagatgtcaactttattaccctcgctttaccttagtattctcaagaggtcaggtggatttttaaatttaatttttttttactgtttgtaattaaggttttttttgttgtttcttgatcatgtgcttaactttaacctgtatccactaaaatgactgctcaggtcggatgtagccctccccaccaggggagagcaattactgaacaaagccacattttggaaggaccttcaagcacttgccattataaaggcaggtctgagtgcccagccctagaaggaatcagatagaaactaattaataaaacagaagccacagagtagatgaaaatcaggcagctggttgaagaacaactgtatattctcttttctcccttctggcttaggattcatgtgaattttgggtgggggcaggtctgcaaaatgcgtttgctgagatttttctgtgcttatcratgttggggatcaggaagggaggaggcggctcccagcagtgcagcagatggctaccatcctgtgaaggctttactggcctggtggataagctttttccttgctgtttatcttgttaagttattaatttttcttatctttctcttctgacccccccgatcaggtcagttatacaagtttttgcctcagatcattctgaaactagttggaaggtaatggagtagcatcactaggcctggcaggtttctgaagcattaataatccgaagttgtatgttccttacttgattaatgtgcacatgaaccatgattgacctatggtcttgtgactggactggaatgtgtaattttaaaaccaaagactaattaaagataggtatttccgttggaatgttttaattgggcttttgaaggccttgtccattttcagaattccttatggtggaattcttacagagatattaagaagatcttaaattgttatctgacatcctgtttgtcaaaactttcaaccagacaagaacatttccaaaacttactgtttcaattaatgacatcatcttcctcaaaacatcacctgggtgcagcacgctgccacctcctgcagttgttcaccagccctcaccctgatttcacctgagcacactggccttttgtcctcactggtaacccgctagtctagagccacatctcccttacctggaccctggcccatttcctcctccaggggaagccttctctttcacaagtaccaaggtggccccaacggttcattgctgtaaacctacaaaggcttgtgttgtctgcagagtggaattcaattagccaggcatcatggcacacgcctgtagtcccagctactcaggatgctgaggtaggaggatcgcttgaggccaggaaatcaaggttgcagtgagccgtggtcacacctctgcactatagcctgggcaacagagtgagaccttgtctcaaagagaaaaaaagaatgggattcaaactttatggaaggggacagaagcctgtctccaggctcaccccaggctgtcttttcaccctcaagcatcagctccatgcttcagtttgcacaccagccatggcggactcaccatgttagctgcccagcacagccttccctgcatgtgatccatttattcgtggtgcacccccacctgtgataaccctcctttcagcctacctagatcctcccatgggccctgtagtgctaaagctcactctcccatgatctcttcctgatgtgccctgtcagaatcagtctccccacccctcaccttggtttcccaccacactttgtttataccaacattataacagtagcgttattttcatcttttttgccttttccttttggtatctgtagaagcctctttcttatttgtaagctctggaaagcaggacctctgtctcgtttgggtttgtatctttcatttcataacccggcactttttaggagacatgttattgttaaaatggcagtattaatgtcttgcagaacagcagctcttagacactgcagagccctgggtaatttgtgcccatcacaattttactgaattggatatattttagggtgttcagaataatccatagattcaacaaatatttattgagcatctactatgttctggattctagtagggacaccccagaaggcagaagacctcagttctcatagaacttaacattctgtgggaaggagatcaataataaaaagtaaatagttttagatagatagcaaaatgttccatagagaaaacaaagcaacatttagggtacaggcatctgtgttagctagggtgatcagagaagtctctctgaagacttgtcagcagacctaaatattgagaaagaagcttccagaaaaggacctagtatacgatgtgtcacactgaagtgagaacaggaggcactaatgggctcagcatcttcaagataaggaaagtctgtacggttggagcacggagtgccagtagcagaagagtgggaaattgtgaccaggtcatggaggtgaacgtgggaagtctgtattgatatatcagtaactgatgtctactgtgttgggaaatagcattcatcatgaagggttgtgagtacactaaagaacagaattgactgcatttggttttatggctactctaaatccaaatgggagtgttctgcactcagaaaacaatagaatcacaaggtcactgttaggtgcattgagggagtgctggcacattcattcttcatgaattttcttgaaagcacaaccgtggcagttgcttaatggaaccttgggaactcatcagccatcctctgccccattttgctcagtttccctagtatttctcactcttctccataccctcaaaccactgagacagtcacttgctgaaccttgtcttcacttgtcacactgactgactctgcataagtgatctgattcgcttcattggcagtcttaatacactcacacaggtattcagaagaacttacaaaactctttgtaaccctgtgcttttgagagatgtagtcatgtcatgtggaaatgtaataaaatagttggatctctaaactstggagtgtgaaaaaagggcagctcaaggaatgacatctgtggagtgcccatacggtgtcaggtgttttgttggacattttttgcacattatcccatgcagtcttcaggcaggcttattatcagctccacttttagatgaagcagcaggttcagagtgtttaacacatgtggtaaacacacagtccaaaatcacacaactggtaagtggaccccaaagtccattctcttttcatttaagactgtgttttagtggttaagagtgcgggctcctggggccaaactgccatcgggtgtgaatccaggtaagcttgggcaagtttatttactgtctctgtggtaattctcagctgaaaaacaggatctaatagtactttcctagtaagattattaaaaggattaaatggctaacatacacataaagcacttagcatgctgcctggccctagtagtaagcactaggtatgtgtttgttgttattatttccactgtaccatgctgcctttttagaaactttagcattcctgtaacatagcacaacacacaaccagacagaagagaaaagtgaaatctagagaaatgtcttggccaagatcacataaccatttaagggcggaggcgagacgtcttcactgtgtattcctgtcccccatattttttctttctttgtgcatgtacactgacttcacactcatagcctctctgccatacaagctcttcatcctgcatagccctaacctctgctgctcccgcttccctcctgtctccacactcttccatgttgaagtctacttttgtggtgcagtggctgcagtcgtgggtgcctggctgggaaagagaaatggtagggctcttgattgcttgcagtcttcatgcctaaccacacctctgagtgtctctgttgacttgagcacaggtatatgtgtgtgtgtgtgtgtgtgtgtgtgtgtgtatacgcacccagtgcctttgaggacctgtgtgcttcctgtggttttttttttttttttttgagatggagtcttgctctgtcgcccaggctagagtgcagtggcgcgatcttcgctcattgccagctacgcctcctgggttcacgccattctcctgcctcagcctcccgagtagctgggactacaggtgcccgccaccacgcccggctaattttttgtatttttagtagagacggggtttcaccgtgttagtcaggatggtctcgatctcctgacctcatgatccgcctgcctcggcctcccaaagtgctgggattacaagtgtgagccaccgtgcctggcctctctccctcccacatggaaggagttgggtgtcttcatttttgcttatttagttttgtttttgggagaagggggccttggagccttgaaagaaatgcggggagggccacagaagaagagggagagagaagtgggatccccaaaggcactgagcacttgtactttaagtacttgcaagatttgcggtgggggaggtggggcatggtttgctacataaaggagtttttccccatatacatattttttaagtatagggttaataaagcagtattaaaccatgctgcagtgcgaaattttaaagaaaagatgttgggagcttcctttagagtgctctctaattttctgatgcatgggggggaaatgcctcttcctaccaaatttgaatcaattattttcaaaaaggctctaatcattttcaagaatttacaataatgccttatgttcgaaacgttttttgtggctctcaaagcactgccaagtacattctcttatttaacctccacattaaccttttcaggtgggcagagcaggtattactgtccccatgttacatcgggtgaaatttgaagcccaggaactgaagggaaagtagctaaatgacacagctgtgaccagacccagacctcaccttttcattctactacagcgtattgactttttgtttttgttaggtcaaaattagggagaatgacgtttgcatttggatcagtaacagtgatgcatacttctttcttcaggtccagttatcttttgactgccacatatggaccccaaaagatctcaaaaggaaagtgtcctcattacaggaggaagtggctattttggttttcggtaagtgtatctataaaatatacacatggaattattttactggtagttgccagaagcattcaactctgacagcagagcagacttttacttgtttgtgtaatgtcaaaccagaaatgatctgtgttgcccactgctcagacattgcagctgagaactacaggtatatttcacttaaagaaaaattatttataaagccattaaattgggaggggtgactattcacatcaccaaaaacaattttaaatcatagctgttctttcacagttatcttattattcacaaatattccaaagaatagatagtgggccctagaaccaagggggaaaaatgccaccattctttgaagataaggcctctctctttgtaatttaagtagatgagaggattctcacttttgaaaatttgaagaagcgaggcttgcaccaaggaacmtgcatagtgaggggctcaggatgagccaagaagacttggatcagccccaccttgattggtaaattactttatacacttcccctaggcacagcttaagagtgacttgattcaacgtttactgtttcttatttcagcctgggctgtgccctgaaccaaaatggagtccatgtgattctgtttgacatcagcagccctgctcaaaccattccagaaggaatcaagtttatacaaggagacatccgccacctgtctgacgtagagaaagccttccaggatgcagacgtcacttgtgtgttccatattgcctcttatggtatgtcagggcgggagcaactcaatcgaaacctgatcaaagaagtcaacgtcaggggcacagacaacatcctccaggtttgccaaaggagaagggtgcccaggttagtttacaccagcactttcaatgtcatctttggaggtcaagttatcagaaatggggatgaatctctgccctacctgcctcttcacctccaccctgatcactactctcggacaaagtcaattgcagagcagaaggtgctggaggcgaatgctacacccctggacagaggcgacggtgtcttaagaacctgcgctctgaggccagctggcatctatgggcctggagaacaaagacaccttcccaggatagtcagctacatcgagaagggtctgttcaagtttgtctacggggaccccaggagcctggttgagtttgtccacgtggataacttggtgcaggctcacattctggcctcagaagccctgagagctgacaagggccatattgcctctgggcagccctacttcatctcagatggcagacccgtgaacaactttgagttcttccggcctctggttgagggcctgggctacacattcccgtctacccgcctgccattgaccttggtctactgctttgctttyctaacagagatggttcacttcattttgggtcgactytacaacttccagcccttcctcactcgcactgaagtttacaaaactgrtgtcacacattattttagcttagagaaagccaagaaagagctaggttataaggctcagccatttgacctccaggaagcagtggaatggtttaaagcccatggtcatggcagaagttctggaagtcgtgactcggagtgttttgtttgggatgggctattggtcttcctcctgattatagcagttctcatgtggctgccttcttctgtgattctgtcactgtgaaggaggggccagaaataaggtgatcacagttggctgagatggttctcaagaaacatgggttttaaaatgtgtacagtgatatctggtgccaaacattggctcttcaaattgctacttaagaataggttcttggattgaatctttatgtcttatttccttgcactaatccagatgggaatgaaaaagcagaagcagagattagtttgaaatttgatttgttatgtgcttctgttttaggtgggtacaatagaagtcagtttggagccatagaagtaggcttagttgagttggagatgcccatcttgaatttctgagagggcaagatatacttatttccattttatgcagtctgcatctacctaaaacctctgactgatgtgggaatggcgaaacactatcaggcttgaatgcgtgtgaaaaacaccaaattggcccagatccctaacagagcaatcctcgaggggatggtggctattgctggagaggcattagctattcacagggtacgttttaggtgttaacttttgccctttatgatatcagggcattatgcctatgtgaacacatggtaatgtttgatgtttaggcctttattctacctcataggattcttttgaggattaaattcaagcatacaaagcgctcctcaacacacatagccattctttttatcagaattgtcatggtacattccttatgagggctttcttcctcagtgttctctttagagggctattgctactggactttctgcaatgtctttgggtgtgccctcagagcctgcaacaagtgtatttggatatactctatttgtaaagtttaggcctctaagaaggccacaatgaagcaactaaaaatctgatgattaagggagtcaatcaagctgatgccatttttagtttaaaaatgaagcagagctctaaactcatagatgggttttcttactgggaagaagattggctctctgaagacagcttccaatgaggaatgtattgaacaatggcagcactgtctggccacccacaaactgttacagatgatccagttacactgttgcataggaacccaagtggaaagaagacagagtccatgtctgtccatggctccagctacagaaaggatagtatgggaacattacaagggggatacattactgtggaaagttctgctagagttagtcttgagagtatctgtaaaatacaaatagatgagcaatccctgtggaatgctgcctggatattttcagaaaagctctgaacttgatgtcataataccaacaccgtgaatatcgtgtgtggccttaaccaaggaacagaagccctttagaacttagcttcctcacttgggagctgggactgactgcatttgccctttgtataaacccacccaccccatagggttcactgggagcataaagcaagatgtggtgaaagtacttctaatataaattgcaacatcagtatgaggtgatggtagtgattgtttttaggaaaacgtgtttggagtcttttctgtcataaagaagcttttgcattagcctggggttaacgcatatgagcacctgccatgtattgttctagaactgcttgaatatcctcatccccagagcaggtcatccaagacagcagggtggaagctgcattgtcctttatgacttggcctcaaatgtcacagtgtcattccacagtatattggttatgcaggtcaatcctattcagtaggggaaggaaatacacaaaggtatttccgtattataccagaagagggagatggtcaaaggcgatcttggaggctgagctcttggcccgatgtgagtcatccttccttttccatgaaacgttgcccacatttccagctacaaagctttttctgcctgcttcttgccagaaggattttaggggcccaacggctgtgttaacattttgcactatatccctttccattcaagctggcagtggtactgggaacattattttgaatgcgtcacctgagtcttattgcagttcactcacaaaagccacacccacaaatctctgaggtaagttctccactgtgagcttctgctcagactgccaagggacaatacgctgtgcttcttagaagccttactgtctgaacagctctctggggtgccacatcaggcctttctgagatcttaaaaagattttatactcacagccacagccatgcactgtcgtttccacagtctcgggtgtttacacaggttagccgtattcagtgtgggaggagactacacaaggatatgaataccaggaggtggtgtcattggaggccaacgtggaacctggctaccacattcctgcttccatatctccccaattctgttactgtctcccactccagcttgaaatggtagattttctcagtgctcattccttggccctgttctaataccatactttctccctaggtgagctcacctaagcccatggcctccattttcatctcccagcccaaatatgtactactagatgtacagttccagaccactcctgggctccagactcatatctaagtacttctgcaactccacatggatgtcccacatgcacctgtcagccagtgtagccaaagtggaattcataatcctctcccaccccaaattcttacagggctcccttccttagtaaatatctccactacctgctgaatttcccatcccagagatctgggataatccctgacccctgccctctcccagacttgacacacctaacccatgtttaagccagttgatttttacttgtaatcatgccttaaaactgcccaaggtataggtgtaccttctctcccatagattccactagtagcccatttgctcttccacccatatccacaccctccttccttcagtccattctccacatgcctagccaagagactctataaaggtgcaaatcttttgtcacttctctgctgaaaactttccttaggttgagaatctttaacgtgatcaagaggctttgtctgaactggccccttgcctgtctctctaacttcatctcacattattctgccttctctgccccaattacactgaccttttttaggttcctgggctccaagcttctcaggctccctgctcctccttttggcctgaataatgtttatttcgtgtctcttgttaagtctctttctagaggccttcactgatcccagcaatttaagattggtgctcctgctacaaatgatgctacaggcctgtcatagcttcctgcctttcttttatagcattgctcataactgtaaacatttgtacggttatttgtttaatgcctgttagctctatgagggtgggaactttgtcttgcttacagctgtactcctaatgcccggcacagtgcaggagttcaataagtatttgtccaatgaatgctgttttcccatctgctatggatgaacactcttttctagcacacagataactcactgtttctaatcttttggagactggggaaaatagccaacctacactagaactgtcgtaactaagtcaagattagatgaggtctagtgagtaagggaagtcattgtctatatgatctggtggagtattaatgctataaggaggtcagggaatggggaaggaatgtgggccaagtgatttgtgctccctccacatctcagctgaaaactcaccactttaaaagacttagtctatttcctgaaagggagctccccttcctttctatggtcaggagacgctgcagttaagaaattctattagttctagggttcccagctgccctcaccttgcctcaaccttagattgaatcactcaaccctgcctaacaataaaattatgctcacacttgtgcacttggggatgctctcagaggtctgggcagaagccacccagcactgctacctcacccatggcttctgaggagtgtgtgggaggttatccatatgattgatggagggtcgcaatgaaggaaggatgtgtgagcaacaaggagccctgtattggaacctaaaggtaatgcccaaactgctcccacctgcaaaaagggaagagcggtctggaaagcctgttggaaatacttcttggatgtcctcagtgccgtttctggtgacaggggcagacagtgccacattacaagcagtaacagttagtggagggtcaaataactcattctggcaccaaattacctatgctgtggtgtttctcaaacctagggaataggcctagggattcttttcaagaaaatgttttattttcctcaaccatctaacatggtgtataaaagaggcaagtgttgctttgtcgtagattgttggggctgcttctaccttgtattgctttccaaatctccggttcgcccagccttacaaagggtagaagttgcctgcagaatgccacgccccagctctgacccaattagacatcattatagggccactggtgcccctgctggctggccttggaagccagcaccagcaatgttattaaaatcttcaccagcatctcttgcttagagatggcacaccaggttgtgtgctgttcaccagcatatctcactttagagaatgataccccatgctcctttttggtgacaaaaagtccctcccagccctttcgtggggctgacctccacatgcaggcctgaccgctcacaggacttccatccttcggccgcagtcattgggccacgatgggccagtcagcgtcatcctttcagcctttctcccagagcaggtttagagaaaccctttcagctaggattgcttctctggggaggacaggcgcttggtgcagctcctcttcagggtcctcctacctgaaggagaggaccgagtgctgatgatgtttgggctgctgggtccagctatgtgttaagaagagccaaaaaatggagagggaggaggtcctggtgactacactggggttccgtaacgctgcctgcgggacgctcatcattccagatcgtcctctcacgtgagtcttcagttcactttcttttctgcttaaggtcctttaagttcgatttttctccaggaatcgcagcatgtcctggtgtgccatgtccacagtccactcctgggtacaggtgatcctaccccgtggtttccaaaggcagcctctccactcacctctgtgccctctttctttcaaacgggggtcgtcttttggtccctgggtaatttaacatttgctggagtttttcttaaaaaatgagattgatttccttttctagaatcatgtttatttgaattacgtttattcaaatcatgtatatttggcaccaacatacctttaagcagagtagttcaaactcttgttttatatggaaattgtttgatgaagtgatttgctccccagaacataaacgccccatgagagcaggaaccatgtctgttttttctacttctgtacccttcatatgcccaataaatgcttgttgacggggtgaatgcacttatcagccaggtggtcccttatctgaaattacagctgattccccagttattgcttcttttacacctgagactcccagcctgaggcaataagaacattcaaggcctaaattaaaaatgcagactccagaagggtgacatcatgtaaaacggcagagtaggaagctctggaatcggtcctttcactgtaacaaccagaaaagcacgggggcaggggaatgatcagaaccaatgatttcaggaactccttacatctattttacctcgatatacagactccagactcttccctgatgcttctgattgagaaagtctgtgttggttggtaatctgcactctaggtgtttcttatctttcaacaaggaggtgagcactggtgccagatactaaacactggctcccttgcaagatgctgagaggctcctgacttctgcttggctcttccctttgcagtgctttgctacagcaggtgctcagtacaactttgctgaatgaatgaagggggagatgggactcgccaaagggccttggattcgagtgaccccccacctgctcctttatgcagggcccagttctttgttgacacagacaagcactgctacgtcccagtgctgacttttccagccaacctagagcctctttttcttgagccaaagggattctttggcaacacatcttgttgtgcctggttacctgatcttttagtgtaaaacagc

SEQ ID NO: 94318 - DNA, 89023 bp, Homo sapiens
tatgggcatgcgccaccacacccagctaattttgtatttttattagagacgggatttctccacgttggtcaggctgccctcaaactcccgacctcaggtgattctcccatctcggcctcccaaagtgctgggattataggcatgagccaccgtgcctggcccctccggcctctttttaaacaaagacaaatcgagtatgactcctgtcctcaaaaaagtcacagtctaagtagagaagtagcctaaccctcttctccctcattactgcctttcttcagaacttacctttggggaagtgtaactgcaccaaattgctgaccctgataaatgataatgaacagagaaaatgaacttggcaaacagcacttccgccttattcctattttagtttagcactgactttcagacttactttatcatattctggctttttccttggcttagccaaaactcaaagcagcaccctgcttttttctttttgttaactaccatccactgagtatctgttatatgccgggatcatgttaaatgttttatacacatattttacattaaatcctcatgagatcacgttgaattaggtattattatacccattttacagatgcaaatcagaggagagagaggttaaacaatttagtagaatctgaactccaagtctttctgactctacagccaaagctggtaataattgtactattttgcctctaataataccgccatggataatattgtgcctttacatacatagtaaatacatggaaatcaatggtaacatgtgcatccatgagaatttctacttgcatgtaatagaaactaactctgacttatttaagtggaaataaaaagtattaaatagtgaaaaaatattgggcctttagcaaacccaattcagattatttagcatgtgtttcgtgttttagggcatgtatgggtgggtagaatgtcagggttgggagcatttaagaaaatcttgctgggcgcagtggctcacgcctgtaatcccaggactttgggaggccaaggcgggcggatcaagaggtcaggagtttcagaccagcctgaccgacatggtgaaaccccatatctactaaaaatacaaaaattagccaggcgtggtggcacacgcctgtagtcccagctactcgggaggctgagacagaagaatcgcttgaatccaggaggtggtggttgcagtgagctgggattgtgccactgcactccagcctgggcgacagaacgagactctgtctcaaaaaaaaaaaaaaaaaaaagaaagaaagaaaatctcattttttttcctgagctagttttgcaaaattgcttaaaagtagaaaaatcattttatataccgcctaaaacaatgtcaaaaatcattcctcaatcaagtaacattattgtgaaccgtataatactcacattgcttctgctacattatacattactactgcattgtctcttctgtgtgaaattgttctgttcattttttttttcgggacgaagtcttgctctgtcacccaggctagagtgcagtggtgtgaccttggctcactgcaacttccgcctcccgggttcaagcgattctcctgcctcagcctcccaagtagctgggattacaggtgcctgccaccacacccagttaattttttttatttttagaagagacggggtttcaccctcttggccaggctggtctcgaactcctgacttcatgatctacccacctcggcctctcaatgtgctggtattacaggcgtgagccactgcacctggcctgtttttttttgtttttttgtttttgtttttgtttttgactcaccctatctacaaggtcatactccttctgttaaggattaatttcaacttgttcagttttgagtaatacgttttgattcatctataaaatggtatttatctattacataaagaaacaccttcattgaggaaaactagaatagaaaagcaaaataagaaaaaaatattacacacaatcccaccaccttgctgtatgtaactactggtttaacatttggagtagaaccttccagggtttgtcctttgtggaaatacatttatgtaaatagtgtttttcagtgtgtgtgtgtggtgaaaatgggatcattctaactttttgcctgtatgttttcacttaacaatatacaggaatatattttcatgtcaacagatacctgattacataatcattcattttttttttttttttttgaaacggagtctcactctgtcgcccaggctggggtgcagtggtgccacctcgcctcactgcaacctccccctccagaattcaagcaattctcctgcctcagcctccctagtagctgggattacaggcgcccgccactacgcacagstaattttttgtatttttagtagagatggggtttcatcatgttggccaggctggtctcgaacttctgaccttgtgattcacctgcctcggcctcccaaagttctgggattacaggcatgagccaccgcgtctagtcaacacataatcattcttaatgcttgcataacattccatttattaatgtactatacaatgttttgccaatcctttcttcttggacatctcagttctttctgttacgctctccccttctttgcacaaactgtcctgagtcccattactgttttgagagtttactttagagcatgggtgtccaaccttttggcttccctgggtcatactggaagaataattgtcctgggccacacataaaatactaatgccaatgatagctgatactcaaaaaaaaaaaaaaaaaaaaaaaaaggtccatgccgaattttcatgatatccaccaccacagataggcaaaaaagttcttgcattcaaagggtcggacacggctgctttagagggaacaccatggagatagatggcagaaatatttttcagttattttctcagtataatttctactgtcaaggaggaagccctgtgaagaccagtgaacttaataaagatgaaaaacgaggtttggactagacagtctggggtttgaatgtcacttactagctgtggaaccttagatgagttgtttagcctaaatctccattttcttatctgtaaaatagggataataatatttatttcatagaattatttggaggattagcaatatcatatgtaaagaatctagcacagtgcctaatacaatagtgggtgctcaagaaatggtagacatatactagttattaccatgaccttttccttaaaatacagatcaccaaggaaatatcacattttcaaaaatgccactatcataaatgtctttaaaaaaatagtgagaaagcttactgatatgaacagaatggttactgtagctgtaagcaagacagtgtgtccagaatcttttctgccagtttctgaagaacattaatcagtcggatcacaatgtggttttaagtcatactgtggtttcaatgacaaatttcagatgcaaaataagagaaggaacacgaagcctttggcttttcctttatgaaytttgtaaaacatttaatatcaccagtggacacatgttctagtagctactaaacaagtttggctattcgagaatgattgttgaataacctctataatctaccaaaatggacgtattgactggtagaccaagattagttctgaggttcccagtttatttttatttttattttattttattttttgatacggagtctcgctctgttgccaggctggagtgcagtggcttgatcttcgctcactgcaatctctacctcctgggttcaagcgattctcctgcctcagcctcccgagtagctgggattacaggcacgcaccaccatacccagctaatttttgtatttttagtagagaaggggtttcaccatgttggccaggatggtctggatctccttgtgatcagcctgcctcggcctcccaaagtgctgggattacaggcgtgagagccagttctttataaaagtttgctctgttctccaacsccaatggaatagagcaatccaagaccatttcaaatgaaaagacataattggggaaagtagtagcagatagagcaaggtgttgagtaggctcagaaatgagatgactcttgttgaacaaagtctacagatcatgaattttaggcagatttacaaataaggatagcacatgctctgtaaatagcagctgttgccacaagccaaagggcaatatttacatgaatcctgtggcaaggtctgttgaccaagcatcgacctttccagccaaattcatatacttggtagcactttcagccgcgtcatcttgaaaaggaaggattgcattatacatgcatggaaaattgccaacgtacaaatatgttctgcccccaaataaatttttaaattctttttttggaacatggaacacatgtccccacaaaaaaaaggtgttataaagggatgtgtttcccagatttcctcacaaaagtgcatttaacccacgatgtaactgaaataatgtacactgacaatgagaaatacagtggaacaaaactgacttgaaagcagggacacaccaatacacaacaaatatttcttgagcttttctcctttgcagccccatgcaaggaaagaggaattctatctttcaatagctgcaacatggtgaaaaataaatcctccactgttgctgtccttaagggtccttctcaagacagggtatttagggtgtccattgcctcaagtatttatcatttctatgtgttgggaacatttcatgtcctctcttctagctatttcgaaatatacattgcattgtttgttcagtagagtcaccctactctactttgaacattataacttattccttccatctaactgtatatttgtactcattaactgacctctcttcattgatccgcctcaaccccacacacccttcccagacttctggtacctatcattctactctctacctccatgagatcaactttttagctcccacatatgagtgagaacatgtgttatttgtctttctgtgcctggcttattttgtgcaacataataaacatcagtttcatttatgttgctgcaaatgacatttcattcttttttatggctacatagtattccattgtgtatacagaccacattttccttaaccattcacctgctgatggacactgattgattctgtatcacgaaatgattttatatccatgatcattcatattatgtgttgtattattaccaaataataatggaggtgcaaatagaacctgtgccaaaaaatcacagtaattcatttcaattgctaatattgagtgcctaccacatgttgccccaggttcggtgggtaaccttgtcccctaggaatttaaaaatgcagtggtgaaggtaagagaagtgttcctgcacattggctacctgagaggtaccagaggtgaaaatagagcaaatatacgtaaaacttgagagtcagactttgccttgtaagtgaatgtgtttgcagctgcaatcaagagattcaaggagtgcttctctttgtgcagaatttaggaaggtggaaacagcaccgctaatcctacctctttagggatccgggaaagggcagtcccagaggggttccgcgctttgcaaatggtgaaaaagaccttctacagtacagttaggagcagaggaaaagttctttgtgcaagaaggggagagcgccccgaggtacaaagagcagatttaagggaaagaggattcgttctgcacgcatctgcgaggggagctcaggctcactgttgggggcgtgtgggaaaggagattttcagggggccgcgagttgtgggttcccgcctccacccctgtccgcgccccacactcaggcaacagttggtcgtgcggggccggcccgggctctgggtggggaaggggagtctcgcgatcgttgagggggggggggtggaggaaggggggagagtgacggggggaggccatgacgtagggtgggtggacggaagtggggcagggttgagggttatttaaagaagggggggcctgagcgaaggggttggaagcggagtgattccccacccctgctccatctagctctttccagtgcagccactgccgccgcccaggagccctcgtcccctgccttgtccccctactcgttcccgctcccacggcatggagcaggacactgccgcagtggcagccaccgtggcagccgcggatgcgaccgccactatcgtggtcatagaggacgagcagcccgggccgtccacctctcaggaggagggagcggccgccgcggccaccgaagccaccgcggccacggagaagggcgagaagaagaaggaggtaaataggaagggggtgtgtgtgtggtggacaaatcctgtgcctggcccctctgaggggcccaaaccctgacctttcggcgccgacaggtacccgcggagctttgcggggctaggggcggcgggtgcgggggtcggcggcggaaccgcctggcgttcgctcccctccccctttccttctcgccgcctggaggacgggggcggggctgggcgcgggcgggagcggcgcggggtggaggggtgcccgctctcccggggcctgggggctcgggagcccctcgacagcccccgaccccctccaccttcccggaactcgggtaacggggtgggggatggggctgtgcaggaaaaagcctccgcctctccctctcctctcgctcgctccctctccccccgccttcccgtcggcctctgcctgggaaatytgggcccttcaatcccacactcgcgctaaaggggttttgctggggctttttttgtaatttgaatttcaaggtgctggtggttgctgggtggagggtgacagggaagacatttctttctttcattggcaatgtcggtcttttggatggcaggaaaaaaaccatcccttgttcgtttgaaccccgcctgccgaggtgggggtgtcaccccgaggaaaggagctctctgcgtcgtacccccccgcccccccaaactgaggaaccgtggacgctggcttaggaaaatttccaacatctgcaccctcaccctcttctgccccgcccccgacggtatagggtttcactccagggccaccccaatggtccctcaatccggccccaagctttccaggcttccgcctccctctcctagtgggcgctgctggctcctggacacacacaggttttttttttttttctcctttaatttttaaaaaactcagcgtcgccaagatgagctgcttctaacgtaagggaactgctctgacacatattaaagccaatccagaaaatatgtattatctccataaggcacatttcgtgtggcccgagacatgcaaataaaactataaaacgttgaaaaattgacataaaaataggatggggcataagcatttttgatgtatgataaaattgcataactaatggtttatgtgtggattttttcctatttacgagkagtcatatcgcaattttaaaaaggtgggtaattatgctttagagatctcaagtggctttgtctgaatcattatatgatactatacgaccaaatgaaaagcttttgaggaaaatgaacacctttcgccttaaatgagaagagtaattttaaatttagcagttgcttctgtgacatattttactattacaaggttgactaaacagaaggacaattgtagtgctaaatgaaaaccgtagaaaacatacacattgtaagatctacgcggtacttggattagtaagacaatattgttggttaaaagtgggtgtaataccaagcatcaatataaatcaaatgttgtgaaattcggaaatgtctgtgtgccttttattccctggactgggcaaatgtgagtgccaaactgccttttgtatggcaggagaggttgtcgaatttccagattgtataaatttttgaattttgtataaaattttgtattgtgaaaaaacgggagaccaataaaaaagctatataatataaacactgagttgatgcctacatatttgtcaactcttgcctcattagaaattgccctaccagtacttcatttgtccacccaggacagggaaatgaggtgctgtatgtcaggaacttcctggatatccatttttatttttaatttttccttaaaaaatgaaatacattacatactaccttgacactttaaattgcatactaaaagtgcagattaacctcttcttcatggccatcagttagtgtactttgacagtgacacaaaggcacctgaaatcccgcaggttgttccctctcaattaagtaaccacctaccagactcttgcagtgttgtgttgatttttaaaaataatttttccagccgggcgcggtggctcgcgcctgtaatcctagcactttgggaggccgaggcgggtagatcacttgaggtcaggagttcgaaaccagcctggccaatatggtgaaaccccgtctctactaaaaataccaaaaaaaaaaaattagccaagtgtggtggcaggcacctgtaatcccagctacttgggaggctgaggcaggagaatcgcttgaacccggaaggctcaggttgcagtgagccgagatcccaccactgcactccaacctgagcaacagagtgagactccgtctcaaaataaataaataaataaaaattttctgtcttcttccttaattgccaggctgttagcgatcactttttaaacacctctagtttcaccagaaataatatgttagtttatgataaagattataggtgtaacaaaaccataaactcatttgaaaaccactgtaaaatacaaaagtgtcagtgataaaacagggagagggaaataatgacacgtgcacaccaagaatcagtgatgctactgcagtggaagacattttcgtccttggtttctgccgtgtcttcttgtagagtgccttcatctagtgatctttccatgtcatttactgttgcttgtattctcggtgacatgggaagccagattttcaaacttggtggaattgtctaccaaataaaaagaaaataggtttctgaatgagagcgctttcatgatgaatacagtagatgagaattagtgaattgacctgtgacatttacctactcaaaggtgtttttgcttactttctggttgttgaatttagttggtttaagtgacggttggattacccaacactgtagacatgaaaacgtcaagaaaaaggtcatggtctttaaaacaagccattttgttgaccttgtgctgcattctcatggcacctagactcagataacaaaatccaaaggaattcattagagtctcttagtcacttttcatcttttcttgtatgaaaaaaatgtagttttgagaatacacacacacacacacacacacacacacacacacgagagaaggtttagaaggtaggtattttaaaatttgttgtggaagatagtgccaattaagtaattacccacagcttttaatagccctgctcaagattaggattttaattagcatataattagattttgatggtagtctaccgcaaggtaagcaaaaaagtaatgggtaaaatgtttttctaggattaaagctttaattttctgtaagtgtacttcccacattattatatatatttgtgcgtatgaggcaaagtaattttcattgttttgatactggaaaactgcacttcatataacctttcaaggaatgaatgataaacgtatggatttgatacccaatttttcttgttgctttgaaaataaatatgatttatattatatatggcagtctgaaagtgtgagtttgaggggctctttagcagttttctattctcatccatccaggattacattcaaaacattccatatagatgtgtacgtatcagatgctgtaaatcaagatggttattatttgggttagtgtaactgaatgatatctgatcagtgctacaaagtaagagtctggacaaggtcaaattccataatctcagtttggatttcctcaaaatagaaattttagtaaatattggaagacayaatgggggccatatttttcttatgtttaaggtcacattctgttgatttttgacctaagttttcataaataggttgacaaaagccatgatagttttcacgaacaaatttgtgttttctcttatgcaaagtatgtgttaaaactgaaatgctctcatctttggttctggtgggtagatttgtgtttttattattttatttcttggtttcttatagggaaggaggcttattctatatatgtatttatatttgccagtacaggcttgtctttacaaaggatagggtgcatgagataacccccttccccagataatctctatattaagttattgattgatgttagttttcgctaaattacaatttaaaaatatcaaacattaatagttaagtagccttgacaaattgcttctacaagatgtttatgcaatataaatagtttaaagtagttttcttcccagttagagaaaattaacataagccaaaagtttaaaactgtactattatattaagtatatgtgatcacattgcattacataaaaaattaaatattcttataatactatgaaaacaattttaaaaatatcgttttaggaacagaaaccacagtttttttttctgaaagtgtggcgtatttccatgacataaaggagtgtttcttagaattaatatttactttctttgaattatttggtttgtggttgatattagccttttctagattttaaaatctyttatttaatgtttacacattttcttacactataaattaaagaatggatgagaaagctcagtgtcttgccttttgggttttattccaattaatatttctttggcattcacaatttttcagattttttttattggacctcaggtgtacagaactggattaatcataagccttgttttgtgacatgctctcatcattggtccatacatgtcccacattgatttatatatttagttatgtaattactttccgccttcttctaatgagagcattgaccagtttaagaaccttgctttgcaatttggtgacatttattttctttgaaattctagaaaaacgtttcttcatttcaactcaaacttgctgctaaagcgcctaaatctgaaaaggaaatggacccagaatatgaagagaaaatggtaaatgtagtcttggataggatagtgaatgctgtaattaatttttatagttgagatgttaaagatgaaaaaatacatgtatatatataatgcatagagaatcattgattttagaattggaaaataatttaatatacaatctatcacaatattttctgttgaataaattaacctcctcattttcagatgaggaaataaaggatcagggaagctatatgtcatagttaggactagaagtcacatctcattttggttcggtgctctctgtcccataataaagtgctttaagctagaaatatttatttatgaggtgaaaatatcagtggtaataccactgtggctttgtgacctgagagaaatccagtcacaaagccagattgacgtatttttgtttctttctccttctttggacatatgaataaatgctacacattaatgaaatgtgtaatatgtcaatacactttaaagggaagaatatttgtccaatgcatgaagatatcacatatttaagcagcataatcttagttatacttacatattgcttgctataatacatttaattatttaatttttagttactaaaatacatattttagctttaattttaactaaactcttataaccttggatctttcaagaatttaacaggtggttgaaatggatttttttttcctctgaggggttgtttttgcagtaatattataaaaataagtatagatgaaatatattttttggttgttgatagctattttataagacttaatgtttaaggccacatctaatgtaggtaggcaatgttttaacaactctaaaaataacattccagtgaggataatataaaatggaaagtttttggcctccttccagcttgtagtctgaatttatctaactcttatgtttatgttaatgaactcttctgtaagttttctgggttattaattatgcatccttcattagcaatcaagtattctctactctgtggttggaaagtgactttgaataaataaatagtctttattttttcctttatctagaatgatgtatatatcttttgatcttttaagatttttttagtgaaacaaagttttattgcctgtatatggtacacgttccctgaccttttacaatttattgagaaattagaatacatatcaacttttaatagttaataaactatttcacatatatgtgcatatgtttatatatttttcccaaattctgcttactttggggagaaagtttatacgctactagcacaaaatacagttttctagatccctgtgagtgaagagaggagtgtttattacattactataccatgacactgaaaatattttgagacaagatgatactgtattttaagatttaagttatttctggatacaacttggaaattcttaagagttcagtttatggtatatatatcatagttaatttatatttcaatatttgggatatgttatatatttgatgcttaattttgttactattttatttaataaaatgatgttttggaaagaggatttgctttatgattatgactctttaagaagggtatttcttattggggaatttrctgtctgtcagataatttttcttcccttcaaactatttgaaaatacattttcaaattctgctgcttattagctgtgcaaggttgggcaaattacttaccctctctgtgcttcagtatcatgtagttacaatggagatgatacttgtaattacgtcataggtttcttaagagaattgaatggattaatgtttcaagtgctaagaatgttgttcaaagtaagtatttgttaaataactttgaaggaatgaaaaggaaagtccttacttttcttttgttttgcaaattagaaagccgaccgagcaaagagatttgaatttttactgaagcagacagaactttttgcacatttcattcagccttcagcacagaaatctccaacatctccactgaacatgaaattgggacgtccccgaataaagaaagatgaaaagcagagcttaatttctgctggagagtatgttggcacctctctctctactttctttcctttctcctaccttttcttcctcctgtcctcccttgatccyttcatgcaccccttcgctcttcattgttcagtataccttcatgtgacaaaaaatattgccattataattaygttttgaagacaactatatttttttctcactagaggctgatcagtaaaaatgtaggctggttctactgatttctaagcaagaccttggacaactcattctttttctataaaagataatagccatgtacactgatttaattgataccttatcatttaggtcgaatatgaagggatttccttttttaatttcagctaccgccataggcgcacagagcaagaagaagatgaagagctactgtctgagagtcggaaaacatctaatgtgtgtattagatttgaggtgtcaccttcatgtaagtacttcatcacattggtgagttctttttcaatttagttttagaaaaattttacttgagtatgttaatgaaagtatgaaatgtccttgcattttttcaccagatgtgaaaggggggccactgagagattatcagattcgaggactgaattggttgatctctttatatgaaaatggagtcaatggcattttggctgatgaaatggtaaggaattggtagctaaaaacacattctcagttatcartgatttttatgtaaatttgaaaaacctgagcttacctgcccccctgatgcctggaggctttttaaaagttgttatcatgtaaaaggtattttgtagtcttagaattattattatttttttgagagaggatctctttgtgtttccaggcttgagtgcagtggtgcaatctcggctcactgtaccctcgacttcctgggttcaagcgatcctcctgcctcagcctcctgagtagctgcgactccaggcacgtgcccaccacactgggctaatttttatttttatttttagtagagacaggtctcgccacgtcacccacactgattttgaactcctgggctcaagcagtcctcccacctcgacctcccgaagtgttgggattacaggtgtgagccacagcacccagctagaattgtttcgttaagtcaccgctagaacacagactttcacaggccataaaactcttactgagctttcctcaaatggtccaaaaaccttctctgtacttttgtttttgtttgcattttggcttccaggaagcacagagtcaagatggatgcccaaatgatgcctttatgtaactttttttttaaaattttttgagatggagtctcgctctgtcacccagactggagtgcagtggcacgatctcagctcactgccacctccacctcccaggttcaagcaattctctgtctcagtctcctgaatagctggggttacaggcgcctgccaccacgtccggctaatttttttgtatttttagtagagatggggtttcaccgttttggccaggctggtcttgaactcctgaccttgtgatccacctgcttcggcctcccagagtgctgggattacaggtgtgagccacccccaccctggccttatgtaacctttaatggtctgccctgtgtgtccttctgtcttttcctattctttatctacttgtctttcttactttccttgtcgtctctttatttctattttgccattaatttatgttccatgttttcattgtaggctacctgaaatccttttgggaataaggtggggtatacaaaccaaacaatatgtaaatgactgcctgaatatatgcatgtgtgaatgattatcaatattttgacttgtgaacaatcaaaaagtgcataggtggaataaggaacgaataaagagtaatgttgaatcttgatacagtacagtgcatggtggggctttggaaatcagtgaaggagttataaatgtgtaaataaaataactgaacaggaaaaagtaaggcatataagatgctaattcatcagctaaagggggaatacatgaaggcttttttttttttgagacggagtctcgctctgtcgcccaggctggagtgcagtggcatgatctcggctcactgcaatctcctccttctgggttcatgccattctcctgcctcagcctcccgagtagctgggactacaggcgcccgccaccgcgcccagctaattttttgtatttttttagtagagacggggtttcacgatggtctcgatctcctgacctcgtgatcctcccgccttggcctcccaaagtgctgggattacaggcgtgagccactgtgcctggccccatatttgtattttaagaccaaattaataaaatgcgatttaagagagggcagggaaagttctaaatccatataactcaatgatactcatatttatgtgactctgaaaccatacttgtaatcactattatccagaagagccacatgatgatacgtgccctatggcgtctagtatagttggtagtcagtcgcataagtactcatccctggttgagcaactgttaggtgtgtggcagaggatcccttaaagcaagggtctgtagctccttatatttaggtattctagtttgaagactgttgtcagctcagagggggaggagcttggttaattggacaatggaaggaccaggattatttgccccaagcagctcttggcttcagcctgtctaaacatgaaggatctgatctttagtgatgaatttgtgctgatatcagatatatgtattatatatataatatataatatataaatatatataatatatacttactttttttaatatatatatataatttttttttgagatggagttttgctcttgttgtccaggctggagtgcaatggcgtgatcattgcttactgcaacctccacctcccgggttcaagcggttctcctcccccagcctcccaggtagctgggattacaggcgcccaccaccacgcctggctaattttgtatttttagtagagatggggtttcaccatgttggtcaggctgttctcaaactcctgacttcaggtgatccatctgcctcggtctcccaaagtgctgggattacaggtgtgagccactgcacccagccgataccagatatgttttaattactaaaaaatagacacttttaaggagtatagaaaatttggaaaaaaatgaataattaaaattaagttataattctgctacttagaagtaaccacagctaacattttggcatatttcattttagtctttttcttctggatgtacttattttgtatagttgaaatcatattgtatatataatttggcattctgatttatttacattcatacatatgttccatgtaattaagacattttccgaacataattaattattgcataataatccttgggcggtaccataattttattcaacttctctcttattgctgttcatttggattgcccgatgtgtagtgtaaataatgccactataagactcttgtaatttagtttttgtgcacctctcagattatttccgtaggattcctagaagtagaattactkggttaaggagtataaacattttaaggttttgatgtatagtattcataaaagttgtctcattaagtgacatatcagataggatacaataaaaaaatagctttaagcagacatttataaaaagaagtatatatcttgctcagagataaaaccgaaagcagttttaagaggccgaaaaaggacttagttccctttcttatgggttaggtatgggttcatagatattgaatatattattttttaaaaagtcctctggagttggtgatctctctcaggttctttctggctgcaaagttctgttttgtggttcctaaggttcttaagagtgtgagatgcaagtacagagccacaagccccttgagacacatagtctgaatatttaatatctgggctgtaataatgttaggaacaataggaaagaaagaccagtatctaagcaggctggcaaaggaagcgggtctttataaaacaaacacacagaaaattcctaacttcagaacaagaagaaaaattatatagtagattgcttgctcctttaggaggaaaatgttctaaatagaaagttgctttgttgagcaacattctgactgcaagttattggtttctgtttgtgctcacggtaagtacaatactgaattggaatgatttggttatcttctttaaaaaaaggtatttggtatttttacttttcattggtagaaacataattgcctttgcgagatagtggacaaagatcttttgttatgttgttcctaacaaaatgtttccttacagaaaaaatgttcatggatttttttccttgtgatgataatgcagggccttgggaaaactttacaaacaattgctttgcttggttacctgaaacactaccgaaatattcctggacctcacatggttttagttccaaagtctactttacacaactggatgaatgaatttaaacgatgggtcccatctctccgtgtcatttgttttgtcggagacaaggatgccagagtaagtgagaaacaagtgtaaaaaggcagttaagaataatatcatttctggagtttagttacatattattgctgttaaaaacatctgagttgactactactaaataagacttaaggtgtatgtactctaagctagactctgttttaagtgctttgcatctattaatttaattctcacaacactcccatgaggtagatatatcacctattaataatagacaatccattattatgcttcatctacatttgcttthgttcattaacctaagcatttttgaattgtactttgagtgacttttcattaaaaacatcttattttattgacagtatatcttaccagtgactctcatttgtgctattttgaagccaacaatatataaatttgcattacttaaaattttatatttaagtttttgacttttgacttggtgtacacacacgcatatgcatgtacacaactggaacctcttctatatgtacagagagcctcgtgttttgtgtttatgcatagacgcagctttcagttttggtgtttgaatagaaaaatacatgtctgtatatattctcaggtaatattagaaactgggcattttaggggggtgtttaaatcagccatttgtcagtctagtaggctacaatcattttaggactgtagaattaatctaaaaataatatattatgtaaaaatactaaaacagataatctgcttagaaagcttattattaaactttgtctttatttgcctccagagaacacagtttagagatgtattcagttttccatatttagataggttatctaaagataycctcaaaagaatggtagtgcaatgaattacataattttatccttatcattttgcttgaagaaaaattacttaaatttatttaaatttaacttacaaataatttaaatattgaaatactgagctcataagtttacaattacaggccagattcttccctatgcctaatatttccctaaagcaaattagtcacttagaactctttctggtcaccattgttatctaaygtaataccactccatataaactttgcatttctaaagtattgagcttttgctaaaattatttcttaaagattaaaagcaaaagataaatatctaggtttgtgttttcataatgtctcggtatatttaatttatgactgccctatctctacttcctggggaggctgggattctggtggcttgaaaaatttctttgtttctttttccagaggcggggtctcgctctgtcgcccaggctggaatgcagtgatgtgatcatagctcactgcagccttgaactcctgggctcaagcgatcctctcacctcgggttcctgagttgctgggactacaagtgtgcaccactgtgcctggctttgaaaaatttcttaatcttgaaaaccggtcttcaaagttagtgtttttcaaattgtgagttgctacccattagtgggttgtgactttagcttagtacttggtaaaacaattttctgcaacattgagagagaatggaatagcaaattgcagagtgtttcatactataataaggataaatattgctttgagaaacttttaagttgcctctttctgtgtacacacactcaaacatatatgtatatactggattgcaattcaaaaggtaattttactgtgggctatggtcaaaagagtttgaaaaccaataattgccagttacataaataataagtgtaccatgttcagcacttagagattgatgtggatatgtatagaggaagtccagatcattacatatagacagatttgaatcttggtagaacataggatagatatgttgggtctttgtattttcctggtcttctgtaaacattttatgaaggtaatattttagtaataaaaatttgatgtaggttataataggcatttaattgagttgggagattattagagatactcttgatcctgtctgattgataccaatgtgctttgtggccccttccttttccacgccagaggtatcaaagatagtagacatagaaatgggtttgatttcagttgtggctttgctactgattgtgtagggttgagtgagtcttcaagggccttaattttttcacctctaaaatgagagcttttggattatgtgacacctttaatgttttatcgagatgtttaactctaaatgtatccaatagttacaaaaaattcaaagcagagctaatttaaattaaaaatatgcatttgttgyatgaaacttgtaggcgaaaccatgaaactgagagcttcacaaaatcaaataaggataaggtgttagcacgactgaatggggtctggcactctacttctctttattttgtctcctattccctaatgtcttaattaaatttataaatgtgatcacttcccagggtgcaactgagatctctgaaaaggcctttttttttctgtcctcctcttcagtccaggtgattctcttatacatagtagacaatcagtaaatatctgttgaatgagtctgcagtgtgtttagtgcatagttgtgaattatgaaataaagactttgcagggaacagttaattttgtttatgcactgtaactccagatttataaaacttttttttttttttttgagacggactctcactctgtcgcaaaggcttgagtgcagtggtgacatcttagctcactgcagcctccccgcctcctggrttcaagcgattctcctgcctcagcctcccaagtagctgggattacaggtgtgagccaccatgcccagctaatttttgtattttttagtagagatggggtttcaccatgttggccaggctgttcttgaactcctgacctcgtgatccatctgccttggcctcccaaagtgctgacattacaggcgtgagccaccatgcccagctagatttataatactaatcagcctcttcttaatatagattttgctgcttcccattaacttttgtggttttattttgactgataacatctggaattcagctcatacaagttaaaaatgctctcagtcaacttacctaccatgttggccactgcctgtgaagacttaaaaatagttttaaatagtctcattgttttccatagcctcctgtactagacagagcaagtcccctttatgaaatcayrtttgtaacctcatggcaagatctggaacttcacaaaaacattagtgggcttccatgaccttttaacaaagtatatgagtcagcccagctagaaaatgaagaagggacatacaagagttctccaaaggttggaatcattcatgcacattgagttctatttgttgaaactgtatcatgttggtaactcttggatcttggcaagaatatgttgttcagaaagagttactttgtctatgttcttttggatgccccatgatatgaagacaagcccagtaactttgtgatttctggtcatacgaacttttctaggtcattgaatatgccatatttctgtaagggaagcctttgtttctcttctgttaatgaatatattagcaggtcatccagataattgaccacacaactatctttgggcctcagttttcccatctctaaaatggatgaaactaaatgatcctcagggtctcttagaattcttaatattttcttgatattttaattctgtgatcatcttataacatattctaatataaatatattctaatatgaagtattttattttgcattaggctgcttttattcgtgatgaaatgatgccaggagagtgggatgtttgcgttacttcttatgagatggtaattaaagaaaaatctgtattcaaaaagtttcactggcgatacctggtcattgatgaagctcacagaataaagaatgaaaaatctaaggtaagttatcaatatctttattaaagtttacatttaattaccaggttggtttgttcacttttctgtattcagaataaaaaatgatggaacagccggtgtggtggctcacgcctgtaatcccagcactttgggaggccgaggagggcggrtcacaagatcaagagattgagaccattctgaccaacatggtgaaaccccgtctctactaaaaatacaaaaattatcagggtgtggtggtgcatgcctrtagtcccagctacttgggaggctgaggcaggagaatagcttgaacccgggaggcggaggttgcagtgagccgagatcgcacccctgcacttcagcctggcaaaagagtgagactccgtctcaagaaaaaagatggaacattgtgattttattcatggaatgtgaatgcaaatctaaattattgaatacaagacacattaaaattgagcacagtttttaatgtaaagaaaattaagtgttcctttggtatacctcctgtgcctaactgttatgctgtagtattttaatattgttgagaatatttagtgtgcaaatatcgtttgtattgatttattttttattgaggggctaccttatatatatttatatggatgagagaaaataatttcctggaattatctgacttgtgtgaattagagtgtggtgttaacactgaaaaatatcaatatttcttgccattcaactccatcaacagtaggaaaagcttcaattatgatgaacctctctttggatcactgggctaatttgggagaaacagggacagaactggagcaaaaccaccaggtggattatactaatttcaaattggaactaatatctgataagaggacacatgctagagaataattttttatttaagagcattataaaaatgtgcatttttgttcatatgattaccattcttttgtgctttttgtgtcttaatttttctggtcttatgtttagaaagttaatataagttactgggaaaatcggctcaattctggggcttaaaaattgtgaccaggccaagttagaacgtgtctgggcatgtagatgaatgtggttggtggggagatggagattttattgtgtaaaatggctaacctggattccatggagaagttctgacctttttctgtgagcccaaaatggagaaatgaaaattttgaagttggggggagggtctcaggtataaatatgatctgcattcttcttcctttttttttttttttttttttttttgagacggagtttcactccgttgcccagggtggagtgcagtggtgtgatctcagctcactgcaacttccgcctcctggattgaaatgattctcctgcctcagcctcctgagtagctggaattaaaggcgtgcaccaccacgcccagctaatttttttttgtatttttagtagagatggggtttcaccatgttggcaagtctgtctcaaaccccagacctgaggtgatccacctgccttggccacccaaagtgctgggattacaggcatgagccactgcgcctggcttgcattcttttaagtatagaaatgtttagttttgcctcactgcagcattgtcacctgaactagggtatttttccatagaaaattttcaagttatattgtagtcaaaaatatattggttggataaattacagtataactgaatgttgagcattctaataagtaaaataatcctcatatgagtattattttctagctttcagagattgttcgtgagttcaagtcgactaaccgcttgctcctaactggaacacctttgcagaataacctgcatgaactgtgggccttactcaactttttattgcctgatgtctttaattctgcagatgtaagtttaagccatacgttttaagtataactttcttattttcactgacatgtgttttaaaacattatagattgaaatttatggtactttttaatttgtaattttttatytgcatgttttggttttcttaggaaagagttctttaatagagttttaaaatgaggatctttggagaaatagtatgcttcttgtctttgagatcaacttgcctgttcaattttgtctctatcacattactcctaaaacttatgatgtgaggctgagtccatagtagtgcattcaccattttattttcattaagttgaaggggtttgaaacatatttttatatactagtttggcaggtggaagctataaaatgatctttgattattgtaggcattgacatttggtgagtgctaaagagctcagagtatgtgatttgaaagacagcatattgtgtaaatgtgttatttatatatatatatttttatcattaacacaaatttatgctaggacaccaaactaaatggaaagatttaagaactttggtgcttgatttttcccattattattattattactattttgagagggagtctcactctgtcccccaggctggagtacagtggcacaatctcagctctctgcaacctccgcctcccgggttaaagtgattctccttcctcagcctccccagtagctgggattacaggtgcccgtcaccacacctggctaattttttgtatttttagtagagacagggttttgccatgttggtcaggctggtctcgaactccygacctcaagtggtctgcccacctcagcctcccaaagtgctgggattacaggtgtgagccaccgtacctggccccattatgactgttaattgataataaaaagtagcaagtttggccataagttgctttgcacactttatcttgcttttgtttgttttattgtttggtaaaattaacattcttattagcattatgtctttgattttatattctacttttcaaactagatataatattgctacagtatggggaagcctaataaatgtcttttaaggaaaaagttgatggaattcttacacagtggggctcaaattttgttaactgctccagtattttacctattttcagaagtaaataatagtagctatcacagctgataatatttttgaaagtactttttaaatgcattatttccgtattggttgtataagaatctacagaatatcgggtatatttaaaaaaactgtgcactcattggagaatttccacccctctacaggactttgattcttggtttgacactaaaaattgtcttggtgatcaaaaactcgtggaaagacttcatgcagtaagtaatagcagacaagaacattcagtaattaaatagtatacacaaactgacccagaaaacaaaatgctatggaatctgtttgaacttgtgtttgcctcttggctcaatgtcactgtttctccctcctaacctttctgacagcctctttgttttttttttttttttttttttttttttttttattcctctatgtcctcagcctctctctagaacagcttttttcctttggctctcccctgtgaataatgkggtcctctccaatagagaggctgttcctgctcccacaccccacagttcctcaggatggtatcggtattctcctagttcacccactgccacttctaagctactgcttctccactgtcatgtataaagctcttcctttgaagcctaagctgtcttgcagttttatcctccacccattctgtttcctgttaatctgttcatcattgggtggctccttaacacattgtatgccaggctggagtgcagtggcatgatcttggcacactgcaaagtccgcctcccgagctcaagcaatcctcctgcctcagcctcccgagtagctgggattacaggcgtgtgccaccacgcccggctaatttttgtatttttagtagagatggggtttcaccatgttggccaggctgatctcgaactcctgacctcaggtaatctgcccgcctgggcctcccaaagtgctgggattacaggcgtgagccactgcatccgacctttcttttcttttctttttttttttttttttgagagagagtctcgctctatagcccaggctgctggagttcagtggcatgatcttggctcactgcaacttctgcctcccgggttcaagcgattctcttgcctcagcctcccaagtagctgggactaaaggcacgtgccaccacgcccggctaatttttgtatttttagtagagacgggttttcaccatgttggccaggctggtctcgaactcctgacctcatgatccacccatcttggcctcccaaagtgctgagattacaggcgagaaccactgtgcctggccccaactttctattctttgatcgcaatttctcatctctttctagtgctttcgttcatgttaatccttctgtacttgtcctgttacctcacagagacctctaatccccagacctctgcattttctccccatctatcagcttatttctgttgtgacttttttctgtatccagcaatgaactcattttctatcacttgaaccatctttggctagtactcctaaactcccttgctcccttctccgtctgccatacctgcctaaaaaccgtaacctggaataatgtaatgtaactgtctctctgtcttctgggcttcaattttgcttctgctgcttactagcagagtggacatctctgtattggggcagcccaacactggtaaagaagatttcacaactgtccaggttggaaccactgtgattccatgttctctaacataagctgagatgtcatgatactggtgatccttcagcatggccttctacagtcttctttcctgtttcctataacaactatttcagaccttccccagtctccccaagatttctatcccaggtatctcctgccctccttctccctcatcaggtaacatcattcctttctcaaaaagaaaaaagaagacattaggtaggaagtccttcaaggatgtccaccttctaaggaggtctgcatctgtgttaccttctgtttgagtggaagaggtgtcttttctctggtcagtggctaattcttccatgtgaatccttgatctcatctcttcctattctttatggactttcccccatgatttatctttttagttgactatattttctacctctttttaattgactatattttctatctttttaactgactgtattttctacctctccatccatattgggtcttttccctaagtgtaaacatgctcaggtgtctcccttattaattccaaatccaaacacgtacccatccaccctcacacatatgcaaaacagtgctccctcaacactgtgtccctctggctgtgattccgttttcttcccttgatagctaagctccttgaaagagtagtttatcctctccatatctactccctagtctcctgtttactcttgaatccattggccactggcttctatccattccatacaactgaaatttgtctcacagtgtcttcaatgactttccagttgctgaattcagggtacgctttttggtcagtatcttggctattgctttgaagctgctaactatctcctcctgctggaaactttgctgcttggtttctaggatactgttctcttttggattttcttttaccctttgtccacccctatcagtccctttcgtgggcttttctttctttgactgtctcttataaagtttaacattttataaggctttgtctttgactttcgtacatgctctccctggggatccactcccatggttttacctaccacctatatactgaygcctcctaaattgacctctctgtatccttctcctaagcactatactttcatatcccattgccttcggagtctttttgcttaagtatctcacaggcagtttaaactcttaaggatatcttttagaaaactttgaggctcacaccagaagccagaagtcttcttttactcttcccctgtccttacctcccatagatctctaataataatagctacagtttattgtctgctatatacttaagttctacacatgtaccaccacaaatttccacagcagacttggaaataggtatcattatccccatttaaaaatgtttggccgggcagggtggctcacacctgtaatcccagcactttgggaggccgaggcgggtggatcatgaggtcaagagattgagaccatcctggccaacatggtgaaaccacatctctactaaaaatacaaaaaattagctgggcgtggtggctcgcgcctatagtcccagctactcgggaggctgaggtaggagaatggcttgaacctgggagacggaggttgcagtgagccgagatctcaccactgcatttcagcctggtgacagagtgagactctgtccccttccaccccacctccccccccaaaaaaagtttggcgggccgggcgcagtggctcacgcctgtaatcctagcactttgggaggtcgaggcgggcagattgcctgagctcaggagttcgagaccagcctgggcaacatggtgaaacctcatctctactaaaataggaaaaattagccgagcgtggtggcgtgcgcctgtagtcccagctacttgggaggctaaggcaggagaattgcttgaacctgggaggcggaggttgcagtgagctgagattgccccactgcattccagcctgggtgacagagcgagactctgtctcaaaaaaaaaaaaaagtttggtatatacacatatcatatatttgtttttggatgaaccgatgaggaaataggcttggaaaaattagagaactttcctaggctcacaacagctagtcaggactgagctgattttagaattagcctgatctgggtttgaattccacatctaccacttgctagcaaagttcctttgatggccttactaaaatagaaatgataacatttctttcagatttatcgtaaggattaaataatacatgtaaagttcatagtatagtatctggcacattgtaggtaggtactctatagattgtagcactattgtcttgtgatataacctgtcttccaggtatacactgactattttatctttttttctctattcatctatattttccttcatattgaatattttctcctcatttatatatttaactacagtcatgcactggcataacagcgttatggtcaacgatggaccgcatagatgatggtggtcccatcagattataatggagcatatatagagacctgatatatggcacttgatactggcattgcagatcaagtaggggaaatgattgatagtgagtaatagtgctgggacacgtggttttctatatgaaaaaacaaataaatacatataccatgtaggtttgtgtaagaacactctatgatcttagcacaatgatgagatcacttaacaacacatttcttagaacatatccccatcattaagtggcacatgatggtactttgaaatgacctgcatttttatttcatttttgaagactccctgatcgatattctgacttcagatttcctctcaggtttaaaaatcttgttgtgggctgggcacagtggctcacgcctgtaatcccagcactttgggaggccaaggtgggtggatcacggggtcaggagttcgagaccagcctggccaacatggtgaaaccctgtctctactaaagatacaaaaatgagccaggcgtggtggtgcatgcctgtaattccagctactcaggaggctgaggcaggagaattgcttgaagccaggaggcggaggttgcagtgagccgagattgtgccattgcactccagcctgggtgacagggtgagactctgtctccaaaaacaaacaaacaaacaaaaaaatcttgtgttacagcagcttcttttttttttttttttaagggttctttggtgcttattcagcaaccaatagtcttgttgtcttaatttttcatgtattttgtgccatgaagtcatgaatgcctactttaggtcccctattctgattttctaatggactcttacttggtggttctttaccaagaaagttcgsaactggtattggtagtatttgtcagactatgcagtgggaagtaaatttcacattaatgttgttaatgaaatacattattaatcatattaaatgtttcataaacttttataaaaatgatcaccttttaggttttaaaaccatttttgttacgccgtataaaaactgatgtagagaagagtctgccacctaaaaaggaaataaagatttacttggggctgagtaagatgcaacgagaatggtgagctatttcatttcctttaaaacttatttgtgtgtaagaatttactaaaaattagctttgtagttgttcagttatgccattagttcaaaaattacattttatatttaaatggcaagttaagtagttcagatattttcagagaaaatttgtaagtattttatttaaccctttgaaaagagtataggttttggagtctatagatctgtgtttgaattccatgcattaccacttaacagctagttatcttgggcaagttacatagcctaaatttccattctgtaaaatggggataataatatttaatttatgaggatggtgttaggattaaagggggtaatgtcagtggcatgcttgttagttaaaaagcattctttaaaagcattctttggccaggtgcagtggcttacatctgtaatcccagcactttgggaggccaaggcaggaggattgtttgagcctaggagttcaagactagcctgggcaacaaagtgagaccccatctctacaaaaaataaaaaataaaattagctgggcattgtggcacacacctgtgtttccagctacatgagaggctgaggcaggaggattactggagcccaggaagtcaaggctgcagtgagccatgtttgtgccactgcactccagggtaggcaacagagtgagaccgtgtctcaaaaaaaaaagcattcttgctttttccttcagtgaaaataattataaccatattactagtgttgatgaaaatgttggtgattgtggatattacaaaaatagaatctggaatggttagataaatgcacttaaagcaggaaattgacaagggaagtcacaaggaatcataagtgggaagtgttaataatgtaatagtgctgctaataggagcaaaatgttacgtatataaatacaattagatcatgtataaaatatatgatttctttactacataagccagtatagggtagagattaagagtatattctttggactcagactaagatcacagcttggttttgtcccttctgtgaccctgagtaagttgtttaacttctcttagctgccttaatttccatctgtaaaatggggatgatactagtaaatactcagaattgttatgaagatttagtggcataattcgtataaagcccttgacatgatacttggcacttgcactcagcaaaagttgataattattataattacatattatcattgatcgggtgtatatatatatgtaagtctctgtgggggtggaattgtagaaaagagaatgaaaaatatttataggatcagaaaaaaatgacctgtgaagacaggtataagaaattgaaattgtttttagttcaaacaagtaaatgttggatgtcaaattcaggcaaatgttgtagttactgataattagcagatagaattctctaaataattgtcaactgatggcagtttcttgtcatggataaagcaggaggaaacaggtttataagcaacacacaagttcacatgttcaaatattcattactttgtaggttttgcccattagatttaatctcaaatcaaatcttgtttatctttaaacaggaatctaatctgatggccaaaggaacatttgtttatgacattaactttctagtaattgatgattaattatagtttaaatttttaggtatacaaaaatcctgatgaaagatattgatgttttaaactcttctggcaagatggacaagatgcgactcttaaacattctgatgcagcttcgaaagtgttgtaatcatccatatctgtttgatggtgctgaacctggtccaccttataccactgatgagcatattgtcagcaacagtggtaaaatggtagttctggataaactattggccaaactcaaagaacagggtgagtaataaatttttaaattagcatggaataaatttatattaatgacttgtatataaataaaattttccatattcattcattcacttattcagcagacattgttgagtacttaccatttgccaggaattgtcctacaggctgggtgtacaaagatgaataagacaacaatctttgccttggataagctcacagtgtagtgaggaggaatagttgcaattcattgtgataagtgctatgatatgttgagaaactgggagttgggaaagtcttcacagagatgacctttgaggtgagcactggacaatgtgtaggagtgaaccatggggaaaaggaggggaagggttttccagggtaatgaaacagaggcgtgaaacaagggaacacagagagcatatggtacttggggtagagtggcagttgatgaatctggaaagatggatggagccaaattatgaacggtattttaaaccatgccttaaggagttaggacttttattttgaaggcagagggagtgtcagagaagacttggctgtgaagagtgacaatcggagtatgtcactcttacatgttaggaagagaaccttgaaagcagtatgggggtctattgaggatgagagactaggaacaggagactagttgggagactattgctgtagtccagtgagagagcctgtggacccatcattcatccttaagaaaaagtaaaggcaatcttttaagtcgttgcaatatgtgtggaggattttgaagaccttaaaaaatgccaaactcaacaaatgcataattctatatatagcatctcttgaaggtgtgtgggggtgtgtgtgtgtgtgtgtgtgtgcacgtgtgtgtgtgcgttagtggagtgttcatgtgctctacatttatgttgcatatgtttattttgtagcttttaagttagtttcacacaagttgtacaactcactttttcttggtgaaatgttttaggttcaagggttctcattttcagccagatgactcgcttgctggatattttggaagattattgcatgtggcgtggttatgagtattgtcgactggatggacaaaccccgcatgaagaaagagaggtgaggaagagaaaataaaataagatttcagaaatcagagttcaattaagcaatgtatatcaacattaggtagttttgaacttttgccttttctttaggtgggtgcattgaatttctcattagcatctctttctctcttcaatcttcagtgtggcttccattccattgattctttacaaatcatctttttcaaggtcttcaaagacatcaccacttatctaaagggcactacaccatcccatccttattttctctaatcatgcctatctctgaccttttaaattactaacagtttctcaccttactctctaacctccaatttcatgtcattttcttttcctaatttgccagctatagcagacctttgccatttgtggagtttaatggttgagattttgccagtttataagcaaccctaaagactcatgaagcatagtaatccataaagggaatgatcttggttcttatagagctcttgtaaaaactaaatgtgacaaaataggtataggtatttatcatgaatttaaacattgggacactaaaaggttggcctgcaggaatgagtcacttagtgagtaagcttatctagtatgcagtatttttctcaaacatggaaattcttacagatctttagattattcctcacaaatgtcatgggtctaatgcgtttaataccctttaaagcacttttgcttggaaggctttgctaatttatcttctgttttctgtgatccttcagagctctgtctttggcttctgttttaagtctgtacagcaagtcctcacttaatgtcgttgcaaaaaaaaaaattagctgggtgtggtggcgcgcgtctataatcccagctactcaggaggctgaggcagcagaattgcttgaacctgggaggcggaggttgcattgagccaagatcatggcattgcaccgctccagcctgggtgacataatgagactctgtctaaaaaaaaaaaaaagataggttcttatagaaactgcgacgtcaatcaaaacaatgtatgatgaaatcaattctatcttaggctaattgatataaacaagatttaagttctggccaggtgtgttggctcatgcctgtaataccaacgtttgggattgggaggctgaggcaggaggattgcttgaggctagtcagtaaagactagcctgagcaacatagcgagacccggtctctacaaaaataaaataaaataaaatttaaaaaagcattagtcaggcatggtggcatgcacctgtagtccttgctcctctggaggccgaggcaggaggatggcttgagcccaggagtttgaggctgcagtgagatgtgattgtgccactgcacttcaaactgtgtgacaggacaagaccccagttcctgtggcatatttctggtcacaaagacatcaccaagcttctaaataaagaccaaaacacttataatattaaacatggaaataaatgtgagccatacatacgtttaagaaagattaataaaaacaagtaagataattatttacctgcttattccagttcaggattacagtggttggagcctcttctggcagctcaggaccccaggcaggaactagccctggacagaatgccattccatcacagggcatgctcgcacacacaccactcacactgggaccatgtagacatgccaatttgctttttgtgcacagctttgggctgtgggagggcacagagaaaactcatacagacatggggagcacatgcaaaacccatatggacagtggccctggccaggaattgattgtttttttgtcatcagttttataatgaaatgatgttacttgaggacctgctgtactcatgctttgggtaaagatcatggttttatggtatagtggaaaatgcactgaacttggtttcagaagacctgaattttagcaccaacttcaccactttgcagcgtgtgcaagccatttaattctctgagcctcagtagctgtaattctaaggatagtaacaactaggcttctttctctgacaatgttgtgaggatataataggtatgagcacagttttaaacggcatattgcagtacgtactgcaggtcatgaaattgcacccaggcctttctcccttacacctttagggccccatctcaggctacaaggactctctcttagcccgcatccctctccttctgtagctgcaatgggcactccgttccttgtgtgcctccttattgaagcctgtttctagcatagcatagtgttcacagcaagcacacagacccttttcatattaaaggtcttactgctacctctatggggaaacagttgcaataacatttatacgtatgaggatatttcaaggcttacactattccgtgtgctatagttttttcactctctctgagatggcaacttgaagcgttactgagcttttgctgacttattcctgaggattggtttccctgaatccatactaaataaggccctatggtaccattcaggatgatccttcttcctaggacaaagagaatatcatggcagagcagtacgtgctttctgacctcaaatagccaatttgcatttctgactgagctgtctactgtttacctatttatgtccaaattgttctggtttttaaaaattccaaacaatgttatcccctcagagactctgaatttcatgtattgactttaaatatagcaaagtcagagctgttcctttcttcttggaaatgccctgctttccctttatgttgtccacaccatcatttcatctattttcccaataagaagaagaccacgtttgattccttactttgattgtgtgccagctgtgaataagtaattctttctcaacagctctcagattttccctttctccattactacagctaaattcagctaacaaagccactggtcatcgtctgactcagttcctgtaacctctgcttaattggcctcctcacttttatagggaaaggaactaacatttgtcaagcaactactataagctaggcaacttaaagttccaattgaattctcccagcagcgcggtaaagtattggtataattttctccatttgaaactgtgtctcagagagattaaatacttgcccagaatcacagatgtaatcagtggtgaagttgtgattcatgcccaagtttttgctatttcctctacgccaaggtgcctctcactacaccacgctgctttctatactgccccctttacctgctctgctgactgtgacggtggtagttaccttctctgcctgaaactttgaccatgccatccatttattttaaaaaagattgcccatactttgtgattatgcaagtaatatatgactgctgaaggaagttttgaaattaaatacaagtatttctggcctatctttttaggtatatgtaatatgtataagtaattggtatcagacttcctatactatatgtaaagtacagtatcctgatactatttacttaatattatattgtactttttaatgtccataaaaaataattgtaaaagtaattttaggataatatttcaccctatggatgtactataagtaattcatccccckattcttgatcgtttaggttgtttcaaaattttcactattataaataatgctatagtgaaagtccttatacataaatctttgtgcacatctctgattatttccttaggataaattcctagaagtggaatttctgggtcaaagggtatgaacatttttaaggctcttgatgcatattgccaaattgctttccagaaaggttgtaccaatttatactcccagcagcaatgtatgagagtgcccgtctcaccgccccctcatcaacattgagtattatcattttttttaaatcttcaaaaatgttattatgttgttttagtttgcatttatttgattactagcgagaatgaacattattattgtgttttctaaccatttgtatttgttctgtgagttgtctgttctttttttctgctcatttttctactggactttgtttttctaattaatttgtatgagatctttatatagtaagaatattcatattaattttaacattctttactaaatatccctggattgtcatcctgattttcttcattacttacctgcttgttccttgttaccatactgatagaaatcttcttactttcccctttatccgttgccctcattcccatttgtaaaccattttctctgttggttgatcttctaaactaatcattcataagctaatggaaatgaagttgagatttctgatattttacctcctagatatatttcagctctcactcaaaacgttttcattattattgtttttaaataatgtaaatgaattattacttgcttagttaaatttgtgtatgtaattgttctaaatttgtatctatcgatgtaagcttttaaagattaggaacttcatttatataatatactttctacagaaattcacacagtacagtatatgtatagatgcttacatatttttgaagatggaagaatattataaagtatatttataaggaatattataaagtgtgtgaagattttctatatgtattttaaatgtttttatttgtttcttaaggaccctgatggtctaattttatttttctctttttcttctatccctttaycaataaaaaataaaggaagcaatagaggcttttaatgctcctaatagtagcaaattcatctttatgctaagtaccagggctggaggtctcggaattaacctggcaagtgctgatgtggttatactatatgattcagactggaacccacaggttgatctacaagctatggttagtaatctttaatggtgtcagaaatttatcatagctctgaatactrttgctatttacacacataaaggtcatttatgataaaaaggtaacaatttttgagagattttatagaagttacagtagattatcctggaaaacacagttgctatgctaattgcaaaaacaaaagaaatgaaagcgaacaacaaacacaccccagatccaacttatagcatttatgtgttgattttggtttttttcatgaaatagaaatgtcagttttttcccattcctacagattgaagaggacacataaatttgttttaatgaaaaggattaaaaaacaatctcttgttattattctgttcaacaactaaatatattaaaatccttagtactgaaattaagagaggtaggattttaactttcataaaaaacaatttgggagagaaggcaaaaaggtaagaaaggaatatattccagaaaaacacttgctacttaataatgataccatgcaaaagctattctacacttaaaaacatttttttttagggagcaaagtttctctgacctttcatcatgacactacaggtaacccctttgatattttggtgtcatttattgaactagagctacaacttctctcaatgtgactcacattttcagataaagaaatataatttagaagtaaaaagatgcaaaataacttcttaggttttgaatatatagctatggataagtgtctttttgggagcaatgaaaagtcatatgccaatgaggtataacttagaaggctttccttttataatagagaattgaaagggattgaccactgggacattccaaaatcaatatgctttggcgtaattattattgcattacgatggtattgaactacctgtttgatatgactaactaggagtaagccccagtaagttacagtgttactgaactggaaaatctaatagtgatagcacttcatttccgtagaagtcttagtgtgcatcccatctttcaggatttgctggttcaggtttaatgtaaatatgtgcaggggattgcattctgtttgaaaaatgtgctgtgttgaaactttgttactaggctctagtgtttttatatttagtacaaggcctgttttgaacttacattttttttttctctaccaccctcctccctttacctatttgctctagcagcttctgtgttttaaaaatactctccctagatggttttataccactagaagttcgccacctgtcacctgtaccaactataaaccataggaccagtcctaggctactgaatagtaaggatagtaatatcccattaatttttataactctttactgcatatccctcagtaagcagaaagaagtgcctgatgatgaaataaagcagacttttgccaccatagcaaccctaactacttaataaaattccttgctagtttcgaagatgtttatatttagtggcttaaagttacttagtaactcaatccagaaactttcagctccctcttttattcatcttacaggtgctttgccctttgtcctggaagtttcccattaatggtacaatataatatttgcagatttctttgttcccagtggtctttagatattctcaatattcatcatgctcttttccaaagtgtcagatctagagaaaaataactaattttatttttagaattttatagcatatgatggctctaaattttatccagaatatccaatatcttacattagaactctttctactaggatcgagcacatcgtattggtcagaagaaaccagtacgtgtattccgtctcatcactgacaacactgttgaagagaggattgtagaaagagctgagataaaactgagactcgattcaattgttatacaacaaggtatttatacatagaaacttaattaggtgttttttgtaaaacacatgtagttttcttcaaaggagattacttttaataaaagttgaccaaaatttgaaaacttagaggaaaaattgaaacatcactgtgtatcccatgagwctgtacaattgttatgtatcacctaaaaataaaaggaaaaaatttaaaaatgctaattgaggctgggtgaggtaggtcatgcctgtaatcccagcactttgggaggccgaggcgggtggatcacctgagatcaggagtttgagaccagcctggccaacatggtgaatccctgtctctactaaaaatacaaaaaattagccgggtgtggtggcgtgcaccagtagtcccagctactcaggaggctgaggcaggagaattgcttgaacctgggaggtggaggttgcagtgagccgagatcgcgccactgcactccgccttgggcgacagagcaagacactgtctcaaaaacaaacaaacaaacaaacaaacgaacaaaaaatgctaattgaaatcttctgaattgaaaccctggcatttgatatatggagtagttgaacatcactagcttattcttgaatgtcagtagcatgctttttgaagtacctgagattatttagcagataaaatggctacttttaaatttttgaaaacatattagagggtaccttttcatatagagaagtttgatctgaaaacagagtttgaacatgaaaaaaagtttctgtccttctgggttttaactgagttttacagaagggaatttatatagaaatagaaagtatgctagaagaaaaacttgtagggtttattaaacaaataaccttaatgctcactaattttttgttctttaaagctttatgtgtggttaaatgtgataatgtctgattagaatgattatgccttctttggaatatgattgattgaatatgtacaatttcaatttttatcattaggaagactcattgaccaacagtctaacaagctggcaaaagaggaaatgttacaaatgatacggcatggagccacccatgtttttgcttctaaagagagtgagttgacagatgaagacattacaactattctggaaagaggggaaaagaaggttagttaaaatagcattttattttcatgctggattgttttaatatcaacatacttcagcatacttatattttcattgtacatgtttatctgcattatctacatgtttcaggtagctcatattctctccaacaacttgtagatctatttccaggggtagattaaggctttaaaacttttttttggtgagaaagactaagaaccagagtttaaaattgagtgaccttatatctaatgctttattgaaaatactatatctaaaagccaagtaaattttgtgtttaatcacatgtataaggaatgctttttttttttttttttttttttaaagagacagggttttgctctgtcacccaggctggagtgcagtggtgcaatgataactcactgtagtctccacctcctgggctgaagtgatcctcccacctcagcctcctgagtagctgggaccacaggcatgtaccaacatgcacatctaattaattttcttttttagagacagggccttgctgtgttgcccaractgatcttgaacctctggccccaagtgagcctcccacctctgcctcccaaagcactgagattataggcatgagccaccatgcctgaccaggactgtatttttataatcttttttttttttttttttttgcactggactagaaatcatctactgatacattggttaattgaaaatcttttataaaacatttcatgaaatgctaaatcactatttgttaaagcataataagttgtttcagaatattgtaattttgtgtttagttcaccttcccctctccacaaattatggataattttaaacataagtaaaagtagacagagtagtataatgagccccgaagtacttatcacctgtttctaacaaccatcaaccagtcctgttctgtctatatccccagttatctttcccctccttggattattttgaagcaaatctcagacatacttcagctgtaaatagttcactgtgtatttctaaaatagaaggactctttaaagataatcattataacattgtctcacctgaaaaaccccaataattctttaataacaccaaatatccagttagtattcaaatttacaattgtgtcataaatatttatacttaaaaagttttcttttcatttttaaatcagaatgcaaatcaaaatacaaattgccatggttgagatttcatctctatcttttaaaatctataggccccctctcctgccatgtattgtattccttgtaatttatttgatgaaaagactaggttgtttgccttttgagttaatcacagtgtggattttgctgatttcatctccatggtgtattttactatgtttgttgcatatcttgtaaactggttgaatttgcttttcagaagaattttgtagttcaggtaataacctgcattttaaataatcttgtgttaatatgtttcataccagtatgcaaaatgtgtatttttagtccatctttgcctttctcttagctttagctatttgtcccatttaaattatgcaagagcaattataatgtgggtacaacttcactgacaaaagattttaaagaaagcytaagtgagagtacttgggaagcaccatttaaatatttgaaatacttgggcaagtaaaatttgcacttcaggtttgatgttagcattgcattcatamcttgtaaattagcagactggatatttcatgtcaaaacctgactattaaaaaggtagagaatccacagacttttacaagtaattcagtgataattttctcatttcaatgttttcacctttagactgcagagatgaatgaacgcctgcaaaaaatgggagagtcttctctaagaaattttagaatggacattgaacaaagtttatacaaatttgagggagaagattatagagaaaaacagaaggtaactttttactctcaaccattagaccctcaaatgagcatttctccccataacaattataaaataacactggcacttacctattataataccctgctctagagtgaaatttgatataggtctaaatatctcatgcaaggtatatctttcgtttattttattggtttatygtygtcgtcghcrtcatcatcatcatcatcatcatcaatttttgytgytgytgctgctgctgrtrctactactactactgcttagtactacttttgttattgagaagcagtgtaggattgaggttgaattcctgaattctggagctgaaatctcaactcttgtcactaattaagtgactctgggtattctcaattttctcatttatcaaatggaggttataatagttacatcatagagggattctgatgatgaaatgagttaatactcataaagttattagaataatgcctgacacttaatgttaactgtatgaataataatattagtaacatttagttacttaaatgcagaaggactttgttacatgtggtctgttgaagaaatgggggttttatttatcttgttttttaaactgaaattaaggctgagattttaaaactttttatttttaaattactttagacttacaaaatagttgtaaaaatagtacagagctaacctatagccttcactcagcttcccctaatattaacaatttacatgttagtataatgatcacaaccaggaaattaacaccagtttttctcctaatgtcctttcctgtgccaggaaaaggacattggttaattatctaattaactggtgttagattccaggggatctaatctagtatcccacagtgcatttttaaaaaaatagactttattattttttccttctatttttagttgacacatactaattgtacatatttatgggatacagagtgatattttgttacatatatacaatgtgtaatgatcaaatcagggtaactggtatatctactgtcttagcacatttgtgttgctgtaaagggatacctgaggcttggtagtttataaagaaaagaggtttatttggctcatggttctacaggctgtaagagaagcatggtatcaacatctgcttctggtgagggcctcagcctgctttcacttatggcagaaggcaaaggagagctggtgtgtgcagagaccacatggcagagacagagagagagagacagtaccagagagaggagggaaatgctaggctctttgtcaggaactaatagaatgagagaactcactcattacctcgaggactacaccaagcccttcatgagagatctgcccctatgacccaaacacttcctattgggccccacctccaacactggggatcaaatttccatgtgagatttggaggacaaacatatccaaactatagcattctgcccctggcctcccaaatctcatgcccttctcacattgcagattataatcattccatcccaatggtcctcaaaagtcttaatttgttccagcatcagctaaaaagtccaaagtctcatctcagtctcaatgcaagttccttacagctgtgagcctataaaaccaaaaacaagatatttatttctaagatacaatggttatataggcattgggtaaacatttccattctgaaagggataaatcagcctaatgagaggggtaccaagccccatgcaagtccaaaacccagcattaaagctccaaaatgatctcccttgactctgtttcccccatcctgggcacactagtgtgagaaatggggtcccgagcccttgggcagccctgcctccagggctttgctgggtacagcccacgtggctgttctcatgaattagagtatggtgcctgcagcttttccagataggagttgcttgatgctggtggctctgtaattctagggtccctgcaacacccccaattccactaggcagtgcccttgttggggactttgtgtaggagttccarcctcacatttccactcagcattgccttagtagagtcgctccacagggcagcgcccctgtggcaggcttctgcctggtaatccaggctttccaatacattgtctgccatttttccctctgtaattgataaataccttgtggggagatctttctcagacttttactcactgattttagcatgtactggtggagcttgcctgcagtagttattattgtggtgtttgcctaatggtaattttgtattttcttcattccatctatatgtatttattaattgatatttttctgtgtggaagatctaccccttctccccaatttatttgtgtcttcagttatttatttatatcagtatggactcatggatgttttgagttataatccagttctatctttatatattttgttgctcaaattgctctataaagctgttatatttttgaactgacagaaatgaattttcttaaaataaaaaagctcattcttaggtacttattttactgaaaaatgagaggtgagacattttggttttgcactgtagctagtatgctgataatgctttgtttctgttactgcttctgatagcttttrgtttcttgatttgtatttgtcaggttgtcctatctctaatcttcacttagacggcttatattttatcctgctgagatggaggtgatggcctatctgcacagggtggaaattgcctttctaatatgcttttgagatctcattatgtgatataagttttattaattttacaattattcctgcagacttatggataataggagtgttttatgaagtggaaaaattttaaacaatgaagtctaaataccagtggagcttcttatccacatttttagagaaaaattagtaaaatacttggctatctstaactggtttccttgtgcttctaattttagcaaagtaatgatgcgtaaagagaattttaataaccatgatgacttgtatttttataattaaatgtctgacagtaacagtggtgtccagaatcacatttttttctgaatattctgagctgagattatattttatttctgcctctttgtgttttctagataggttcttaaaataggtttaaattatcttttgaggagaagtgaaaacttgaaagaatatcatttttaaatcatggaaactatacattgaggtagattttcatatatggtttgttgaatcagttgcattacttttacaaccatacctggtaaattaaatcatgatggctgtgatcctgaataaattaacccagataagttagcattaatgtactcttatgtaaagtaaactaattcggtatgatttattcttttttttgaaagttgaggaattggccttcaatgtttgtttcaaatttgaatgcctagaccatcaaacaagtataggttaaatagctaaatacatcacttgtagaatgttggtttaaattattattaatttatttttactccaattgagaaagataaaatattggttatttataaaatatctctttcattactgtcgcttcacattaatccatctgaaggaaaagcgaaatttgtttcattgctgygggaatttctcattttacttaataatctcattataatatcggtatctcwggctcttagagttagaaggtcatttatgttaagtttcttgtaattaagaaatctcatctttagcatccaagacagatatgcagcctctgaacactgtagtgttgggaatcttatccctctcagggtagtttgtttcactgttttatattctctggttctcagaaaactttttatttgagttacaagttccttgatgaaagagattattttattcatgtgtatatcactgacactgacttgcacataatacagtaggtaattaatgaatagttaaattatattgagtagccatctactttctctaactttccacattgattttaatcttatggatcaatgaaggactgtgttcttttctatttgatagactttcatatgcgaatgtcaccgttgtgtctgtctttagtcattacttctctagacactgtgagaatttgtagatctctaaccatactggtcatcttggtttattatccactcttaaaatacgatgccaaggttggaattcagcccttagattagatcaagtagagtgagacaactaatggtggattaatgcccccttttatgtaaagatactaggctaaggacagaaataaagaaaaatatgaattaggaagccatttctcagactccagaacattgtagtgtcagttttgtctgttgactgttaaattatattttctagctgataatagggtaaaattggtaatgctgccaaatcatggttgatgctactttggatgtttaataatatcttgcatttaactcttggcagtttacttaatgctttcacatatatgatcatatgtaatcctcaaggtaagtattattattctcattttgcaggtggaaaaaaataatttccccaaagttatataactagtgaagtagcagaatcctggtctttctgtttccaccacttttccaactctgccatacctgtgtttccagaaggtctcatttgaatatttctcttgatttgaagggatatatgcttatcatgttgacatttattatttacccctttcatctgtttctttcttttttttcttcttttttaaatttttttaaattatactttaagttttagggtacatgtgcacattgtgcaggttagttacatatgtatacatgtgccatgctggtgcgctgcacccactaactcgtcatttagcattaggtatatctcccaatgctatccctcccccctccccccaccccacaacagtccccagagtgtgatattccccttcctgtgtccatgtgatctcattgttcaattcccacctatgagtgagaatatgcggtgtttggttttttgttcttgcgatagtttactgagaatgatgatttccaatttcatccatgtccctacaaaggacatgaactcatcattttttatggctgcatagtattccatggtgtatatgtgccacattttcttaatccagtctatcattgttggacatttgggttggttccaagtctttgctattgtgaataatgccacaataaacatatgtgtgcatgtgtcttcatagcagcaagatttatattcctttgggtatatacctagtaatgggatggctgggtcaaatggtatttctagttctagatccctgaggaatcgccacactgacttccacaagggttgaactagttacagtcccaccaacagtgtaaaagtgttcctatttccccacatcctctccagcacctgttgtttcctgacttttcaatgattgccattctaactggtgtgagatggtatctcattgtggttttgatttgcatttctctgatggccagtgatgatgagcattttttcatgtgttttttggctgcataaatgtcttctaattcatgcacgtattacagttaccacagtcaatgttactcttccgtctatattagctaccttttatttatttaatttgaccaaaaaaaaccagattgtacagattcttctcaatcaccaaggaagaactaactttaaaagctactttcaaataaaaataaagaaaactgtctttgcatctaaacttggtgtaccactatgttttggaactttggaggtaaattgtgatttataaggcaagttttgattcttcctgatggcttttgcttccttatgtttctgcagcctcgatgtacttgattttgataaaactgttgtttggagtcattaaaccccttgttgttgtttgttgtgtatagcttggcatggtggaatggattgaacctcctaaacgagaacgcaaagcaaactacgcagtggatgcctactttagagaggctttgcgtgtcagcgagccaaagattccaaaggtaaaactgtacaaggccagtttttatgtcctaaagtagatttctgttgcaacatgatctatgggtcagatttwcttgtatcattgccaaatcatagtctctaaaatataacagtacaaaaaagtatctgatttggcccagccatataaatggattttattgtatttattgttccatatatcacagaaatagtaaaagataagtaagtttacttcatgtactgaaaagaagtatatataatacattttcctccctcataggctccacggcctccaaaacagccaaatgttcaggattttcaatttttcccaccacgcttatttgagctcctggaaaaggaaattctttattatcggaagacaataggctataaggtattttttccattttttaagattaatataatataatctttaaaaataatttaatctgttaatctagactagaaggtgttgcattttaatttgagagaatgtgacagcaaatcacaacagtgatgtttttaaaaccaaagaggaagtttaactagatgtaaaacatctaaccactgaatcaccagtacagtcatcactaaatgagattaatgaagaattatgcaatattttgaaatagtaataacattatttttataatgccagtgtttgaatagttaaagaatatgtagagagaacaataggtatgcggttaaaagcgaatgttaatatatgataggaaatttttgatcatttccttaataggtccaagaaatagtatttctgtctttattgcytatacgttgctgaaagccttgctggtggttagtagattgtagtcacttaggtgttaaagataatgataaacatgatagtgaattatacaattttaaaatgatcttttggtatttggaattcttatttatataggtagatagaatcctagttttcatgagtgaaatttaatatttgtcacactaaatctgtcatattgggagagtaagcataccaggtaatttctgtatgttgaaattgacttcctagtgaatggagagagatgaccaaaggtataataatcactaacattaaaaaattataaaatactggccgggtgcagtggctcatgcctgtaatcccagcactttgggaggccgaggcagaaggatcagttgaggtcaggagtatgagaccagccttgccaacatggcaaaaccccgtctctactaaaaatgcaaaaattagctgggtgcggtggcaagcgcctataatcccagctactcgggaggctgaggcaggagaatcgcttgatcctgggaggtgaaggttgcagtgagctgagatcgcgccactgcactccagcctgggcgacagagggagactctgtcccaaaaataaaataaaataaaataaaataaaataaaataaaataaaataaaataaaataaaatattaacactattttaattttatgaagtgttctgttttatgaattaacagctgtgttttaaattttattttgtaaacctttgtcacaactggaactgtgacccattattttaattagtagctggaatgtgcctagaaaagctccatgtatataagatacttatatcttaactcattatattttggaactagagtagatctctagggtgaacattcatataagacataaaactagtttcaaagaaagtgaaaacagtgatacaccagaagaaacaggtaagttataggttcaaatataaaataaaaataggaaaattaatgataattattaacaataattattaattgtttaataatgaagtagttatcttgtgaggtaaacaaatacatatcatctcattaaggtttataataatttgaggtttagaatattattttctgttacgttcattaactgttgttagtgagacttgaaaggagaattaattgaaatgttagacctcagtaataaatcaaatatttgcatagaacattttataatttacaaagtgctttaacacatactgaggtcgttgattcctaacaacctcatgaagtaggtgttattatcatctccatttaataggtgaggaaactgaagttcagagaggttaaatgaccttgttcaagatcatggaactaacagggttgccatgggtcctggtctcacaaccagtttctcagtattcagatgttctattcgttccgctcagacgttctgggctctttctgcatgcgatgtaaccctgcttctttctgcagtcctaaataaggactgtgtttacaatggtgtggcatgacatttgggagttgggccaagtggtagtcaagtagcaacaattaaaaaaatcatctctgatataactttatgctccttctttggagatactgaaattttgttccccatgataatttacagtgaccaccacattctggccaccggtctggtttgaatataaacagtgcctttcattacaggcagtttgtggttaggggtgaagtcttacagtgactctttgggtggtggccagctggaaggagatggagaagagaggaaacctcagaagatggaggaatgaagggacagctgttaagggtggtagaaaggaaggggaggaggagaggtataagaatagagaaaagggatgaatagggagaggggagatggcatggaattcgtgctattgcaccttattgtttgctcttcctcacttccctgaaagaagcaagaggagagggaaaaagagtaaaaggaggacctttttttaaagtgtaatacctatttattgagcaatcctttgtgccaggtactgggccaagtacttgggataaagcagtgaataagacaaagtctttcatctcatggagcttacattctaatagaggagataggcattagatactacaatgtaatggtggtggcatttgtgtggttctgtgcttacaaggggtgctaatgagggagtataacatgggtatctcatgtggactgggagatcagggaagtgttccctaaggaaatgtcatttaagctgagtttccagagatgtgaatgagctaagtgaagtgtgggagagaaaagctgaggcaggtggcaccttatatgcaaaggtcttgaggtgggaaggaggatgactccttttgggagctttaagaaagccagtgttgttagggactggtgagacacagggtgacttgagatgaggctggtgagtgggtagagtcaaatcatatggagggctttgtaggtcatattaatgaggttgaactttagctttagagtaaaggaaacccactgagatgtttttaaggcagggaggtgggtgggtgggtggtaaaagtaatactaatagcagatacttagtccttacatgtgttacttattgttcaagttatttgtaaatgttagctcattatcctcctaacagcctttgaactacatccttattttacagatgaggaaactgaagcatagagaggttgagtcatttgccctgaataatttgctcagggtcatacaacttataaatggtaaattatgatcagatttacaatttttttttgagacagagtctcactttgtcaccaggctggagtgcagtggcgtgatcttggctcactgtaacctctgcctcccgggttcaagggattgattctcctgcctcagcctcccaagtagctgggactacaggtgcatgccactacgcccagctaatttttgtatttttagtagagatggggttttaccatgttggccaggatggtctggatttcttgatctcttgacctacctgccttggcctcccaaagtgctgggattacaggtgtgagccgccacgcccagcccagatttacatttttaaaagatcactttggctgcgatgcagagaatggcaggtttatctagggaaaccagccaggaggctgttgaagtatcaaaatgagagaagatggtggccacttggactgcagtggtggtggtggaaggagaaccaatcccctactactctactcctagccttggactctcttcagccgtatcctagattgcttctgtattgtcttaagacttgccttgatcctccttatgcatgcttagctgaggatttaggtgacaaataagaatacattctggatatttgttctttctggaccttgtctcttccattctttactaggaactatggacctgagctaaggtgggttctttaattgggtggttttttgtttgagttcagagaatagacagatcagcaggcatgttaatcatcttaaaaagctcccttttaaggatgatgtgatatataaccgttagacatatcttctcaaggcatagctagcattgctttatttcccccttgyaccttcagaaaactcatcagggccacaaagtaaatagagcactagtttatcctcaaatgaacaaaacaaaattgctttagtggagttacctggtattctgtgtacacagattctcaaaaagggactctttcccccttttctgcctaaaggattgttagccaaggggagataggtgatgcccatagctgggggcactgtggttcatggttacgttttatctatgttgagtctccaaaggcttattctgttgtgatttggagtggggctagtgaagggcccacaagttttgaagcagttggtagagagtggtttccttgtacttcctggttatttgcatttttattttctgtttttctccccctttccctccctcatattcagcacaaggtcacagcaatattgctgataataagatctggagttaaagagttttgttttatttgaaggtgagagaagtatttgtttcgccctaaccacgtggtggacagcagtacataatgtgcccattcttgctgctatctaagctttgaccttaggcatattcaaaagctgcattgctctttcgacttaaaggagttgttatttaatgcatgcaatcacttggtcactaaaacctttatattggaagaggaygacttaattgaaatttcaattacagcataaaaaatccagaatatctggacgttccattgagtctaaaacctggaatgcaagagttttgccacattcgaagctaaagaaagctatagaacattctaacatttatccccaataaaaaattctttagggacaaatataaacatttgacaaatggaggaagttccataatctttgtgagttttggtaatgtgtcattgtgggccacctactttttcagtggtagaactaaaataatggtgagctgatttcaggttactgcttttattttgtgtggtgtcacatttaattcagtactccatatttcctatgcaatgcttgctaaactcctcctaagaaacaaggccaaaaaaagtttttcactacttcatggaatacatttcttaatcacaaattccttagcatctgagtagaaatccaaataataattgagatttttactttagaaagataacattttatatattgtgttgctggagatcataatgagacatagagtatgaggactttaaatacctcctgggtatctgttcagtactattggtctgtaatttgtctgcttaattctttttttttcttttgagacggagtctcactctcttgctgaggctggagtgcagtggcactgtgtcagctcactgcaacctccatctcctgggttcaagcaattctccttccttagcctcccgagtagctgggattacaggtacccattaccacgcccggctagtttttatatttttaggagagayggggtttcatcatgttggccaggctggtcttgaactcctgacctcaggtgatccacccgccttgacctcccaaagtgctgggattacaagtgtgagccaccgtgcctggcctatctgcttaattcataatgtagtactttgaaatcattccaggaagcttaatgctgatacgaacctcatgaggtaaaaaaaaaaaaatgtatgtcttattaaaatgatgactattaaggtttttttttataggaggtgtattagtctgttttcacactgctgatgaggacatacccgggactgggtaatttataaagaaaagagatttaattgactcacagttccacatgactcgggggcctcacaatcatggtggaaggcaaggaggagcaagtcaggtcctccatgttagaagggaagagagaacttgtgcaggggaattcctctttgtaacaccatcagatctcatgagaattattcactatcacgagaacagcatgggaaagacctgcccccatgattcaattacctctcactgggtccttcccatgacacatgggaattgtgggagctacaatttaagatgaaatttgggtggggacacagccaaaccatatcaggagggagatacaggaatttagaaactttgagccttttctaattctaaacattttagcagctatttgagtaatttctagaattaaaatagcaaacatagctttcatgaagtcattcttgttttgctatgttaattaatatgaccactggatatagaataaattgcagtggattctaaaatctaatggttttataaaatattctgattttgcttttattagaagttgaaaggggaagtttttagtatggggatgtctgcatgggaataaacagttttattttattttatgtgggtatatttattttctgtcatgaattggatgtttataaaatattttcattttgttaaaaatatggtttgttggacatggaaattttgaaaatgtttaagagaaggatatcttaagatcaaagaggtttctttcaattaaaattaaaatttgaaaccaaagtaatttcacataccagcaatttaaggggtctattaacttttaaaactgtatctgtacttttaaaaaaacattatgaaggatttttaaaaatacaaaaatgttgaaataattgtacagtgaacacccatatataccccacatatgtttgacaatttacatcttatggtatttgctttttcaccgatttttccatttctctggccctctatcatacggatatttatcttattattatgcatctcaaagttgcagacataagtacattttacccagaaacacttcaacatgcatgtcattatccagagtcatattttgtttatgattttttaaagtaacatttacatagagtgaaatatataaaccttaagtgtaccattcaatgttttttcacaartgcatacacttatgtaactcgaactcctcctataaagatatagaccatttctgtcaccccagaaagtgccttttcccagtgaccatatgcactcctcagaggcaaccactgttctgatctttccctccatagattaggtttttaaatttttgttctagaatttcacataaatggaatcatacaatatgtataaggcttgtttcacttagcataatgttttagagattcagccatgttgtcccatgtatctatgtggctccttccttttgattgtggaacacctattccattgtatggataggccacagtttgcttattcattctcttgatggtcatctgggctgttttctggcttttggctatgatgagtaaagctgctgtgaacaatcttgtcaaagtctttgtatagatacattttcctttctttgggtaaatacttaggaatggaattgctggtatgcctgtaattttaacattgggtttagctactgaagagaagttgtttttaatcatgctatgactgggctacatttcattttaaatgtacaccttttccatttccatttgccaccatcctagtccagatgatcatgcgtcatttctagattatgatagtagagcaggttctcttacctgttagtcgctgccccacttcagtccattcagcaaaaggcttccgggtgaaaacactacattttgacactttactcccttgttcaaaagtctgcagcaccttctgtgtagtgtcaagaccctgtaaatctgtctctacccttccttgtttcttatctcttttcaacataaaccccatatgcgccttcctgcacatttctgccttcatgcttttgctcatacccctagcctagaatattctttcttccttctccatctccctagatccttagagttcttaaggtacagctcataattccacaactagtttgtgagctccttgtgggcaaggaccatatctaatataggtagagtttccctcattcaaaaatctgaaatctgacatgttccaaaatccaaaactttttgagctctgacattgcgtccaaaggaaatgctgctcattggagcattttttggatttcggattctcaagttagaaatgctcaacagataagtataatgcaaatattccaaaacccccaaaaatctgaaatctgaaacacttctggtctgaaacatttgggataagggataaaacctatgcttatattccaatcaatacttatcatagttctacaaacataatagacatttagtcaatacctgctaatttgattgcctgatactgatgattacaagtgaatctaatttctcagtatttctttttaatgctcagttaggttttatacctgaagaactattgtacttaatagttaatttttaagttacttttaagttacaatgatatagttccaaactctatgaaatacatataacaatgagaaaaatgcactctaatgtgtattataattacagggtagtaaaaccatgactacctgatgcccctagggaatgagtcatgtgtgcatttcaagcagtggaaggcttactgccagcccttttattttcatgtttaatggaatgctataaagtgtagtacacatgttatgtacttgccctcttaaatcaatgtgcttccttgtagctgcagatgcacatagcgatggtatcaggctttaggctgagagacttcatttgttcctccatacacacagtatagttcagccccatactgctgaaccacattggttatatatgctcactgtgatacactgaggctctgcaggctacagttttgagatacaggtgacaacttgctttcttggagagctgagcttctgtccttatcttttgaactcaagttctcttctcagttttcactgtatttgcagttctgtacccaaaacaccatatatgatttctgttggtcactgctgttgtagtcttttcctccttgaccactggtcctatcatagctatttgtgtgctctactatacccttccctcttatattctctgtttcctcttttttcttcattatcctgttaactttttccaaactttccattttatgtaaaaatgctctctccccttacataccttggcaggcaataaaagcactcctttctttttgcatgttgaactgatcagactgttggatgtaatgttcaggtgcgttgccacttctccattctgctctgtgttgccaggggaatatggattcttttttgttttttaccactaaactttttgtttgttctgtatattacaatagtataagggtagactttgttccagggtataatcatatctgaaatctaatgtggcatttgccagtgagttttaactatggaatatcatgtggcacaagaatggtttttacttcaataggatcatggtagcagaaatgtggagaggaccgtgtgtcattctggctatgattttatattgtttactcttgaaataactctaaagattgatatgtgtatatacagccttagtaattaatttttctcatcagtttactcttagtttatctcttgatttataggttccaaggaatcctgatatcccaaatccagctctggctcaaagagaagagcaaaaaaagattgatgsagctgaacctcttacaccagaagagactgaagaaaaggaaaaacttctcacacaagtaaaatattttcaatggctgtaatacttacagtcaatcaatagaaaaaaagaaaatatagatcacactttttattgtatgggcctagtatcctagtgtgacacaccaacaaaactcagggctattttgtaaacatgtttagaccaaatctccttatttttaaaaattgatcttatagaatatgcccttttggaaatagtggatagtatgtatatgcaaaatataagtgtcaagtattagcaatttgacatacattttgccaattataataaggtcagtgaatccacatttgaattctgatagacagtagttattaacatattcttttttgttttttgagacagtctcgctctgtcacccaggccggagtgcagtggtgcgatctgagctcactgtatcctccacctcccaggttcaagtgattctcctgcccaagcctcccgagtagctgggattacaggcacccaccaccgtgcctggctaatttttgtgtttttagtagagatggggttttgccatgttggccaggctggtctcaaactcctgacctcaagtgatccacccacctcggcctcccaaagtgcaactgatactacaggtgtgagtcaccgtgccaagcctgttattaacatattcttgaaaatttaaatttcttttgtttatagatgtgaattgtctcctgaagttatattctactaattttttattaatggaataatttcataattttcaaaattctttttatctttttttataattttcatacaatgatgagagatttctgaagcttttattattattattattatttaaggtgatcattgtataacaattattaaattaggaaggtttccatttgaacaaaatattaatgcttttaagtcattattgctatcatgagttttacgagtgttctacttctaaaataaactatagaagataaaaatttcagcatagaaggcttgcaaaataaacaaaatgtgtaccgtaggacattactttagtatagagggttgccagcaagatttatttattcaacaaattttgaacaatgtgcgatgcatagtagtaggtaattctccacgttaattattgaaagatagtttttatatttgtatattatttattatataggttttttttgctataacgtaattttattgtatggattttcacaaattacattcataagtttttgagccaaatgcctggaagtaataaagtttagtttgaaaatataatggcagatggctgaatattagaacttaccacagaataaaataaaacatttaaatattcatgttctattttcaaaatgtatttcctgaatgtaaaagtaaagttatggctttagaatgctacatgacttggagtatattgtgaatgtacggtataacatgaatatacagtctcaactgagataatattttagtttgtaattagaaatataatcagttttctgcttctcctagtatatgaattcatttttgtccttctctgctgccttaaataattaatctttttcaaaaaaccatggcagtacgtaggaacaaaatgtggggtcatctgaaatctttatcaactaaaagccagggatagagttttgcagtgtctggagtatcacatttatgtgagttggggctcgaggagtggaagacaaattcttggtcttgtgacttcacagacatgctaataatgccaagggaatttaaaacactggctaaagtgttttatgttttagtaaagaaattgagtggctccaataacgttctgcttgtagaagttctatttatgaacataatttagaacagaaattatttattcacactagttcagaatgatgtaaagagctacaattttttttttgcattatcttttggttattcctcagtgttcttttgatttagtgcatccacatttctctcttttaatttatgtaggaacagatctgtgaaaaaaatcattgaagtactagaatatcacgacttcagcatttatattagcatttttattttcatgcatttgtattttaatgtaggcatctataaaatatgaaattaaaaactacagatcttcgaactatgtatcaacattctctttgtaatagaaaagcagttatttctataacaactctcactcaacttttgattccarcataaaatatgtgcaattttataaggagaaacattttaagtcttttaaagtgttttttaatgtatcattgtatagaagtaaatagggcaataaatggatttattaatttaacctctattgataatgcttaactttttgttcacagggtttcacaaactggactaaacgagattttaaccagtttattaaagctaatgagaaatatggaagagatgacattgataacatagctcgagaggtagagggcaaatcccctgaggaggtcatggagtattcaggtttgtatataatttgaaacatggtgttgtattttaacgttattcatttatttagcatcaatttaattgtacctttgttcagagatgttttaaacttttatgaataagacatagatgagagtataaactataattgtatttctatgaaaaggttataagaaaggttataagatttatcctaacaaactgactgctattgtctctatcacctagctaaaagaggcaaataaagctctgataaaacaagggtggctcttggataagcattgacaaaattagtttcccaccttcccacctctggaatttggtcttctggttcagttctgagattcacattcagtggattgaattcgtgcctttctttctaggtcgtccttaaagtagagagttcctgtcaggcccatttagatgctcaaacaccctcagagttccaccctattccagagagttcctgtgggtcccattaacttggggctagcgggcgtagagctgaaaagattgctttaatcaatctgttaactggtcctcaaatcctctccctctcttactcacctgtgttgttgagctcgaccagaatcagtttagctgctgaagcatatggattttttttacacttactggtttattataaagggtattgtaaaggatacagatgaagcgtgtagggcaaagtatgggccaagagggcgcagcgctttggtgccctccctgggcgaaacctcttcgtgtttagctatccagaaatcttattaaaaataggtaaatatgtctagcaagttttctatatgtagtacatgggacttttctaacttccaaataggttcagctcttaaacttatcatttgaaacaagatgtttagaatctagagcattttttgtcattgaaacaatggcaaagtaggtttaagtttacaaagtaggtttaagtttctatgatagcccctgccccaaatctatttaaccctaccactgaaattctgtttttgcaatagtaggaaagaaacattacagtaccaataaatatactaaagattaataatagctaggaacagcttttaatttatctagcatgctagtgcttgaagaaatccagatttaattagagagatttttttttcttctggaaatctaaaagagtcttctgggggacttcagaggtcagttgtattgagtttttattacatataatataacattaagtatatgaacttccttttccttcataccagcatgatattactattactctgaacatttagcacataaatttagggcatttggaggcttaggggaaaaaatagattgaagagagaaattttagcatcaagagttgaatgaaaagaatgtaaaagggtatgtgcagagagatttttaagaagaatttttttcagaagataggcagggagataacatcggtgtatgtgaagttgcaagaaaaaaatgtgatttaaaaagatgatcctgtcagactttctttcaaatttgacaccaagccaggtggcatgactagctcaggactatttaattgctgcctgccaggttgggggccatgtcacagggtgaggagattgcaatgagtttgttgtagttggttacagtaagagaagaaatgtgtacaattgaccacccatgaatatacagtatcctgtacatagcaagtgtttaaatatttgttgaatgaatatgtgagtgaatgagtaaatgaacacaggtgcttataaaaatcagagtgctcacatacctttcttgataggctctaaaaatgaaaagcttgaggatgtggagtatgtcattaaaaggcctttcattgaagtcatgtgacatattaatacagccagattatttggctcatctataaaatttggttgagtgacttggaatgtttttcagtgtgtatgcaattaaaatcccaatgaggtttttttttttttttttatgagaaaagggtattccaagtaagtttaaaaacacactactggtcattggaaataccgtaagatgattagtgagtgattccaaaagcaaatgacaatttcaagagaaatggctgctccatagaaaaaaatttgaacaacctgttcataatagcttgggttttttgtttatttgtttgtttttgagatggagtctcacttaatcgcccaggctggagtgcagtggcgcgatctcggctcactgcaacctccactttccgggttcaagcaattctcccgcctcagcttcccgagtagctgcgattacaggcacgcaccaccatgtgcagctaatttttgtatttttagtagagatgaggtttcaccatgttggccaggctggtctcaaactcccaacctcaggcaatctgcccacctcagcctcccaaagtgctgggattacagtgtgagccactgtgcctggcccataattgttttcgcatgctaggaagctatattcactgtttatatattactctctcctgtgtcactttatgtgtttggtcccttttctatcatgtttgagtaaaaagcctagcttaaatcagtatctgcatcatcttttgaaatcctagtcatttgggatggatcgtaagactccgtactatttcatgaaggaaaattgctaacctaaaaccttgttttgaggtcttatttttaagtgaaaagttagtagtatttaataatttaacatattatatatataagattaatctgaatcttaattttaagaagtacaagctcattgtattctttcctattaattccttattctacaattccttggatttattkgcttaaatgataggattttaaagaaataactctgtttttcagctgtattttgggaacgttgcaatgaattacaggacattgagaaaattatggctcaaattgaacgtggagaagcaagaattcaacgaaggatcagtatcaagaaagccctggatgccaaagtactatgttttatgtcaaattattattagatcgttttaattgaaatagtggtcagctttgacttcttactgcacattcaattaaaagcactattttgtttaaatacacagattgcaagatacaaggctccatttcatcagttgcgcattcagtatggaaccagcaaaggaaagaactatactgaggaagaagatagattcttgatttgtatgttacacaaaatgggctttgatagagaaaatgtatatgaagaattaagacagtgtgtacgaaatgctccccagtttagatttgactggtttatcaagtctaggactgccatggtatgtattcctttcttaccgatttcctccaactttttattttgaaaaatttcagatgccatatatccttcacctagattctccaattaacattttgacacattggcgctctctctttctctctctctgtgtgtatgtgtatacatacgtagcacctatatatacgtgcagaatctatattttgtattaaaaaatacggggacatctrtattctatattctgaaatgcgtatctatattttataagtatacttaactatatttatgaaccatttgaaaattacagacaatgtgagtgttcatctctaaatacttaagcatgtatctcctaagaataatgacattttcttacataaccacaatcccacctgaaaacattgattcagtaatgtcatttagtatacagtctatgtataagcttttccagttgcccccaaaatgccccctttatagctgttttttttaaaattgatgatcctgcaagtttcacacattacatttcgttgttgggtctctttaatctcttttaatccacaaccttttggttttcgtgatcatgactttttaaaggtgtccaggctagttgtcttgtagaatgtcccacattgtggatttacctcattactcattgtaagattcaggttcaacgtatttggcaagagtgctgtggaagtgatgttatgtattttttattgcatcccatcagaaggcacattatgtcatgttgtcacactgttggtgatgctaagtttggtcacttgttaatgtgatgatcttcagagctctccgctttagagttatgttttcccctttgtaattaagcaggttatgcttgagactatgcgaatgacttaaagatggacttttaatgaaaaggagttgttgcctaagttgagttttttattaggaaacagaatatttaagttgaagagatattttattttagcttatgtgatttcctccattactttctaatgtgaattgtgttcctattctagtcctacttagcagtggtgttcatgatgattttgaaatacatgcaacacatttttaatgttggcattgttaatcttttgtcagccaaggtaattaagacaaaatagatttatgcagcctaaaaattaaaagcaaccagaaactaacaatgcaaacaatgtttttgtgactagtcataaaataggatacatttttcttagctgctacctatcataaatatctttttgtccaaaagttgactgagtgtgaaacaatgcttaatattttgcttgactcactttatattttcagttcaagttgaataaaaggaaaggaaaaatctgggttactgtagtgaagacattaattttggcagatgctttagaagatcacatatttgttaaaactttaacacaaatttagagtgtgtggagtatgtccatcaaatttatgaatggcgtatgcttggagagctagcaaatattttagaccaagccatgatccagaaggagctagagtagttggaatgatggatcagttgaatccagcaacacaacatttatttattttatttatttttgtatgtatgtaggtatttatttattttgagatggagtttcactctttgtcacccaggctggagtgcagtggtgcagtcttggctcactgcaacctccacctcccgggttcaagcaattctcatgtctcagcctcccgagtagctggtattacaggcacctgcaccacgcccggctaacttttgtatttttagtagagatggggtttcaccatgttggccaggctggtctcgaactcctgatctcatgtgatccacctgcctcagcctcccaaagtgctgggattataggcgtgaaccaccgcgcccagcaaacatgacatttaatagggatamatgtaaagtgctatacttgtacaaaagaatatgaaaagatatatatgttagcaaggtacagtaggaagaattaagaaaagaataaaaaagataaagaggtaatctgtagcttgaaggactgaggttggatatagggaagagttgttttatagagttctttggatcattgaaatagattattgaagaacaatgtagaatagcttttcattagcctttgaaagtggaattctattttgactctctgaagacattggcagtaagttacttggccttttaaggtcccctttagcacagtgaatctatgactatgtttagcagagaactccttttaaaagccatgcaggataaatcttttagccatttggggttttatacatgtaatgatttaatttagagcaccactaacagcttgtagaagacaaatgcctacctgcatttgtcagttaatcatgttttagaatatacatacccttttctgtgatagaacagttattgaattttgagtttttatttcagtgatattttgctaattttttaaaaggttgagagcttaatgctgttttcagtttctggaatcattaaaccagtaggacgaaacacattcaaagtgcaaggaaaatcttaacactatttataatatgaacacgactgtggaactacataaccttattttattttctaagaaaaaaatccagtataatattatcaaccactagatgtctctgaactcccttgtaaaaaatctgtttttcttccatcttctttttacaaaacatttacctctgtactctttctttaccgagaaatgtaaatctcaattatgttttccaaaaagcacatattaactatttaaatgatcataaaatgaaatctttttctgttaaaaatgaagacatttctgtcttcaattaccttctagaaagtggaatttattatttctgaacaatcttcagaaacatgcagtagtttattttatatttaaatattttaattgaaaagttttatttattactttttctatcgtattaaatttttatttcccttctagttaatggataatttttgcttataataatttttgcttataattctggatttagagtataaataatgtattttaaaacacacatacatttggaactttttagaatatttcatgataatttcaacaattaggaaattatagaaatggattgatggttcttgatgatcttctttccccctttcatttttagtaactcttctgtatagtgaatcacattcacaatctaggaagagaaactgccccatttgaaagaggcacttgtgatttctgaaatacaaagaagttgtttcattgaaaaatcccatcttagaactacagagaatgtaatttgattcattatgtgagtgtgtcactgtgttcaaatgaaaatcttactaatgattgaacttagcttactaaagatacctttaaaaacgatctggcttaaagatgactcttttctttctcagagacatgaatagtgtgaaatgcatcttataaaaagtagaaaccttaatagttatatttgattcagagatctcaaagtactgaattcatggctcctgacttaactaacagtcataaaggcacgaacttccgcttctaaatatgcctcactttgaaagccttcagctaaaggttgcagatttctttgaggctctttttcattaaaaaatgctagctatacaaaaragaaaatgagtttcagttcaatttctctgtgctaaaaggattgtgatttctttctctgagaatttgtgtggtctttaagtaagtaatcagtctctattgaactacataaacaagtaggaaggatatgatcaacttagctttttaagctcagagcatatgaattgccctaccattttctttctaagaaaaccatcttagaatgaggtcatagtcttaggatagtmaaaaacttatcagagttaaaaggacccttatcaaataaccataagaggaagtaatactttgtatttatgtagtaccttttatataatgcttgccaatccctttaccaacattagcttaattttcttgccactccttttaggaaatgaatgtcaggagagtatctctgttcattgagtgacgactaaaygtgactgggagattctggaagaatctaagaagtccaaaagatctagcacattagtcagtttactgcaaaggacatgtggaaagagtacccaaaattcaatcagtaattccttgtaccttcttaggtccttctaagtacttaaagtagaaaaagcagaatttaactctctgaaataaggaacatttcttgatagaaccatttattgcattatttgcagggctgctttgactcttaattttagttaaaaaaaaaattcttaccttttaacctctggggagatttttccttttccagccagctcaagagcctgtgtgtgcattgcttgtggccttgtatatattagagttgaatccgagtattagtaattagtcattacaattaccatatcttttgtagtagtttcaatgcatttttctgatagcatctcagaaagagaatcacatactgtggtatacaatgtaatgaaaattgtgttattactgcttgttttcaaatcacagctttattataaatgaaagtgttttctatttaaaaggtaagaaaatgacattctccattagaattgtaggaaaaaaatactttttagaaaatattgctttagctctttattaacttccctgtttttggcttatcaggaggtattaaatgttaattagtattggttcagcacaggatattttataaattatcagtccagtcagaaatggattttctttacagatactttagaaaaatgacagtcaaattaaaaaattgccaacttgttctatagtcacagtaacacttctatttgctgcttatggagtgtagtctaggaaatttcataaggaaagacagctactcatgatttttaatttccatgttagtacttaattgtgtgataacagctaattttttttttcttggctcactgcaacctccgcctcccaggttcaagtgattctcgtgcctcaacctcccgagtagcagggattacagttgcgcatcactacgaccggctaatttttaatatttttggtagagatgggatttcaccatattggccaggctggtcttgaactcctgacctcaagtgatcctcccacctcgcggtctcccaaagtgctgggataacaggcatgagacaccgtgcccggcctaatattgatattttagagcattacattcttagtagaatatgaaaaatatgaattaatacatcattggtaaaattaataaactgtaaaatgtactgatgggttcttcttgactatagaattaaaatatttaaaaccacrtatttatgcacttaggagtttattacctcctcatgcacttaaaagactaaaatgttcttttcttattaaattttttttttgaaacagggtctttttcttgcccagctggagtgcagtggcatgatcatgggtcactgaagcctcaaattcctggactcaagcgaacctcccacctcagcctcctgagtagctaggactacaggtgcgtgccactgcacgcagctggcttttttagtttttgtgaagacggggtctcactgtgttgcccaggctggtcttgaacacctgggctcaagcaatcctcctgcctcggcctcccaaagtatcaggatcacaggcatgagccactgtgcccggccacaattattaatagttgtatttaaagagaccagcatagcacgtgacccagagtaggcgttcagtgaataaatgggcatagaactgttgtatttaagtttgcttctatcccatagactcctacagttggaccagatttggatagaatgcgagcaaattatgccagtgggttggagttcattttacttttcctttaatctacctttttctaargttagactttatttggctatcatccctgcagcttttatttattcataagcttgaatagccagttataaatgtcatatgttttattatgcagcaatagtgttcgatttggtaccttgaactgttgtaacaatctgacatgaaatacaattaatgcactaacaggagttcatttaaggtatttattcttatgcgttatcttgtgaggaagtgataacaacattttctttttttctttttttgagacggagtcttgctctgttgccaggctggagtgcagtggcataatctcggttcactgcaacctctgcctcctgggatcaagtgattctcctgcctcagcctccccagtaggtgggactacaggcatgtgtcaccacgcccagctgatttttgtattattagtagagatgaggtttcaccatgttggcccggatgatctcgatttcttgacctcatgatctgcccgcctcagcctcctaaagtgctgggattacaggtgtgagccactgtgcccagtgatacagtattttctaaatagcaatgcttaagcagcagcagttacgtaaaagcatcataacatttaatacttgtttgtgaaatgtaggatatgtttatttgaatattaactctcatataactgcctgtgtgcattctagtatagactgccattgcttttcgttagtatgatagagattcaaaagtgactaggaacctgggaaatatactgcagaatgtataggtgaagacatcgattaaaaaagagcaaaggtgaagcaatgtccattttgttttactaagagctgtagaagaaaattctgacctcatagaactttacctacaaattcagaggcacaaatgcggagtggagttttttgtgtgcccttgctcattcagctgcttttgactttcaaccataacaggcgcagacctgtcattcagacttaggtaggcttagtgtctaggattttagtacataggaaatgtaatgtggagtctctttaatctctttcaataagtcacttcaagtctactgatgctttctctgccttttgaattgaagctttgaagctgagtattggagcaaaggatatttgaacttagtgcccaggatgattgatattcaccacacactaaggggcagtgctgctcactgcaaacattacatcatttattaaaggtagagatacatatcctagtattcaaaaattgaaacttgagtgactttgcattgaatagaatcataaaccattaaaaaagtatggagaaccaaggcaacacaattttgtttaaagtgaagctaagtctgtagcttaaaacaggacttggaaactgtggccccccacctgtttttgtgtggcctgaaagcaaagaatgacttttatattttttagtggctaaaaacatcaaaagaagaaggatattttgcaacatgtgaaaatgatacaaaattcacattctagggttcataagtaacattttcttggaaaatggacacacatttgtttatgtattgtctttggctgttttcgtgctacaatggcagagctaaatagttgtgacagagattgtgtggtctgcaaaagtcaaaaatatttgctatcaggctctttattgaaacaatataccaacacctggcttaaaagtatgtgtaagaaaggtggaaagaattataaccaagggttgatataagtgttatgcaattctttaagaaaagggttaagtgaaggatgggtgtataaagggagaggatatttagccttaaagaggggtatttggggacctaggggtgactgtgattgaggcatgggaacttccttgaaacatgtgaaagattgtcatatggaataggaaatcagcttgttctctaatgtctacaaaagttagacctacaaccaatttttggaaaccatgaggtagcaaattgtagctttgcatagaggaacatttttaacttgtctgaagttggaatagccagccttgtgaggtagtgggtactccatcattggaagaattcagacaggctgtacaactaattagcaaggacctagtagtagggattcaagcatcaacctgaatgacttaaaagttcctttctcatcttgcgagtttatgattttatgaactctgtgtcaagaaaagatttctgagtacaaagtacacttttgattacatcactcctcctgctcaaaaattgtttataagatccttttgtcaatggaattaagtaaaatttttaagttctttgttgttagttcccagtttctttacacagtcacacactggacatatttcaggttcagttccagaacactacaataaagcaaatatcacaataaagcaagtcacatgaatttgttggtttctcagtgcatataaaagttttgtctataaggcgagcaatagcattatgtctgaaaaagtacttactttaattaaaaaatactttattgcttaaaaaggttaacagtcatctgagcctttagcaagttgtaatctttttgctggtggatggtcttgcctcagtgtgaattgctgctgactgatcagggtggttgttgctgaaggttggggtggctgtggcaatttcttcagagaagacaacaatgaagtgtgccacattgattgactcctcctttcacaaaagatttatctttggcatgtgatgctgtttgatagcatgttacagtagagcttctttcaaaattggagtcagtcccctcaaatcttgccaaagctttattaactaattttatgtataattctgaatcctttgttgtcatctcaacaatgttcacagcatcttcaccaggagtagatgccttcccaagtaaccactttctttgttcatccataagaagcaactcctcatccactcaagttttatcatgaaattgcagcatttcagtcacatcttcaggctccacttctaattctagttctcttgctatttccaccacatctgcagtgacttcctccactaaagtcttgaatccctcaaagtcatccatgaggactggaatcaccttcttctaaactcttgttaatattggcattttgacttccttccataaatcacgaatgttcttaatggcatctagaacgatgaatcctttccagaaggttttcaattgactttgcccagatccatcagagtaatcactatttatggcagctatagtcttatgaaatgtatttcttaaataatatgacttgaaagtcagaattactctttgatccatgggctgtaaatgaatgttgtgttaacaggcatgaaaaacctcaatatccttatacattatctccatcagaactcttgggtggccaggtgcattgtcaaagagcaataatattttaaaaggaatctttttttgaggagtagggtctcaacatgggcttaaagtataaatacttcatactataaatagtgctgtcaccccagcctttgttgttccagttctagagctaaggtagagtggatttagcataatttttaagagccctaggattttcagaataataaatgagcgttggtttcaatttaaagtcaccagctgcwttagcccctaatgaataaacctgtcatttgaagctttgaagctgggcatccgcttttcctctctagttatgaaagtcctagatggcatcttcttctaatattagggtattttgtctccattgaaaattcgttggttagtgtggccaccctcatcaattatcttagctagatttttctggataacttgctgcagcttctccatcagcacttgctgtttcaccttgcacttttatgttatggaaacagcatctttctataaacttcatgaaccaacctccaccaactttaaacttttcttctgcaccttccttacctctctcagcyttcatagaattgaagagttaggatcttgctctggatgaggctttggcttaagggaatgttgtggctggtttgatctgtccagaccactaaaactttctccatatcagcaataaggctgtttggctttcttatcacttgtgtgttcagtggagtagcactttttttttttaaattatactttaagttctgggatacatgtgcagaatgtgcaggtttgttacataggtatacacgtgccatggtggtttgctgcacccatcaatccagcatctacattaggtatttctcytaatgctatccctcccctagtcccccacccccccaacaggccccagtgtgtgatgttcccttccttgtgtccatgtgttctcattgttcaactcccacttatgagtgagaacatgcagtgtttggttttctgttcctgtgttagtttgctgagaatgatggtttccagcttcatctatgtccctgcaaaggccatgaactcatcctttttatgactgcgtagtattccatgggggtatatgtgccacattttctttatccagtctatcattgatgggcatttgggttggttccaagtctttgctattgtgaaaagtgctgcaataaacatacatgtgcatgtgtctttagagtagaatgatttataatcctttgggtacatactcagtaatgggattgctgggttcaatggtatttctggttctagatctttgaggaattgccacactgtcttccacaatggttgaactaatttacactcccaccaacagtgtaaaagcgttcctatttctccacatcctctccagcatctgttgtttcctgactttttaatgatcgccaccctaactggtgtgagatggtgtttcattgtggttttgatttgcatttctgtaatgaccagtgatgatgagctctttttcattatgtttgttagccgcataaatgtcttcttttgaaaagtgtctgttcatggggggagggatagcattaggagatatacctaatgtaaatgacgagttaatgggtgcagcacaccaacatggcacatgtatacatatgtaacaaatctgcatgttgtgcacatgtaccctagaacttaaagtataataataataataaaaagtgtctgttcatatccttcgcccactttttaatggggttgtttgggtttttttcttgtaaatttgtttaagttgtagattctggatattagccctttgtcagatggatagattgcaaagattttctcccattctgtaggttgcctgtttactctgatgatagtttcttttgctgtgtagaagctctttagtttaattagatctcatttgtcaattttggcttttgttgccattgcttttggtgttttactcacgaagtctttgcccaagcctgtgtcctgaatggtattgcctaggttttcttgtaaggtttttatggttttaggtcttacgtgtaagtctttaatccatcttgaattaatttttgtataaggtgtaaggaaggggtccagtttcagttttctgcatatggctagccagttttcccagcaccatttattaaatagggaatcctttccccattgcttgtttttgtcaggtttgtcaaagatcagatggttgtagatgtgtggtgttatttctgaggcttctgttctgttccattggtctatatatctgttttggtaccaatatcatgctgttttggttactgtagccttgtagtatagtttgaagtcaggtagcgtgatgcctccagctttgttctttttgtttaggattgtcttggctatacgggctcttttttggttccatatgaaatttaaagtagttttttctaattctgtgaagaaagtcaatggtagcttgatggggatagcatttaatctataaattactttgggcagtatggccatttycacgatatagattcttcctatccatgagcatggaatgtttttctatttgtttgtgtcctctcttattttcttgaggagtggtttgtagttcttcttgaagaggtccttcacatcccttgtaagttgcattcctaggtgttttattctcctggtagcaattgtgagttggagttcactcatgatttggctctctgtctattattggtttataggaatgcttgtgatttttgcacatagattttgtatcctgagactttgctgaagttgcttatcagcttaaggagattttgggctgagacgatggagttttataaatgtacaatcatgtcatctgcaaacagacaatttgacttcctttcttcctatttgaataccgtttatttctttctcttgcctgattgccctggccagaacttccaatactgtgttgaataggagtggggagagagggcatccttgtctctctcttgtgctggttttcatagggaatgcttccagtggagtagcagttttaacttcctccaagagtgtttcctttgcattcacaacttggctagttgtttagctcaagaggcctagcttttggcctgtctcaacttcctcactaagcttaatcatttctagcttttgatttaaagtaagtcgtttccttttatttgaacacctaggggccattttagagttataattagcccaatttctatatcattttgtctcagggaatagaagcgtgagggagggagagagttgggggaatggctggttggtagagtggtcagaatacacacaacatttataaataaagttagccatctaatatggttgtgattcgtggtacctcacaatgattatgatagtaacataaaagctcactgaccacaggtcaccgtaacagatataataataatgatctttgaaatattgtgagaattaccaacatgtgacacagagacatgaagtaaacatatcctcttggaaaaatggcaccaatagacttgttcaatgtaggattgctacagacgtgcaatttgtaaaagcacaatatctatgaagctcagtaaagtgaagtgcagtaaaacgagatacgcctgtactttgatcctaacttagctgtattcatcactcatgctgtgcaacatttcccaagttgatttctaccaaacgttgttccagggtgtgcaaatcgatgatatgcagaacaagagttctgtgttcagatagagttgggacgtgctgattatactgaatcctgccattcacatttccactctgcattagaatgctaaaagctctgagaagtcctatcataaagaaatttgtgtaacattttaaaaaaccaacatttcccatacacatttgaacataggaattttttgccacagctattaacactacagagcagttttccgtttgttattttcctattctcttctgttgtctttattgtttttgcatctcctcttttcctcttgtgtgctgtttttctccaacttcatttttaaatccagtgtggggaaatggtgagagaaagagataactagactatacaattgtggaaacagtttgaggtcctatgaacaattccctgtaatcccccacaaaataggaagataaagatgtacaagaatctaggagaatatatgaaaggagaaattatagaaaaagaatgtgcttttgacatcatgaaatttctcatagtcatttcatagtcacttattcaataaatgagtcattttttattggtaatctagcctttctccttttaacttctagttttagctagtgttctgtttgtgataacttatgttgcgttaggcagtcatgaagcatgagaataaaaaaatggaggctgggcgtggtggctcacgcctgtaatcccagcactttgggaggccaaggtgggtggatcacaagatcaggagatcgagaccatcctggctaacatggtgaaaccctgtctctactaaaaatacaaaaaattagccgggtgtggtggcgggcgcctgtagtcccagctactcgggaggctgaggcaggagaatggtgtgaacccgggagatggagcttgcagtgagccgagatcgtgccactgcactccagcctgggtgacagagtgagactccgtctcaaaaaaaaaaaaaaaaaaaaaatggagctggtatctatagagaacatgacatgacctgtgtgataggaaggtaacacccatacttgtccattccttgatgtctttctgtagcgtcttagattatttttctgtctggagtagttattgacaggttaaaaggaatgaaggtatgaactaattacacagtccatttatactcattttgaggtattctacttccctgcttaggaggctgtctcaaaagtattagtttttttttctgaatcacccacatgaaccatgaatatatatctaaagatatctccagtcacaagcaactattacttattgagaataataatagccagaggatatagcttaatgattcacgagtcagctttacataaagactctatttagtctccctagaaaccaacgatcaaatctcatcagggtcaacttagccttttctataataggtaaattgaataacatgctgtttaatttgtatgtgtgttattgaatgaagctatggagaatatttggtctgcatactaaagatatcactattgttttggtaagtaaggaaaatttcagagttattgtttctaaattatttaaccctgggtgattgaagatacacaagaaacttgaacatgccagtgttacattagagtatttttaataggtaaacaataattcattaatgagcaatttttttctggctagactctggttttctgcctccttttgggtttcatttagagcctaaaattcatttgcctggatagttgatcttattttgtatcttacatttcctatgttgtatgccattttttttggattttatttggaaagatraaactgaattttaaacaattttccattcttaaaaagttacagattgcccaacacttaaatgttcattgcagaaaatttggagaattcaggctagtatcaagagaaaaataaaagttatcagtagtcctactcttagggatagccgatgttaaccactagtaacattattgttaatattcttttagctatttctgtgtatatatataataataataatacgtgtctgtgtattctgtttccagattaccaaaattttagttagttcccagtttaacactgctctaaacattgttttgtaaatatttgtatacatcttatttccttacaatacatttctggaaatggaattgctaggtcaaagggtgtgaaaattttaagatccgtcgttgaaatgtcaaatttgctttcaagaaaggtagtgtattagtcagcttgggctgccataacagaatgccacagactgagtggcttaagcaacaggaatttattttctcaccattatggagactgaaagttcaagatcaaggtgccagcagggctggtttctggtgtggcttctcctcctggcttgcagatggccaccttctgcacgtggcattctcatatggcccattgttggagtgcgtgcagagaaagggagagctttgatgtctcttccacttcttacaaggacaccagtcctattggattagggctccatccataggacctcatttaaccttaattacctccttaaagtccccatcttcaaatacagtcacaagtccccatcttcaaatacagtcacattgaaggttagggcttcagatgaattttgcggagacatacctcagtccatagcagatagtagcattgacatttcatcatcagtgaatgaaagttcccgtttcagcatcttattgtcaatgtcagatatgtataccatatatgtgcacatgcacacaagcatgtacatattgctaatttgatgaagatggcattgttttactttgcatttctttggtcattagttgcagtgaaacttgattataatgtttggacttttttttttttggtgagttttctattcctgtactttgaccatttgtgtgtgtgtgtgttggggttgttcttaattgccagtaaacctacattttcacttgagtgtttagctattctggcaggcatttttgcttatacagaaaaggaatcatattttaaaatattatttatcctttgatattaaaccattatttacctttaaaatatagcaaagtatacagggttaataatatatgatattccgtattaatgaatcatgtttaatgttcaccatacattcgtaaaaagtatttatagtttgcatgcattgatttgctgacagtgaaatataggtagtggcaaggttaatgtagaaatcttttcagatattatttgctctgaattaacaaatacagcagtgtttcctgtgatgtggtccccagaactctgatcccacaagatgtccggtgagaagaaagtctgttggttaaatatttttgacaactgctgcatcctgtacgccccacctagtggttcacagtgcacatagggaactgaaaggctctgagaagccatgtaataagtaaatctgtttaacttttgtaaactgggtacttccaaaacttattttgaccatagaacatccccttatttttttttgtttatgtgatttatgttaactttttattttgaaataagaaaattcacaaaaagttgtaaagaaaatgtacagggaggtctcatgcacccttcacccagttttccccaatagtaacattttgcaaaactatagtaaaatatcacaaccaggaaattgacattcgtgtaatctatagagcttgttcagatttcatcagttatacatgcgctcktgtgtgtgtgtgtgtgtgtgtgtgcagttcaatgcagttttgtcatgtgtagagttgtgtaacctccaccaccataagactccattgtgctatctctttacagtcacacctaccctctctcctctccctagctcccggcaaccattgatctgttctctctttctataattttgtcatttaaggatgttatataaatggaataatatggtatgtaacctttcgaaattagctttttttttttacttagcataattcccttgaggttcattcagattgttaactgtattaatagttctttcctttttattgctgagtaatattatatgatatggatgtatcatggtttgtttaaccagtcatccataaatgacatttacccccactcctaattctggtggaatctattaataccctgtgtgaatattgtcctgaaaaatagcagttttggaaattctataccacagaaatcatacagttaaatagttgtcagcgttttaaagataatgattgggttgcagaaattaaaaatctttattacttcatttaggaattccagagacgctgtaacactctgatttcattgattgagaaagaaaatatggaaattgaggaaagagagagagcagaaaagaagaaacgggcaactaaaactccaatggtaaaattttcagcattttcctaacttttaggtagatcccatttttttacataattaaaatgcctatattatgtttaatgccatagtgatagctattaataaaagctggttttatgaaatgctaatttkttttggacagaagaagaattgcttcacaaccatgtttcttatttgtttgtagaacatatggttaggaactccctagtaactaggctcagtattttaaaaaattcctcatgaatctaaacagaagtataatgcaagtgaaatcttttgaattgagactagagctatcatgggggtagcagaggggtaggggtgggatgggatggggctgaagttgaaactaggagttctgatttgatcaagtaagttttctgatgtttgtggaattatgagtacaaatgggaactctgagcagacaacaaagctttgcttggtaataagtgaactgttgaattgataggataacttgattttaatccagtcaggttgctttgtacagctgtaatttaaaatattctttaatagatcgtattatttgagtgtggttaagtaaactgccatatttcatcgaatctaagatgccttccattgtaagacacagcattattttatgtaccactgagggaaaatgctgccaggtgtaatttgtcatcagttgtaagttgcatcctgatttcagagatgctaaaatgtgaaagaaatgtgtatcatagaagatatgaaatatggtatgttaaaacctatcataagttttttaaaaaatatatactcataaacaaaattttgcccagaaaacattaagtagttctttaagataagagtacatttataataccatgtgtaagtagatacttgatgactatttttgatgggtattttatgtcttttcataaaaagaaacatctttgaaggttattttacattgggttatatagtttgttgggctatatagaacattaactgtgaatataacatttaagtgaatattcatgttaaaatttttttttaatgcatttacatcctagatttaacattgttgggccatttaaaatgtgcatattggagcagaacattaaatctgtttccattttagtcacagaaaagaaaagcagagtcagctactgagagctctggaaagaaggatgtcaagaaggtgaaatcctaaagcctagaaataaagttttaaatgggaaactgctattttcttgttcccatcttcaaatgctaattgccagttccagtgtattcatggtactctaagaaaaatctctttggttttgatttcttgcatattttatatattttacaatgctttctacctgaaatgtgtagctttatattttatggcattctagtatttttgtgtactgtattttgtgcatttcatgtcttcatcaaaatcctctcagtccttgttcttttgaagcttgtgctgaggttttagcttttctatgttttatatgccgctgctttgaaagagaacctagattctatagttgtattattgttgtttcatactttaaatttatatggctgtggaaaaacgaattaaaatgttttgaggagaaagactttttcacttctttgttgctttcttttctattgagtctgggcttgtttgtrttactgcatactgtgattagcataataattgtttctttgaggtcatctaaatatttttttcctaaaggaataaagggtgaggaaagaaaaatattaaaaaagctaatatttgatactgtgcttgctgtcagtatgcattacatttaaattattctctattcaagtgggaaaatataataaagaaatgtctataagaaatttaattatttcctgtttttttgtgcagtagaaagtagttgtgtttactgaattgtattgcttactactgtgtatttggttcaaagttaaagctttgcttgctgacttgtgtgtgatcttctgtcccatagagccagttcagaagggcctgggtgtaacatgtagaattattaacaattaagtttagagtatgaaataagcactatgtatgcagaagaaggggggctgtgtttgtcaggaatacagttatgctcaggtaacaatctcaaagtgtcagaggttttacacaccaagagtttttttttcttgctcacactacatatctcatgcaggtcagagggatgtgggaatgggaagggatctgctccacacggtaactcaaggttccaggatgactaaggctctgctattttgtggctgcaacatctggaacatgtggcacttaggctctttactgcctcggcctagaagtgacacatgtcacatccacttatatttcattgccaccaaagtagtcatgtggtcctatatacctgaaagagggctggcagatgtaggggaataaatggaacgtcttacattactgcctctgtcacagagactgtcagttcaggaacgaaactgggtctattacatgaaacttttagtgtggaattaatcagaatctgggtcaggttgtaagacagcagggaaaatggatcaaaatctagtgtgaaatacacaaccaataagtaaagctgagaatgcaggataatgatgttagttaccaaaacaaggtctggaccactaaagagttgtctcttcccccttccaagatcttttgcatttcctatcagactctttttagtgcactactagcaaattctgggtagcccctgagtgttagtcagcattcttcacatcctcaatcttttcatagaagttctccaacagaggaatagatcttctagaacaacaacccactgtctgttggactcttctaagtctccattcattgtccagattttatatctcttactgccatgtttctggttggattattttttctgtttccactattagcacttagactcttgtaccctgttgggggttggggtaaaattggggttctattaagagacaaggttgggacgatattatatcaggggacccagggatacccaaatctgtccttggcttagctgccttttctgtaagaaagggaggctaaggtgagcaaagtaatacttcactagctggtgctttggctgcaaactccagagctcttcagcccaaaatctaaccttggaattttccactccaatgatatgaatagctatagttagtcatctgcgctggagaaaatgataccagggagttttactgataaccccaagttctgtgcagtagaaaacagcctaatgagggtctggactctgatcagtcaattcagcctttcttttcctagggagcagagaagatggcaggtgggagtgggcacagttacggtctttgaaccccagcatggacatttaacaatctctacttctcattctttctctggtaatccaaagggttcagtagctgagctaatatgtgattctctaccttaggggagaaaatctgcaggtaagttcttgtagccttttcatggagtcatttccctgttccatatcatggctgttatgagtctttcttggaccaaagtgatgtgaaattcagctccccaaggccttcaatggatgcttctgatgtcatccttagaaacttgtgaaatagttttattcaggacttaacttaaagaccacactatatatttagtgaaaaattcacctattctacttctcatcttaaagtatgtatagctacactgttgaacctagcctaccaaacagacccatacagtgaataccagatgatagcttagtccaaataatagcatcttggaagtacaaaaatgcctcaagtctgaatatgaaacccctcttattgttaaatttctacagagaaattaaactcccattgaaaatgtaaaaatcccaagaaggaaataccatttcaaacaagtggtctagacatggctgctatgttggggagagaaacctggattgtcagtttactgtatcagctccgtggaggccagaggaagcagaagagagtgctatatatgtgaatgcagtcttataaagcataatgactctgcccaccagcaaaaatggtccagtggattacattggaatctgacccaacctgattccttgtttggaaaatgtacaaggaggaaagtgagcagagaaacagagaccctgagtggcttccttcactcaaggcctctatctgtaaaagataaggggtgaatgggatttcccaacaaccctagatcttccacagaggtccttgtaaagctctgtcttgattcattggctaatcaggctctaatttccttagaatcaaaagaaggcaggtggtgagctcagtaatctcttgttttcatcgtagccgttggtatggctttattgtatagttctatctttttctctggctacctggcctacaggtgttatgctatacttggatacttttcagattacacagttttctcgtgaaatatgtttccaaatttggttcttcgtctaagactcccagttaagagaagtttttgaactaaaatatttgcagctatcttagttgctggctgtttggtttgaaaagcctctacctaactggtgaatctatctactgtcatcaaaataaaatgctgttatttcctaattattggcaaaggtcccctctgtggtctattgttccccctctatggtgcagtagccagtgcagctaagagtcccaggtcagcttcaaggccaccacgtctttctctccaggtgttcttaccaattcctgaaatcctcaagttgttaccaaatttcaaacttctctgagtattccatctcatgtttccttcatcttcctaagccatcctgcctaatagacaaggagtaatatttttctgtggttgaaatacacatagcttatactatcctgtcacctatccctcagccttattatttctgtgtgctccaactgatttttgcctgccactatctctttctgaaggctttttcagagacttagaaggcttctctaccctccacatggtaggctggaagagctagggattaacgcatctggaagtggctctgaataaaaaaactgatgggagttggtgtatgaatgccccaactctcttacctcttgagcaaggtaactaaggtatgtgatttatggttccccagagtttacccaccggattaagctccagccacccacagtagtggctgtcttgataacacactctattaactgctttttttcccctgtatcacttccctactcccctgtaggtatttccttaggtcagctcctgaataaactacttgcattagaatcttcgtatcagcatttgcttctgagggaactcaaattaagatactcaccttgtgtgcatagctcttcttaccccttagtaattcatttagaaagcgtagggtgtttaataagagtaatgactggatagcatattattaatctgttcttataaattctattccctccgtgaacagttagggggtggtgtgactgaatcagggtattttgcactgggaacccctagctcttctaggctaccttacagaggctagagaagccttccagacctctggaagctaaataacaaaataaattttcttgtatcaccaatagctatggtattgggtgttattattattattattattatttgagacagagtctctctccgtcgcccaggctggagtgcagtggcgccatctcggctaactgcaagctccgcctcccgggttcacgccattctcctgcctcagcctcccgagtaactgggactacaggcgcccgccaccacgcccggctaattttttgtatttttagtagagacggggtttcaccgtgttagccaggattggtctcgatctcctgacctcgtgatctgccctcctcggcctcccaaagttctgggattacaggcgtgagccaccacgcccggccagtattgggtagtattattaggcagaggttccaaggttctcaagtgtttggtaaggccaaagctggtgcccaagctattgtctttttaagtgttctccatgctagctggtatcccttccctgtaccagtgtttcatttagataattggaccaagcatcggcctttcttactgtaatgcaaccattacaaaagcttgttgataccaggctcttttcatttgttggcctagtgactttatcgtttgtccctttcctgatacattgctctcctgctaaggaaactttcatctaggccactgtagtcagatccaagctgtatctttccgttgactttcttccctgtctgtattgcccccaagatatgcttggttaatttctgatctttctgtgatatagatactagaattcatcaatatattggattaccaaattatgtgggctgtcttcaagagtctccatatatctatgggaggttgatggtgagcactattcatctcccaactgtctacctctcatcatgaatagttttgaattaacatatctccttcagtggtggagctcaaagcctatttgctaatccaagataaaaaagatctttgcataaggtctcacctttgctagaatatttattatgtgaccatcatcatcatcatttaggattgataccttattcagccctctcctgaaatcaactgtaagtttccaaatgccatttgtttttgtactggcatttagttttgtactggcaataagatcactgctgaaatatgataacttacccctttctactaagattgtcgtggtatttcatctactgtttcctaatgtatgttagctacactgtttacagttaggtagatggtttcccttgccttcatgagaaatgattgcaattgggtctgagatctgggtgctgtatctatgtaggtatatccttttctcctttcatatatgtctatcctggtttctaagatctcaagctttctccctttcctagttttgtttattgagacacggtctcattctgtccctgagactggagtgcagttttgcaattatggctcactgcagccttgacttccctggcttaggggattctcccacctcagcctcccgagtagctgggactacaggtgtgcactgccacgacgggctaattttttgtattttttgtagaggcagggtttcgccatgctgcccaggtgggtctcgaactcctgggttcaaacgatcctcccgccttggtcctccaaaagtgatgggattacgggtgtgaggcgccgcacccggcctcttttcctaattctttcctagcttgcttgccaccacttccaaagcaataactatctcccgggcaagagtttttagttcatttaaagtaccctgtaatctaacctatcctatcctgtagtctaacctatcctataatgtaacctaacctaaccaagggcctttatttccaggccgacccaattctcaaagccacgacattctggatatagttattatttaatgccctacagcattctggatatggttattatttaatgcctttttgacctttgatcttttttctttcattaacttttactcttcacctcagtccaagaataagctactgtgtccatgtagtgaaggtcttaatctctttttatgagtgaactctaccttccttcagtgattgcacccacactctgaggtctctgaagtccacagccataattagactcttggctgatatttattgaagattcctgatcaggaaagcaactgcaaggtgtgtcttgtcttttgattaggacttgcaaatcactaagggttatttttttttaactctatcttttctccacaaattcttatattagcgtttatgcagtgtccaaatcagagtcaacatgagaacatatggtagggaagggactcagaaaactttacaggaggccatgacac

SEQ ID NO: 94319 - DNA, 15144 bp, Homo sapiens
gagaaataggaatgcttctacactgttggtgggagtgtaaattagttcaaccattgtggaagacagtgtggcgattcctcaaggatctagaaccagaaatatcatttgacccagcaatcccattactgggtatatacgcaaaggattataaatcattctgctataaagacacatgcacatgtatgtttattggaccactatttacaatagcaaagaattggaaccaacccaaatgcccatcaacgatagactggataaagaaaatgtggcatatatacaccatggaatactatggagccataaaaaagaatgagttcatgtcctttgcagggatatggatgaagctggaaaccatcattctcagcaaactaacacaggaacagaaaaccaaacaccgcatgttctcactcataagtgagagttgaacaatgttaacacatggacacagggagggaaacatcacacactggggcctgttgaggggtggagggccaagtgagggagagcataagtacaagtacctaatgcatgtgggtcttgaaacttagatgatgggttgatacatgcagcaaaccaccatggcacatgtatacctatgtaacaaacctgcacattctgcacatgtatcccagaacgttttttaaaaaagatcaaaatattttaaaaaagagtgctttctccaattgaatgtgtgctggcccccagcaggggagaaactgctgtgtccgcaagagtggatggagtaggttaagagatgaccgactctttgcatccattcctggctactggtgctactcccttcagaaattggtgccgtgcctgtgtattctttatcccaagaaagaattctgtggcaggttgcactcccccctccgttagaggtggcccacgctgagggtgagatctctaggagtcctatataactccctggtgacccaccagtctcccgtgtttgccaaaatcagagtgggttgtggggtatgtttgcagggaaactggtggtgtggggactcaaggcagagattccttgggcagggcagtggcgcaccacagctacaactggtatgacacccactgtctcagtttgtgtctgagcggcatgcaatcatgcctgcatgagatgacctttcagttctctgcccctaggaagctctcaaatcacaaccaacagtattgcccagggccataagggcagaggggctctccaatggtttggcagtcagcagactgttacaggggtgggggaagcagagaaacactcctacctacactttctgcagggatctgagttccttgggggtcaaactttgtctgattcttgctgctttctgtttctgcactccagcttcttcctctaggagtttttgacaggtcctggctctcttcccacagttttctatttggaacatgcactcaccagtaactttgatctttctgaggagaactggcatccaatgtccctagtcattcattttgggaaaaaagacaagacctgttgaattacatctatttgaggatctctgagcttcctgtatctgcatgtctaaatctctttttagacttcggatgttttcagctattattttattaaataggttttctatcccttttattttctttctgttttctgggacactaaaaatccaaaatatttggttgctgtatggtgtcccatatttcacatgggcttttctcattctttttattcttttttcttcatttttgtctgactggtttatttcaaaagcgcagtcttcaagttctgaaattctttcttttgcttgatttagcctattatttatgctttcaaatgtattttgtatttcattccataaattcttctagaatttatttgctgctttttaaagtgatatctgtctggtaaatttctcatttatatcctaagttgtttttctgatttttttgtatagttcctcggagttctcgtgtgtcttactgagcttcttaaaaatctgtattttccattatttattcagcattttgttaatttctttctgattggatctgttgctggtgaattattatattcctttggaagtgtcattttcccttgcttttccatgtttcttgtgctaattcactgatgtctgtgcatctggtgtaacagttgcttcttccaatttttgaatttgcttttgtagggaagaactttttcctgaagatgtatttatgatattggttgggtagtgctttgattctgtgtatgtgcagtattgcagtctccatatgatttttttggctgtaagcagtgtcagtggtgcctgtgattttctcagtggcatagggtgcagctgctagtacaggctgtgacattttcgtggtcacaggtatatcaggttggccagtgctcaggctttattggtgaaaacatcaggctgagcatgcctgtcactgggcctctgggtggcataagctggcattggcattagttggtccaggtgggctgattcctggggctccaggtagcttgctcacatgttggcagtggcagaagtgggctgggtgagtggccatatcctcaggcctcttggcagtgggcgtggcatggtgatggcagtagcagtggcaggataatcctctgccttgcaattggtcctcactagtgttggcagtgactacaatgggctgggtgggctagtacccaggcctgcatgtggcatgtgtgagtggatgcctgctgtggtagtagcatcaggttgggtgggctcattcccaggaccctgggaagagtgctctggtgttaatggtggtttatggggcagggcaattcccagaccacctgatggcatgttcagcactagtaggtggaatcaggctgagtaggcctgtcctcgggtcccttttttttgttggcaattttttgattaccatttcaattttgctgcttgttcagagattctgttcagagattctgtatcttgctagtttaatctaggagggttgtatatttccaggaattcatccatcttttctaggttttctagtttatgctcataaaggtgttcatagtagccttaaatgatcttttttatttctgtggtatcagttgtaatctcctgttttatttctaattgagcttatttggatcttctctcttcttttcttggttatctcactaatgatctgtcaattttatttatctttacaaagaacaagccttttgtttcatttatcttttgtaatttttgtttgtttcaatttcatttagttcttctccgatttttcttatatcctttcttctgctaagtttgggtttggattgttctttctccagttccgtgaggtgtgaccttggattgtctatttgtgctctttcagactttttgatgtaggtatttagtgctatgaactttcctcttagcacagcttttgctgtatcccagaggttttgataggttgtgtcacaattatcgtattgtacagttcaaagaattgcaaaaatatagaaccagcccaaatgcccatcaatcaatgagtggataaagaaaatgtgatatatatatatcccatagaatattacttagccatacaaaggaatgaaatagtggcattcacagcaacctgggtggaattggaaactattattctaagtgacgtaactcgggaatggaaagccaaacattgtacgttctcactcataattgggatctaagctatgaggatgcaaaggcataagaatgatacactggactttggggacttgggggaatgggtgggtggtggcaaggaataaaagactacatgttgggaacagggtgcactgctcaggtgatgggtgcaccaaaatctcagaaatcatgactaagtaacttattcatgtaaccaaacaccactcgttcccccaaaacctattgaaattaaaaaaaaaacaaaacacatgcacacgaatgttcattgcagcactattcagaatagcaaagacatggagtcaacctaaatgctcatcaatgacagattgtccaaagaaaatgtgatacatatacaccacggaatactatgcagccataaaaaagaatgagactctgttatttgcaggaacatggatggagctgcaggccactattcttagcatatttacccaggaacagaaaaccaaatattgcatgttctcacttataaatgggtgctaaatgatgagaactcatggacacaaagaggggagcaacaaacactgggacctaccagagggaggagggtgggaggaagaagatcagaaaacataacaattggactaggcttagtacctgggtgactaaaaaatctgtacaacaaatttctgtgtcatgagtttacctatataacaaacctacatgtgtacccctgaacataaataaaagattttaaaaatttaactgattatatgtttaatgtttatttttgggctattctatttcatttgtttatgtctgtccttatgctggtaccacgctattttgattacttcaggtttgttgtaagttttgaaatcaggaaatttgaatcatccaacattgttctttttcaaaattattttgagtactctgagccccttgaaattccatatatattttagaatagacttttttatttataccaaaaacatcattgggatcctgatcgggattgctttaaatctatagatcacttttgtgaagtattatccattttaataattgtaagttttctaattcatgaacatagaatgtcttctcattacttatgcctccttcaatttctttcagcaatgttttgtattttgcaatgtacaagtcttttgcctcactggttaaatttattcctaagtactttactcttcttgatagtattgtaaattgaattgttttattagttccctttttagatatttacttcatagcatataggaatgtagctgatatttttgtgtttattttgtattcagcaactttgttgaatttgtatattacctctgtgtatgtgtttgtctccctctctctccctctgtataatatttggagtttgctacacataaggtcatgccatacgtgaacagaggtaattttactttttttctgtttttttttctttcttgcctaattcctctgattagaacttctaatactatgttgaataaaaatggcaaatgtaggcatctttgccttgttcttcataataagacatcctgtgatttttaacatgcattatgttgtatgttttggcagcattgttgtttttcttgcaaataatttaatagtttaactcaaagcttctaggatgctttcatgttgttaggtgaatcattccatgactgccgaataaggaattttccaagtgaatctcagaaatttgtgttttaataagtgcttcaggtgattctgttgcatactcaagtttgagaaccattgtccaaggggcaaaagctgccattgccaattgctcttttttatctgagagggggcaggatcctcctggtccactgcttgtggatgcaacttattaaatgaaataaggccatgagtactctagggcccaatctctgctttttgttttgttcactcctgtttaaaatttcactcagggctctctttggaagaattgcacttacctttgccatccggggctgaggtttcattttctttggttattccccaggccagtaccatttgctttttactttccagaagttctgtaaagattgttgatggtaccctttcttagcttttttttttttttttggtcttgatatagtcctattcttctaaaaaatcttttcatttgtctccgtcagactttgatggagaggaggggagatattgtttacatttgttaaaaatggcttttaagttaaattctaactaagggtctattaggaaataaaattgccttctgactccttttgatttattttgcagaattgcatatatccaaagctctgggtaattattaaacattagaagtatagaacaaacaggccagccaggcccggcgaggccgcggcgggtccggcgccccggacctccggacccggaggtccggcgccctggttggcgccctgcccccaaagtccgtcctccccgttaggtggcgcccaaggggaggggacagccgggcaggcaggaagctgcggcttaaaagggcaacccgcgccggacccttccttcctagtcgcggggagtctgagaaagcgcacctgttccgcgaccgtcacgcacccctcctccgcctgccgcgatgtaccgctacctggccaaagcgctgctgccgtcccgggccgggcccgctgccctgggctccgcggccaaccactcggccgcgttgctgggccggggccgcggacagcccgccgccgcctcgcagccggggctcgcattggccgcccggcgccactacagcgagttggtggccgaccgcgaggacgaccccaacttcttcaagatggtggagggcttcttcgatcgcggcgccagcatcgtggaggacaagttggtgaaggacctgaggacccaggaaagcgaggagcagaagcggaaccgggtgcgcggcatcctgcggatcatcaagccctgcaaccatgtgctgagtctctccttccccatccggcgcgacgacggctcctgggaggtcatcgaaggctaccgggcccagcacagccagcaccgcacgccctgcaagggaggtatccgttacagcactgatgtgagtgtagatgaagtaaaagctttggcttctctgatgacatacaagtgtgcagtggttgatgtgccgtttgggggtgctaaagctggtgttaagatcaatcccaagaactataccgaaaatgaattggaaaagatcacaaggaggttcaccatggagctagcaaagaagggctttattggtcctggcgttgatgtgcctgctccagacatgaacacaggtgagcgggagatgtcctggattgctgatacctatgccagcaccatagggcactatgatattaatgcacacgcctgtgttactggtaaacccatcagccaagggggaatccatggacgcatctctgctactggcygtggtgtcttccatgggattgaaaacttcatcaatgaagcttcttacatgagcattttaggaatgacaccagggtttagagataaaacatttgttgttcagggatttggtaatgtgggcctacactctatgaratatttacatcrttttggtgctaaatgtattgctgttggtgagtctgatgggagtatatggaatccagatggtattgacccaaaggaactggmagacttcaaattgcaacatgggtccattctgggcttccccaaggcaaagccctatgaaggaagcatcttggaggtcgactgtgacatactgatcccagctgccactgagaagcagttgaccaaatccaacgcacccagagtcaaagccaagatcattgctgaaggtgccaatgggccaacaactccagaagctgrtaagatcttcctggagagaaacattttggttattccagatctctacttgaatgctggaggagtgacagtatcttactttgagtggctgaagaatctaaatcatgtcagctatggccgtttgaccttcaaatatgaaagggattctamctaccacktgctcctgtctgttcaakagagtttagaaagaaaatttggaaagcatggtggaactattcccattgtacccacggcagagttmcragacagtatakygvdtrcayctgagraagacattgtgyactctgccttggcatacacaatggagcgttctgccaggcaaattatgcacacagccatgaagtataacctgggattggacctgagaacagctgcctatgtcaatgccattgaaaaagtcttcaaagtgtacagtgaagctggtgtgaccttcacatagatggatcatggctgacttcctcactaacctcttcacgtgtaacttctgcagacctaccacaagtttacatgtaaccacagaaatccctttctctcctgactcattactaatggataccattctcaacaagtcaatccaaatcagcccgttaaggagaaagaaattaatatacaagctgagtgtgaaagtagaaatcacctacaccagagagctattttggtattttgcctttaaataaaaagcctcctccatatggctgtgcagccttgctctgtggcttttcccagcacaatcagtgctagtgctggggaagggacagtcaagagcagtcagttgcttacttattttgctctggatgagtctgggacacgctgtaactttaacacatttaagaagaaggtgtgtggccttttcagaaggtggcatggtcctcaagtgagttcttagtattttatatcagcaaaataactcaattttgcagattgcaaacaaatataaaagctgtttctgtttatgaattttattcttttagaatagaataagtacatgctgctgtaataaaattgcctttaatcacttaacaagcctaaccttgactcagtgaatgcctataaaaataataaatgaaaaaaaacagtatttttatatcataaaagtttcatttgtagcttatcattcacgtattgttgtccagcaaacattaaaagccctgtggataattacgttatcttcatacctgcaaaacggtggaggctattttcgttaaaactgtcagaattcgctgttataattatgacacatagtccaaagaatgcagtaacctttttatcatgttaactaattgttctcttttgaagatctatggttgactaattaaacaataattcaagtagagtgtcccagaaaaaaaccacttgggctccctgattggagtctggctggctctgagcattgccaatggcccctactcacctgactttgtatcctcttcttttagaggctttgcattctgcacccagcttcactaacagtgggctgaaaccaaccttgggttgagtgtttcatttgggagttatttggccagggccttttgaacaatagtgtccccatgaagtgctagataatatatgtgtaagaatcagcttttttttttttaactataatatccttcagaaatttctaactactttgtaactgcatggcttaacctggtgataaaagcagttattaaaagtctacatttttttttaaaaaaagaatagaacaaataatgggagcattgggttgacctttgcaaattatctagttttatttacctattttacacaggagaagactgagagaagggaggagtagcttgctgtagttcagacagcaacttatttcaaagctggtgctaaaacctagagtgaactggtacttctccatttctgaaggaaatgcagaagaaacagaagcagaaagacaacattttggcctggacatatttaacttaaagatgactccatttttgaactttatttcttggaatagagtatcttctaaatttaaactgatccaactttcacaaaattgggcagttagaagtcacagagggaattagcagctgttgttataagaaaaagcaaagggattgttgccagacttcataaatcttggcatatttgagaaaaatgtcccaatttgttacatatgctcattcatgtgtgtaaacctttggttatagtgctttgtcaatataaatatgttttacattataaattggtctgagtgctggatttcatgtttattatcccttagaaccccactttcttttgctcttcttctcgggctttctttgctttatttctcccactcttttcttcttttttttagtgtacaagcagtgaagggtgcagatcatggatagagctttcaagaagtttgttctagttcttctcctgaaactggacctccctcctagcttggtaacaactaccttatggtctccaccttggacagaggttttttgtttgtttgtttgtttgtttttgtttttttttttgagacgtagtcttgccctgtcacctaggctggagtgcaatggcgccatctcagctcactgcaacctctgcctcccgggttcaagcgattctcctgcctcagcctcctgagtagctgggattacaggcgcacgccaccatgccggctaatttttgtatttttagtagagacagggtttcaccatgttgggcaggctggtctcgaactcctgacctcatgatccacctgcctcggcctcccaaagtgctgggattacaggcgtgagccaccatgcctggctggccagagttttaagagcaaatcatataaactattcttcagtgtaatagaaaagtaaatggtattttttttttttttaaaaagggaaaccaaaaaaaagcagtttgaagcccaaagtgaggaagtaacacagcaattctcaaagctggctaggtagggacttttttcatatagaaataatcagtaaacaggctgggcgcggtggctcatgcctgtaatcccagcactttgggaggctgaggtgggtggatccctaggtcaggagttcaagatcaatctggtcaagatggtgaaaccccgtctgtactaaaaatacaaaaaaaaaacaaaaaaaaactagctgggcatggtgggggcgcctgtaatcccagctactcaggaggctgaggcagagaattgcttaaacccaggaggcggaactccatctcaaaaaaaaaaaaatcagtaaacagaagtatatgtcctgaaaaagtagtgtacaagcataaagacatcattagttaaacactggtttattcactcaggttttagcacaatcaacttctctgagaaattgggagatttcaatgagagatttcagtaaggaccgtgtttgctctgtaaatggactcatctccgagttgcttgctctgtgtcacagtcataccccataaagagtgagtcaacaggcatgctgaagcagcaacagaccaatgagaaaagggaagaaatctgggatttaaggggcatggaaagatcctgaaatattttttctattggtctttcctagcataagaaacatcaattgttaatcattcctttggtctaggcagtacttttaaaacttatttttaaccagataaatggtttgatttgtcaaatgaaatcttgtatggaaacccaatgtagaaaacagatgaaaacagagcttctctggctgaagcatctccacaaatcacaatttggaaaacattcagctaaggcattgatgactcctttgaaatgcatactacctgggaagtagaacatactaagaacacttttgggaaaattaagtaagtcacatgttaaaatactgtattagcttctgggaactgtactttaagcaggacatagaaaacctgagactcatccagagtaggatttccaggtttcagtgtttcgtagagcaagtgaaatttgaagtcagaagactttaattcaagttttgcccctgctgtttagcacttatgtgaccttagacaattagtctctgtgagacgcagcttccttatctgtacaatgggggtaataatatcaatatctaacaggattttgaggattgaaaataaataattaactttatcaaatgtaaagtgctgtataatttttaatttactgatgagtctggaaaacatgtgagatgagccaaaaagtgaaggaaccagatatattttaaggaataaagatttctggacacatgtgataattatctttgaaaattttaaggtctgatatgtggaaaaattaagtttgctttgtttgttcctgatggcactgtgaccaatgtgtggatgtgtcatgagggagcatattggctcaacataagaaaggattttataatttcaaataaaagggagcaccacgagttatagaaaaccttgtcgttgtaattttagagagattgctgggagtctacctatttgggttgcagaataaagcatttctgcattgaacaagatgtagtgacttcaaaagcctgagattattaatcctcttttccttctccttttattatatatcttacaattttttgactgctcagtatctatcccttcttcttctgataacagcagaacagcccccggggagaatttgtgaaccagttacaatcagtcatagcatcacattctcatggcctcagtgactaattggtttagtgatagatatatgacccaagccaggccaaaatagctagaatctcaatttttggacttttcttgatctactgggcataaaagtgtgctgtttctggtaggaatgctgatgacaggtagtaacttgcagctgcttgtagccatcttggcaatcccaggggagatctgcctgagaatagagacaatgtgaagctaagcaatgatcagagatacagactgagatcaagccctcatgacataatttgaacccatagctctaatcattcctaaaataaaatttagacttcaccttttacgtgaaccaataaagttgcattttgaggaagttttttgtcacttgcaacttaaggaatctcaatggccacattagccctcacctccaactttgtgtctgacacagtcgtctctgcaaagcaacaggaggaaagaaggctgtggtcacatgtgtaaagacagtcctaggtttggagaggatgtgaagggcagagaattcttgtcccccacgtaacaggaagatgaaaagtccccaaggctattctcatatattctgtctaggggagacagtacattttttgagttgcccactttctgcttgcagagcttttggcgggacagggagccctgctcaaattgttaattagcaaattaaagaaaggctgcagttgcaaaacttgtactagttctttgtgttgctcattgtataaagaaagtaattttgtttatataaataccttgatgggtcttttttgttgttgctcatgaaaagggttaggttctcaggacaagatctggaatgagagatttgacagaaaagggcaaaaccacccttttatatataacaactttgtgccagaggtactctgtgcaagaaagaagagagtctgtgtatcccagtagtgttacactgtgctcagagaccaactgaagccccagccctaaggcatagggatatgagatgctaggaggaggaataataatagttgagtagagtaatgcgaatctgcacacaaatcttcaccctaggatagcctggaaatactgaagagtgtttaccatcccagaggatttgtatttaaggcaaaaggtgacaccagaaggctcaaaagctttgatacagacatttgtgtagcacttatttttgtctatcttgtcccaagccctttcatgactctgtcctatctatgtaattctatcccagctattaaaaaaaaatagctactagtgatgaccctttctctgaaattagtccagactacttcttgctttttcaccttaaacttactcttaactttcctggttttctacccccttggtagctcagtgtcttgttcctgacatttacttattttggataagttatttcatggttaccttagctccatttttttggaaaagatatgttctattcacttctggtttcataactgtataggaagaaatatgtattttttttctgtcctggccttgtgataacaccagacaaggcttgttcccctacctcagtattccttttaagaaacgaagactggaaaacattttttttctccagacagttcatttgttccatatgttccaagaaaagaataaatatttctttgtgagaccttaagccttagggtaggacctgcgccttgatttctgtttttctgcagttgctacactgactatgcttttcccagacttgagaaatactttagatgatagtaaggctgtatatggtaactagtggtgaatacatagtggatgtctaagatatataattgatgttgatgaatgattgcaggtactctgctgaaggttatagatttatgttgttaattatgtaaaatgtatgtcacagaatattgttttctgcctttaatatatacagtgaagaaatgaaatgttttagatgtgaattctcaatatcattcttttgttgtctagatccctttgggaccctgttttgttccctgggaggctgagctttattggctacatcaatggactctcttttcttcagacttttgattggtttagtcaatggtaggtactgacaggaagttgggagaaaagagagattgaggcatttatgctagactccctttctgatgtggtttggaattgcctttgttcctccactgaaggcctcagctcctctttggtagctctcctctaatgttctctacaggttctggttattcctctctcccttgtcccttcaggtaagggaggtggtaaaggctcccggtctccatgtttcaccttcccttattggctttccttacttttccctaaagcattatacagagtccctttttaatattaaattttccttttgaatgtgccatctgtttcccggggtgggattctgactaattcattatgaaaaaaaaggtactccattattggaatgtgtttgaatatttggaaaataattcctaaaaaaggtattagtatgttgtttcttcaggaacatttgttaagtgaatgaaacttccacattggtattcaactatccatttactttatttatttattttggtttaaatttatatatatgtatatatatatcaatttatatatattttattaggtggcataagtacaggtttcttacatgcatatattgtgtgaagtcatggcttttactgtacgcatcacctgaatagtgatcattacatttaactctgggctttcctaaactcactgtctgtgggctcctaagaactgtggagtctgcttgggtagtatatacaactgagattcactgctgtagagcttaggtgagttaatggccagcgaactcagtggtttgctcacctcgggtctaacaaagccatgactaatgtttttatctttttggggaccagttaggtaattttgtcttcaaaagtcccacagatagtacttgcaaccttggtcatgaatgaatattcttgagggccagtcatgacaacatgactggctcagatcaagcaataaaatgcctcagtctaccaatcttgggtcagtagtgtcctttttgactaggaagagcagtgatattgtttacaaaaga

SEQ ID NO: 94320 - DNA, 19592 bp, Homo sapiens
tggcaggcggtgaggtcagggaaggcccggagggcctcatgggccatggagaggactttggctttttctctgagagagatgagagccacggcagggctctgagcagaggagggccctgggctgactcgggttgcagcaggatccctctggctgctgtgaggacagactgagaagagggatcgaggatgcagcagtgaggaggccgctgccatcatccaggccagtgatggtggtggtggcagtggatgtggagaggagagctcagattctggcatattctgaaggtggaactcacacaatttgctgaatttggatgtgggagtttggggagggcaaatcaagggtaattcccaggtttttgccctgaggaactggaaacgtggagttgacattgactgaacttgatgagactgggaggagcaggctgggaagatcgggagctgggctttgggcatgtgaagtttgaggccatctaaggactttatcctgggggctccaacaggttgtgggtattctcatcctgctgatggccctccaggaggggctgggggactttcaggagaattttatcccacatctcttcccctccagatgttttcaagaatgctctccgcctggggaccttctcggctgtgctggtcacctatgcagccagcgccctcctacatgtgagcagggtggagcaggatcagggtggaagctgggtgggggcgggtggcagggcctcttcctcactcatttcattgtcatctgcattcccccagggcttcagtttccacctggctgcggtcctgctgtccctggcttttatcacttacgtggagcatggtgagtgcagggcccagcccagccgttggatagaaggttggtgggggggctggagacagcctcccctgaggctaacctgacccccttacctctccccaccaccctagtcctccggaagcgcctggctcggatcctcagtgcctgtgtcttgtcaaagcggtgcccgccagactgttcrcaccagcatcgcttggtgagggttcagcctgggcaaccttgtgcccaacactccctgtcaaaaatgttccttctatctctatcttgtatgtgtctcagggtgcccaccttcttcttttggtgcctgagccatccccataacctctcctctattcgctggcatccgtttccctaacaggcatttatcgagcatctgctgtatacacacctggcattcgtttcccccagtgaacatccgttgagtgcctgttggtgctctaggtgctggagacacggtgaatgaaacagactgaagtcccagccctatgggacaaacattttaaccgggcagacagtagataaaaaatgagtcagtaaagtctaataatagtgtgtcagattgcaagtagtgctaaggagaaaatgtgtagggcaaaggggacgggaagtatgggggtgatttccatttgaaatagggaggtcagagaagcctccctggtgaggtgatgtttgaggcctttaaccgaaggaggtgagagagggaaacgttccaggcagagagacacccagtggaaaggccctgaggtaggagagggcctggaatctttgaggaatagcaaggcagccagggtggcttgagcagaggtagggtgaggaggggagatgggtgggaggcatgggccctctagatcatggtggggatttggttttgttgtgtgtttttcattctgtttgcaataagaagtacagacaacttcatacttgtctcccacccaactcccgttcattactataaagccctgactcaaagccctgccactcttcctcctctgcctggagactcgcacctcccccaacccaggatgccctcactgtgaacagtaccctcatcttggatgcctctgcataggaggctccctgaaccatctcttccctatctcagggggtaccctgggcatcctcagtcctggaacccactgtgccctgtgtgtcccctgggctcccccgtgcaggaggaggtgggacacagtgagtaggtccagttgccaagtatatccatctgtcccccacagggcctgggggtgcgagccttaaacttgctctttggagctctggccatcttccacctggcctacctgggctccctgtttgatgtcgatgtggatgacaccacagaggagcaggtgaggtggggccctgggctgtgtggttaacmaagggtggcgctatctggcggggggaaaccatgaggacaaaggctgggaagctgaggcctgagctcctcagactgtgctgcttcgcctgggcagccagtgctcctcggtcctttcccatagtccctctgcttgagtcacactgttaggtcttttatttgggtgaagtgtgcaaaatatgtttatttattttacttataaaataacttttaggctgggcatgctggctcacgcctacaatcccagcactttgggaggccaaggtgggcagatcacttgaggtcaggagttcaagaccagcctggccaacctggcgaaaccccgtctctaccaaaaatataaaaaattagccaggcgtgatagcatgcacctgtaattccagctactcgggaggctaaggcaggagaatcacttgaacccaggaggtrgaggtcacagtgagcccatgccactgcactccagcctgggcaacagagcgagactctctcaaaaaaaaaaatcactttatagagatggagtggaaaatccaggttttacttgtgttaattatttcacttcattattgtttaggtagaatttgcaagacttcttaattttttttttttttttgagacaaggtctgtcacccaggctaaagtgcagtggtgtgatcacggcccactgcagcctcacattcctgggctcaagccatccttctgcctcaacctcctgagtagctgggactacaggtgcatgacactaagcccggctaatgtttttttaattttttttgtagagacagggtctccctatgttgcccaggctggtcttgaactcctaggctcaagcaatccccttgcctcaacctcctaaagtgctaggataacaggcatgagcaccctgttttatttaatttaaatatatatatatatttttagacggagtcttgctcttgttgcccaggctggagtgcaatggtgcgatctcagctcactgcaacctccgcctcctgggttcaagcaattctcctgcctcagcctcctgagtagctgggattacaggcacgcaccaccatgctgggctaatttttgtacttttagtagagatgggatttcgtcatgttggccaggctggtcttgaactccaggcctcaggtgatccacccgcctcagcctcccaaagtgttgggattacaggcgtgagccaccacgcccggccaaaaaaatatatattttattttacttaggttgagtgtacaaaccctggattctgcactttaaaatttttcgttaaaatgtatgcactatttttgttcatgttgagtatgcaaataccagattttactcctttttaaattaagaacaatttaaaaataacatttattcatatggctcttgcagaatccaggtttttgcttctcttttagttaggtttcagtcaaaaacaaaactttgtgttttttgatattaaaaagtttttaattcaggttaagtgtgcaaaatctgggatttgcttttcttttttttttttgagacacggtctcactctgttacccaggctaaagtgcagtggcacaatcatagctcactgcagcctcaaactcccaggctcgagcagtccacccacctcagcctcccaagtagctgggactagagatgcatgccaccacacctggctttttgcttctttttaaataaagtttttgttttgttttcattaaaatattttaaaatagtgaatgcctatcatgtgcttcaaaaaccaaacagtattcaagatatttagagaaaagatttgctcccaccctctgccccctaccctcttacaggttacatggtgagacggggtttcaccatgttagccaggctggtctcaaactcctgacctcaggtaatccactcacctcagcctcccaaagtgctgagattgcaggcgtgagccaccgcactgagcccacttttatccttttattaaaatatctttccaaaatttaagcatatcaaacaaatataaaaatatattttaattctacccccttgccagtttttaccctaaagataacacatgaatgatactgttctgcaatttttgaaaatcttccacatcaggatatagtgtcctcattcattttttccactatgaggaagtgacacagtttattttttctcttatttgtggacatcaggtaatttctagtcctttcctattgcaagtgatgttgcagcaggaactctgtacccaagtggatccacacaggtgtggacagatctgtaggatctgttgatagtctcaatggagtagtacttttgtgctctcccaccagcaatgcctgaatgtgcctgctgccccaccagtacagagtgcctctcagacttcctggatatgtttgccacttcaataaagaggaagatggccgggcggggtggctcatgcctgtaatcccagcactttgggacgcccaggcaggcagatcacttgaggtcaggagttcgagaccagcctgaccaacatggtgaaaccccatctctactaaaagtacaaaaattagctgggcatggtggtgcagcatctgtaatcccagctactcaggaggctgaggcaggagaatctcttgaacctgggaggtagaggttgcagtgagctcagatcgtgccactgcactcaagcctgggtgacagaatgagagcctgtctcaaaaagaaaataaataaaatgaggaagattattaatgaggctgagcatcttttcatatgtttaagagccatttgtttttcctttactggaatgacctattcaccttctctggcaatttttctttccaaaaaattaatttttaggagctctttatatattagggagataacaggtcagagaatgggatcactttgtttttaaaatgatttttaaagaagaagacaaaaactatatctggtcacctttcatatgtacctaggcccttctgcggggcctcgcctagagcagtcacagaaatgtccttgggcaaaggatgggttttcctaagaacttctttgtccttgctaagtgggaccatcacctctttctctcccacagggctacggcatggcatacactgtccacaagtggtcagagctcagctgggccagtcactgggtcacttttggatgctggatcttctaccgtctcataggctgaggcacatctgtggaccctcataaccctcttaagacccctctcagggtgccactgatgggggatgagggaaggccctctctctactccttgaccccctccatccttgacccccaacacctcaacacacacacacacacacacacacaaaatcacaccattttcatgcctgtcaatccccaccccaccacaaggcaggaagggggtggtgcctgctggggcctagagggggatgcttggggaaacagagaaggggagatccagggcctccccgccttccttcttcctttttatatacaatttgttattgtcaaataaaagtaggaaatattcaataggcttcttcttcactgctcagaggggaataggaatgagtgaggaagggagcacagcatggataaaggtttggaagctggaaaccatgaagagagagcagactgtgattggttcatggttagtttatgattgattagatgatgagcctgaagatggcaggatcctggtcctgcttggtttgatcagggcagggacagattgcatagttggatgtgggggaggcctgattggctggaaaactgaaggatccccattctgattggttgctctgagtgggacacagaggagagaaagcaagagagatgaagggttggtgcctatttatccttaggactgagggttgtgggttctaattggatgggaggtctgggatgggtctggattctgattgattgctccatctgggggcccactggtggttaggcgtttgattggctttttagaactggcatatggagattgagggtcttcatgccaattggtcagtaggactgagaggcctgggttctaactagttcttctgacttgaggtcgggagaagagagaatgaccgctgctattaggactgaggagttctgagcactgaagagctggggagggggtggttgcagtgtatagcgtgtgatctgcttgtaacagtttcgttgcattatactaagggttactctacctagaaaagggcggaggtgaaaggatgcaacgcaacgctaatttcaccagcggaagaagcgggtacagaccttaatgagtccccgttttgatcgactgataagggaatggggaaattgaagccaggactcgatgcagattggctacggatccaaaacgcccactaaccttggcgcgtcccagtctccaccccaaacctaactcaggtgaaaatggcgccacgcgcgggggcggggctagaggtacaaagagagtgtctattggttgggagcggcacgggccgccttcttcgcttcaccattggctcgctccgtaaggcaagagaacccactaggggatgagcccgaactagggatgtgacagagcgcgagacccagcctaaagagagcccggagccagcgtgggaggccgctgccgtcgcgcgccttggtgagtgccctccacccggcccctgctccctcccccagctctccccggctacgcggccagccctcggcgtgccagcgcgagaccctttgccacccgccccccccaccgcccttttgcgcctgcgcgagacccccagctaccgcacggttgtccagaggacagaagatccgtcttctcattgggcagcgggactggagggttctggttcggattgaccggctttgtgttccgttctagcgctgcacgccagacaccggcctttcaatatccgtctcttccctgcaggttgacggcgttgcacgctctcgcggggaggctctggctttccaaacgctggcaccgagggttgtagttctgattcgttttctttcctctgtcccccagttgcagttttcaggactacgtgggggagggaatagctttttgttgaacggtttaagacgctgacctgtgcaactggaccacgcctggttcctgtgtctcttaccaaaccgtgaccccggagcacaggactgggtttggtggtcgtgagcagtttgtgacccttgaaggaagacaccaggcctggtcctgtatctccctcgccagactgtgaccagggagggctgggatcaggtgttgttcccatgtgcctcccaccagactttgacccccgagggctgagaccgggactgtttctaccacatcataatatggcttctaaagggctggaacaagctttcagcctttctgtggccttgtgtttcagtcatgttctttttcttttcttttttattttattttgagacagagtctcgctctgttgcccaggctggagtgcagtggcatgaccccggctcactgcagcctctgcctcccaggttcaagcgattctcctgcctcagcctcctgagtagctgtaactacaggcgcacgccaccacacctggctaatttttgtatttttagtagagacggggttttgccatgttggccgggctggtcttgaactcctgagctcaagtggtccactcgtcttggcctcccaaagtgctgggattacaggcgtgagccaccgcgcccggccttcttttttagaggcagagtctcagactggagggcagtgatgtggtcactgctcacttcagccttgaagtcctgggctcaaagcgatcctcctgcctcagcctacctactagctgggactacaggcctttgtcaccacacctgactgattttcttatttttttagagacagtttcgctgtgttgcccaggccggacttgaattcctggcctcaggtgctgctcctgcatcagcctcccaaagcactggaattacctgccacggtgcctggcctttagtcatggtcttaaaacagaatgtaggccgggcgcagtggctcacgcctgtaatcccagcactttgggaggctgaggcgggcggatcgtgaggtcaggagatcaagaccatcctggctaacacggtgaaaccccgtctctactaaaaatacaaaaaattagctgggcgtggtggcaggcacctgtagtcccagctactcgggaggctgaggcaggagaatcgtttgaacccggaaggcagaggttgcagtgagccgaggtcgcaccactccactccagcctgggtgacagagcaagactccgtctgaaaaaaaaaaaaaaaaacggaatgtaattagaagtgttacaatcctgtctgttaactggtaaattcggtccatttacatttctcatgataataaactatttgaatttgattttattatctcattctgtactttctatttgtccaggtttttctgttccttttttttttttttttttaacttcctgcctatacacacgcagccatcagcccacaaagacatgrctaccaacgckggccccttgcacccatastggcctcagcacctaagacyggacaactttgtacctaatgaccgccccacctgrcatatactggctggcctcttctctgtcacaggggtcttagtcgtgaccacatgrctgttgtcwggtcgtgctgcggttgtcccattggggacttggcggygactgtccctgtgctrgtttgcagtgtgtgggttcattcacctggtgatcragggctgsttcgttctctactacgaagacctgcttggagaccaagccttcttatctcaactctgtgagtcctgatttctttcatatgctgtgggatgggatttgctgggcagggatcggcttgcatgtttacctatccacctattcttcttccattgatttattttaaatttttatttaatcttttaaaaaatttattataggccgggcacagtggctcacgcttgtaatcccagcactttgggaggccgaggcaggtggatcacttgaggtcaggaatttgagaccagcctggtcaacatggcaaaaccccatctctactaaaaatacaaaaattagccaggcgcggtggctcaagcctgtaatcccagcactttgggaggccgaggcaggcagatcacgaggtcgggagttgaagaccagccaggccaagatgatgaaaccccatctctactaaaaatacaaaaattagccgggtgtggtggcacacgcctgtaatcccagctactagggaggctgaggcaggagaattgcttgaacctgggaggcggaggttgcagtgagccaagaccatgccattgcactccagcctgggcaacagagtgagactttgtctcaaaaaaaaaattattatgtattgttattattattctttttgttttttgcccttctctaaaactggtagataacttatttttgagacaaggtcttgctctgttgcccaggctggagtgcagtggtatgatgattgctcactgcaacctccaactcctgggttcaagcgatcgtcttgcctcagcctccccagtagctgggactatactataggtgcacacctttatgcctggctaatattttcacttttttgtagagacaaggtcttgctatgttgctcaggctgttctttaactcctgggctcaagcaatccttccacctcagcctcccaaaattctgggatgacaggtgcgcaccaccgtgcccagccttatttaacttttttgttgcatgtatattcacgtgggtcaaaaaaccatttaaagagatttgcagtgaaaatctgctttctatccactaagtttccccaaacgctgttaggcactgttgatagttgtttatgtttcttttcagtttatttacacacgtaagtctcaatttgctcaattgtaaaaggaggataatagtaataaccaactatatgtaagatacttagaacagtgtttggcaaacagtggttgccatgtaactgttcactattattatcattatttgcacttttccctttttacacaaatggtaatatgctatatatacttctaatcttttctctttttctttctttccttacaagaaaaccaaagaagccattttcttttttgagacggggtctcgctctgtcacccaggctagagtgcagwggcatgattatagctcactgcaaccttgaactcctgggcaatcaagcaatcctcctgcctcagcctccctagtagctgggattataggcatgtgccaccccaccaagttattttttttttaacaacttttttttttaagagatggcgtcttgctttgttgcccaggctgttctccaactcctggcttcaagtgatctgcccacctcagcctcccaaagtgctaggattacaagcatgagccaccgcacccagctgctttttttaatgaggtcactcctcatgatttcataaagagctttcaaagcatggacattgtacagttgcttgacttgtgtagtattgatgggcattttccctcaatcttctgccattataaacaaggccgggcagagtggctcatgcctgtaatcccagcactttgtgaggcgaaggcgggcagatcacctgaggtcaggagtttgagaccagtctggccaacatagtgaaaccccgtctctactaaaagtctaaaaattagctgggcgtggtggcaggtgcctgtaatcccagctactcaggaggctgaggcaggagaatctctgggacctgggaggcggaggttgtggtgagctgagattgcgccactgcacactccagcctgagcgataagagcaaggctccgtctcaaaaaaaaaaaaaaaaaaaaaaaacattacaggcatgagccattgtgcccggctggtcagatgtttcttaaattttagtcattccagtagatgtgagtgatatctcattatggttttaatttgcttttccttagtgactaatggaagtttgaacatctttcatatacttattggccatttagaaatcctctttgtgaagaacctattcaagtcttctgcctattttatattggatgatctttttctttctttcttttttttttttttttttgagacagggtcttaccctgttgtccaggctgagcactgtggtgctatcatagctcactgcagcctcaacctcctgggctcaagacatcctcccactgcagcctgggactgtaggcacgtgccaccacgtccagctaatttttgtatgttttatagagttgggggtctcactatattgttcagactggtcttgaactcctttatgcaagccatcatcccacctcagcctcccaaagtgttgggattacaggcatgagccatcgtgcccggcggtctttttctttctgattctctgctcactcttgtattcactcatctgttcacctacattctctctctctcattggctacttcactcactccatcatctacacctgcttccttttataccacacacacttcttgagtaccaatcacagccacactgttttgtgtcaggctttacacatattaccttgttttagagaaataaaccactagaatccaaacagttaccccatttcacggatgaggaagcagacgcatgggaaggttatgaagtctgtcttcttgcagggaccccmagctctcacaagtgtgtgttcctttcactgcctttattcttcatatctctctcttcttttcttcagggaaagagtatgccaagggagacagccgatacatcctgtaagtgtttgcctctgtcaatggagactggcattggttttcggggggtggtgagttggggagcactaatgggctaacctgtaggaagagcacaccgataccagtgtcccctcatgctttctcctgcaggggtgacaacttcacagtgtgcatggaaaccatcacagcttgcctgtrgggaccactcagsctgtgggtggtgatcgcctttctccgccagcatcccctccgcttcattctacagcttgtggtctctgtgggtaaggaaagggcactagaggggcactgggcactagaggggttgatgggggatccacagacacagatgtatccctgtgggtgggatctctcaacggtgcccttccaggggtaagtcagactgaatgacaaaccccctgaggctctggaaaggtcatgcccttctctgagcctgcactctcaggtggggagggttcatttttcttcctcctcctccttctccatcacaaagtctcctgtgaaggttacatgaggtggcccagggtggcaagaagcccctggaacctccaggatcagggctctgagatcccttcatgtaagattctgtcatattttttttaaaacagggtctggctctgtcacccaggccagagtgctatggtgtgatctcggctcactgcaacctccacctcccagactcaagcgatcttcctgcctcagtctcctgagtagctgggactacaggcatgtgccaccgtgcctggctaacttttgtatttttagtagagatggggtttcgccatgttgcccaggctggtctcaagctcctgagctcaaacagtcctcctggcttggcctcccgaagtactgggattacaggtgtgagccactgtgcccggcctcagtcatcttgtgttattaaattgttagctttctttagttctagcgatatgagttatctttagtcccagaatcctaagctgtcttggatttgaggattttgaacttccttaaatctgaaggtgtgagctctcctgagttctgaaattctcagctctctggtgtctggaatctcacttttctgatttctcagattttcagctctgtgatttcagaatacttagctctgagaccttgaatgatgacttggaaagtgctttggaatagagaattggcgaaagtgtccccttcctcactggggcttctccttcccctcctgccacccacaggccagatctatggggatgtgctctacttcctgacagagcaccgcracggattcyagcacggagagctgggccaccctctctacttctgrttttactttgtcttcatgaatgccctgtrgctggtgctgcctggagtccytgtgcttgatgctgtgaagcacctcactcatgcccagagcacgctggatgccaaggccacaaaagccaagagcaagaagaactgaggagtggtggaccaggctcgaacactggccgaggaggagctctctgcctgccagaagagtctagtcctgctcccacagtttggagggacaaagctaattgatctgtcacactcaggctcatgggcaggcacaagaaggggaataaaggggctgtgtgaaggcactgctgggagccattagaacmcagatacaagagaagccaggaggtctatgatggtgacgatttttaaaatcaggaaataaaagatcttgmctctaacactgagagatccttaattactaaccccagagatgcgctatgactgaccccacagatcccaccatcattcacttattccagacccccatcagcatctaaagacctcccacctctgacctcacaaacccctatcactgaccccccgccagaccccataactcactacacagaccctatcactggccccacagtcccctggtcttaactcgagctgccataacagaatgccacagactaggcttaaaccaccgaagttcattttctcacagttctggagtccaagatcaaggtgtcagcaggtttgacttctcctgaggcccctgtccgtagcttgcaggtggccaccttctcagtgtcctcacatggtctctatgaactagcgtccctgtccctggtgtctctctgtgtgtccaaatttcctttttttttttttttttttgagacagggcctcgctctgtgtcaggctggagtgcagtggtatgatcatggttcactgcagcctctacctccctggctccagcgatcctcctgcctcagcctcctaagtagctgggactacaggtgtgcactaccacacatggctatatttatttttttttatagcaatggactctcactatgttgcccaggctggtctcaaacacctgggctcaagtgatcctcccacctcaaccttccaagtaactgggacaacaggcacatgccattatacctaatttttgttttgttttttttttttgagacggagtttcactcttgttgcccaggctggagtgcaatggcacgatcttggctcaccacaacctctgcctcctgggttaaagcaattctcctgcctcagcctcccgggtaggtgggatcacaggcatgtgccaccatgctcagctaattttgtatttttagtagagacggggtttctccatgttggtcaagctggtcgcgaactcccgacctcaggtgatctacccgcctctgcctcccaaagtgccaggattacaggtgtgaaccaccatgtccggcaatattttttcaattttttgtagagatggggtctcactatgttgcccaagctgatctcaaactcctaggctcaagtggtcctcccacctcagcctcccaagtagctgagactacaggtgtgaactaccatgcctagcccaaatttccttttatgaggacaccatttgaccagcctgggcaacatggtgaaaccccatctctacaaaaaaaattttgaaaattagctgggcatcatgaggccacggtgggaggatcatctgagctagggaggtgtaggctgcagtgagccatgatcacggtgagagcctgtcttaaaaaaaaaaaggaggtggggggtgggcaccagtcaggcacagtggctcatgcctataatcccaggctgacacaagtggatcacctgaggtcaggagtttgagaccagcctggccaacatggtaaaactccatctctactaaaaatacaaaaattagccatgcatggtggcacatgcctgtaatcccagctacttgggaggctgaggcaggagaatcacttgaacctgggaagttgaggtggcagtgagccaacatcatggcactactgcactccagtctgggcaacagagtgagactctgtcccaaaaaaaaaagtggggggcaccatttgtattggattaggcccactctatgagtcccattttaacttaaccacccttttaaagtccctatctccaaatatagtcacattctgtggtattgggggttagggctttaacatatgaatttggggaggacacagttcagtctataacattctgctctctctggcctcccagaattcatgtccttgcatgcaaaataccttcacccccatcccagcagcccaaaactctcttttgtttttttggagacagggtcttgctctgtggcccaggctggagtgcaacggcacgatctcaggtcactgcaaccacagggtttcactatgttggcctggctggtcttgaactcctggcctcagatgatccacccacctcagcctcccaaagtgttgggattataggcataattcactgtgccataagccactctgaaagctcttaatcaagtctagcattaactttcagtcccaagtcttacctaaatatcatccaaatcaagtgtaaatgagactggaggtatgattcatcctgatgcaaaaattcttctctagctgtgaacccgtgaaaccagataaatcatctgcttccaaaattcagtggtaggacaagcataagctagatagatatttccattccaaaaaggagaaatcacaaagaagaaagggatcacagtccaggcgtggtgactcacgcatgtaatcccagcattttgggaggctgagatgggagggtcacttgagcccaggtatttgagaccaccctgggctacatggtgaaaccccgcctctacaaaaaactaaaaaattagccaggtatggtggtacatgcctatagtcccagctcctcaggaggctgaggtgggaggattgattaagcccaggaggtcgaggctgcagtgagccctcttctcaccagtgcaccccagactgggcgacagagcaagaccctgtctcaggagaaaaaacagggatcacaggttccgaataagtttgaaaccaaatagggcaaattctattagatttttaaggcttgagaataatcctgtttggctctatgttctgtcctctgggcccaccagattgggggccccactttcctggttcactggagaggcggtgtctctccctgagccctgggtggcagcctggcccactgaaacagaggaggcctctttgccctctggaactgaggaggagacagccccacctttgggatcattctccctttttcttgaagtataatgcatgttcacagccagaaagctctgttgtcgtgtcctgttgaatcccagaagtcctacagtcttctttcattttgtcccatctctgtcctctttagtcccagctggccgtgtttctgctggtattacccatctgtattcctggcttctgccaagatggctgattaggtcagtgagtcacacccatgatctctttgtggcatgattgtttagccacaccctttgtcttctcaccagaacacattctcagcttttgcagtgttggataggctgagaacttttttatcttcacattcgagttcccttctgcctgacaatttcttttgcaatttctctctttcctcttgcattctactagaagcagcaaggagaaaaaggccacataatatgctgcttagaaatctccttagctaaatctcccaagttcgcctctcacaagttctaccttccacaaaacactagaatacaattaaccaagttctttgccttccctccattttccaataacatattcctcatttccttctgaggcctcaccagaagcactttcaacatccatatttctaccagtagccttcaagataattgtcttagtcatttggactgctctgacaaaatactataaactgggtagcttataggcaactgaaatttatttctcacagttctggggtctgggaagtccaaaatcaaggtgttggcaaattcagtgtctagtgagggcctgcttcctcacagatggctccttccctctgtacccttatatggtgggagggtagaactccggtcccttcatcccttataagggaatgacctaatcacctcccaaaggccccacctcctaatatcattacactggggattaggtttcaacataggaattggaggttggggggacacaaatattaagatcatagcagcaacataggctttttctaacatgcacctcaaaactctttcagcctctacccattacccagttccaaagctacttccatgttttaggtatttattatggcagcaccccacttcccaggaccaaaatctgtgtcagttttctaaaactgccataacaaaatgccacatacctggtggcttaaacaacagaaatttatttcctcagagttctggaggcggaaaatccaagttcaaggtgtcaaccagtttagtgtcccctgaggcttgtagatggtcaccttctcgccatgtcctcacacagtcttccctctgcctgcgcatgtcggtgtcctaatctcttcttatagggacaccagccagagtggattgggacccgccttcaccaacttcattttaacttaatcacctcttgaaaggccctattttcaaatacagtcacattctgaagtattgggggttagggcttcagcatgaattttggggagataccattcagtcagtaataccgctctgtgctcaccccactcactccctaatacttagcctcacagatcttccatcattcaccccacaaacccccatcacatgccctgattactcagcccacagattcccctgcattgctgccacatggacccccccaacacccaccctatagacttcccatcacaaaccctaaagatcccccatcactcaccccacaggccctatcgtgaaccctacatattcacgtcattcacctcacagagccacattactcatccaacagactccacccctggatcattcagcttattggcccctaatcacttcactcactctacagactcactcatcactgactctacagagctctaatcactcatcccattgacaccccattactaaccccacaggtgcctcccactcatctcacaggccctccatctctcacaccacaaagccctctcaccttatgagctagcacatcagcacccctacagacccccagtcattcccccaccccacagatgcccccgtcaccccatagatcctcatcagccatctacagatcccccattcctcaaagtcctccttcactccccctacagacttgccccacagcccccatcattaatcccacagaatcctgccactcgccactcaataccccattcactccacaggctcctcatgaccctacagaccccgtcactaccccacagatccctattactcagtttattatcccctgatcataccttccagagaggccccatcgctaaccccacagaccctaatcctcccctgtgttagtcggctctggcttccgtaacaaaatgccacagaccaggtggcttaaacaacaaacagtttctcacacttcgggaggttggacagtccaagtgcaaggtgccatcagggttggtgtctggtggggtttctctccttggcttgcagatggctaccttcttgctgtgtcctcacgtggccctttctctgtgcactcatgcccagtgtccctcttcttataaggataccagttctactgaattagggccccacccttataatctcatttaaccttaattacctccttaaaggctctatttcagatatagtgacattatgttgaaatattgggggctggttcccctgatattagggcttcaacatatgaatttggggaggaggacatcattcagttcatgacactccccatcactcaccccacagatgccacagctctcacctcacagagcccccaacactcctaccacatatattccatcactcagcctcttggcttctgataagccaccccacagatcccccatcactcttcccacataccccatcaactcctaagatacccatcactctccctaccaacacacattcattcgtttcacagattgcccattattgaccccacagaaaccccgtaactcaccacacagacctcaaccccatcactcacccccacaggcccctatcacccccaaaatcttcactctgaagatcccataactcaccccagaagcccctcatcagtcaccctaacaacccctatcactgacaccacagacccaccactcatcctacagatgcccctttactaaccctataagcatcccataactcaccttgcagaagccatcactcaacccacagagtccatctctcatcccacagacccctt

SEQ ID NO: 94321 - DNA, 52707 bp, Homo sapiens
  misc_feature (1)...(52707): n = A,T,C or G
gcaatggtgtgatctcagctccccactgcaacctctgcctcccaagttcaagtgattctcctgcctcagcctcctgagtagctgggattacaggcacgtatcaccaggcccagctaatttttctattttttgtagaaacagggtttcaccatgttggccatgctggtgtcaaactcctgacttcaagtgatccacctgcctaggactcccaaagtactggtattacaggtgtgaggcaacgtgcctggcagagggcttttattcttgatggactgctccatagcctcggagacagtcggacttatttcttcaaccagagcagagcagacaggcaatttctgtatccaccaggccaaatattagaccaactcttcaatgtacagagagcataacatttcttatatgctagaatatctgttggtccaaaatataaataaatagtattgtagccagccacagtggctcacacctataattccagagctttgtgtgactgagacaggaggttcgcttgaggtcaagggttcgagaccagcctggacaacatagagagacacccccacaccgccacctgccatctctacaaaaattaaaataattagctgggcatagtagtgtgggcctgtagtcccaactacttgggaaactgatatgggtggattgcttgagcccaggaatttgaggctgcagtgggctatgactgcatcactgtactccagctagaccttgtctcaaaaaaaaaaaaaagtgctgcaattgacattatcatttgaaaagagggacagacaagaaaggtatttggcatttaccaagcaattacccagaatcctcatcccatcctacccccacccttcccctaaaaatgtatgtgtatgtttttataccataaaaaatacatctatttgcctctggaaccagattgcttgggttcaattacctgatctagcatttgctcctgatgattcagtgcagaaaagctctgtaattcagtttccccagctgtaaaatggggaatggcgcctttactgggctgccatgagggtaaaggagggaacgtatatttatgacgcattcagaacaattcatgatacatagtaagctctatatatttgagcttattattactgtcagtacgattatcatcatcttgctgtttccaatgggtacgatttctacattctctttcttaaagacctttaaatccttggtattctctccaccaccacagagagcagtgtccttgtagtttaaattttcaaagacttcatggatccaataagcacgacattaactaagggacagttttctttcagtggattggaatttaaaatggcttttttattgttattattggccaggctggtctcgaactcctgacttcaagtgatccccccacctcaccctcccaaaatgtgctgagattactggcatgagccaccatgcccagccctcattctcttcttttataaggacaccagtcattgcatctgccccctcaccagcagcccccaatccaggatgactcatcattacttgattacatctagaaagaccctatttccaaataaggtcacattcctgggtactgaggattaagatttccaattttttccctgactcgattttttttttgagtcagggcctcacccygtcacccaggctggagtacagttatgtgattatagcttactgcagcctcaaactcctgggctcaagggatcccctgacctcagccttccaagtggctgagactacaggtgcacatcatcatgcccaagtaatttttttgtttttttgtgtgtgttttttttttgtacaggttaggtctcactctgttgaccaggctggtctgacctcaagcgatcctcttgccttggcctcccaaagcactgggattacaggcgttatcccatgcctggccctctttctacacctcaataattgtatcattagcctgagctgcgcatattccttattctacccatccctgaccaacctcctcctttaacataacttccatctcgatatgatggggcctgctgggcactgcaaacagcctaaggaaagtggaaactttacttaaccttcaattctattacaaagtctacattgaacgtaattcatatttgaactataaaaattttttgtaagttgacacatgacctataaaggtctctacaccctgaagcaacgttttagtaagaaatcaattggtccttttctgcagaaaccattaaccatagaagagataaaggaaaaacttcaatgtactgattgaacttccatgcccatagcttaacttctaaaaggcaaccattccatactgttaaactgacttaggttgctattactgttattaaagagacctcaaagccagaagttgaatcttgactgtagctcttgcacgtacacgcacactcttgcaactgaaaccactcagattgtcctaatgctgcgccccataacaacaccacctggaattttacgtttgtttttaagcatcagtcgtaatcttcacttgcacccgaacacactgcacctgtgagagccacgtgacattaaaaaaatcccttcagtgaggccgggcatggtggctcacgcctgtaatcccagccctttgggaggccaaggcaggtggatcatgatgtcaagagattgagaccatcctggccaacatggtaacaccctgtctctactaaaaatacaaaaattagctgggcgtggtgacgcgtgcctgtagtcccagctactcgagaggctgaggcagaagaatcgcttgagtccgggaggcagatgttgccgtgagctgagatcgtgccgctgcactccagcctggcaacagagggagactctctgaaacaaaaaaatccccttcannnnnnnnnnnnnnnnnnnnnnnnnnnnnnnnnnnnnnnnnnnnnnnnnnnnnnnnnnnnnnnnnnnnnnnnnnnnnnnnnnnnnnnnnnnnnnnnnnnnnnnnnnnnnnnnnnnnnnnnnnnnnnnnnnnnnnnnnnnnnnnnnnnnnnnnnnnnnnnnnnnnnnnnnnnnnnnnnnnnnnnnnnnnnnnnnnnnnnnnnnnnnnnnnnnnnnnnnnnnnnnnnnnnnnnnnnnnnnnnnnnnnnnnnnnnnnnnnnnnnnnnnnnnnnnnnnnnnnnnnnnnnnnnnnnnnnnnnnnnnnnnnnnnnnnnnnnnnnnnnnnnnnnnnnnnnnnnnnnnnnnnnnnnnnnnnnnnnnnnnnnnnnnnnnnnnnnnnnnnnnnnnnnnnnnnnnnnnnnnnnnnnnnnnnnnnnnnnnnnnnnnnnnnnnnnnnnnnnnnnnnnnnnnnnnnnnnnnnnnnnnnnnnnnnnnnnnnnnnnnnnnnnnnnnnnnnnnnnnnnnnnnnnnnnnnnnnnnnnnnnnnnnnnnnnnnnnnnnnnnnnnnnnnnnnnnnnnnnnnnnnnnnnnnnnnnnnnnnnnnnnnnnnnnnnnnnnnnnnnnnnnnnnnnnnnnnnnnnnnnnnnnnnnnnnnnnnnnnnnnnnnnnnnnnnnnnnnnnnnnnnnnnnnnnnnnnnnnnnnnnnnnnnnnnnnnnnnnnnnnnnnnnnnnnnnnnnnnnnnnnnnnnnnnnnnnnnnnnnnnnnnnnnnnnnnnnnnnnnnnnnnnnnnnnnnnnnnnnnnnnnnnnnnnnnnnnnnnnnnnnnnnnnnnnnnnnnnnnnnnnnnnnnnnnnnnnnnnnnnnnnnnnnnnnnnnnnnnnnnnnnnnnnnnnnnnnnnnnnnnnnnnnnnnnnnnnnnnnnnnnnnnnnnnnnnnnnnnnnnnnnnnnnnnnnnnnnnnnnnnnnnnnnnnnnnnnnnnnnnnnnnnnnnnnnnnnnnnnnnnnnnnnnnnnnnnnnnnnnnnnnnnnnnnnnnnnnnnnnnnnnnnnnnnnnnnnnnnnnnnnnnnnnnnnnnnnnnnnnnnnnnnnnnnnnnnnnnnnnnnnnnnnnnnnnnnnnnnnnnnnnnnnnnnnnnnnnnnnnnnnnnnnnnnnnnnnnnnnnnnnnnnnnnnnnnnnnnnnnnnnnnnnnnnnnnnnnnnnnnnnnnnnnnnnnnnnnnnnnnnnnnnnnnnnnnnnnnnnnnnnnnnnnnnnnnnnnnnnnnnnnnnnnnnnnnnnnnnnnnnnnnnnnnnnnnnnnnnnnnnnnnnnnnnnnnnnnnnnnnnnnnnnnnnnnnnnnnnnnnnnnnnnnnnnnnnnnnnnnnnnnnnnnnnnnnnnnnnnnnnnnnnnnnnnnnnnnnnnnnnnnnnnnnnnnnnnnnnnnnnnnnnnnnnnnnnnnnnnnnnnnnnnnnnnnnnnnnnnnnnnnnnnnnnnnnnnnnnnnnnnnnnnnnnnnnnnnnnnnnnnnnnnnnnnnnnnnnnnnnnnnnnnnnnnnnnnnnnnnnnnnnnnnnnnnnnnnnnnnnnnnnnnnnnnnnnnnnnnnnnnnnnnnnnnnnnnnnnnnnnnnnnnnnnnnnnnnnnnnnnnnnnnnnnnnnnnnnnnnnnnnnnnnnnnnnnnnnnnnnnnnnnnnnnnnnnnnnnnnnnnnnnnnnnnnnnnnnnnnnnnnnnnnnnnnnnnnnnnnnnnnnnnnnnnnnnnnnnnnnnnnnnnnnnnnnnnnnnnnnnnnnnnnnnnnnnnnnnnnnnnnnnnnnnnnnnnnnnnnnnnnnnnnnnnnnnnnnnnnnnnnnnnnnnnnnnnnnnnnnnnnnnnnnnnnnnnnnnnnnnnnnnnnnnnnnnnnnnnnnnnnnnnnnnnnnnnnnnnnnnnnnnnnnnnnnnnnnnnnnnnnnnnnnnnnnnnnnnnnnnnnnnnnnnnnnnnnnnnnnnnnnnnnnnnnnnnnnnnnnnnnnnnnnnnnnnnnnnnnnnnnnnnnnnnnnnnnnnnnnnnnnnnnnnnnnnnnnnnnnnnnnnnnnnnnnnnnnnnnnnnnnnnnnnnnnnnnnnnnnnnnnnnnnnnnnnnnnnnnnnnnnnnnnnnnnnnnnnnnnnnnnnnnnnnnnnnnnnnnnnnnnnnnnnnnnnnnnnnnnnnnnnnnnnnnnnnnnnnnnnnnnnnnnnnnnnnnnnnnnnnnnnnnnnnnnnnnnnnnnnnnnnnnnnnnnnnnnnnnnnnnnnnnnnnnnnnnnnnnnnnnnnnnnnnnnnnnnnnnnnnnnnnnnnnnnnnnnnnnnnnnnnnnnnnnnnnnnnnnnnnnnnnnnnnnnnnnnnnnnnnnnnnnnnnnnnnnnnnnnnnnnnnnnnnnnnnnnnnnnnnnnnnnnnnnnnnnnnnnnnnnnnnnnnnnnnnnnnnnnnnnnnnnnnnnnnnnnnnnnnnnnnnnnnnnnnnnnnnnnnnnnnnnnnnnnnnnnnnnnnnnnnnnnnnnnnnnnnnnnnnnnnnnnnnnnnnnnnnnnnnnnnnnnnnnnnnnnnnnnnnnnnnnnnnnnnnnnnnnnnnnnnnnnnnnnnnnnnnnnnnnnnnnnnnnnnnnnnnnnnnnnnnnnnnnnnnnnnnnnnnnnnnnnnnnnnnnnnnnnnnnnnnnnnnnnnnnnnnnnnnnnnnnnnnnnnnnnnnnnnnnnnnnnnnnnnnnnnnnnnnnnnnnnnnnnnnnnnnnnnnnnnnnnnnnnnnnnnnnnnnnnnnnnnnnnnnnnnnnnnnnnnnnnnnnnnnnnnnnnnnnnnnnnnnnnnnnnnnnnnnnnnnnnnnnnnnnnnnnnnnnnnnnnnnnnnnnnnnnnnnnnnnnnnnnnnnnnnnnnnnnnnnnnnnnnnnnnnnnnnnnnnnnnnnnnnnnncgcttccgaagccccgcttccaggatcaccctgtcccgaccccgccccaggacccgccaacctgaactctccccaggacctgccccaacaacgcttatcctggccctccccaggcctcgccctcatgacgctcatcctggccccaccttagaaacgccaccaccactctcctcctgaccctgcccccgggccccgccccctctctgcccctgcgcactaccctgggcccgccccctcttcagtccaggcccggcttccgcccggtctcccggcaacgctgcggccccgcccacgccatggcgccctaggagaacgcggggacagaactcttgctgcagagtttcgagcgccacttcctggcggcgcgctcactgcgctccttcccctggcaggtgggcggcggggcgagcggagaggcccgcggggctcgcgggagtccaggggcagacgggatgtgtctccgtgctgaagcccccggcgctcccgccacgtgagtgcctgggctcccgccggtcaggtcggcgcgacccggtccccgtccctggggcctggccagagtcgctcgcacccctcctgccccgcgggctggcggcgtaagctgggggcgtctccaccgtcttggggggcagacgcgcgctcgttgtggggtacagttcacgatcattttcacgactttttaaaggcagtaatcgttctggtcactgcgacacagctgccctcgcccattctaaaaagtcagcgccctcaggaccgcaggtaaccacrtcctcctgagtgcggtgaccaggtcacaggctgtccctcgtgcctcagtgttctcatctgtatgtcgagcactgcacagaatcggctcatgcgctgaggctctcacgcctgtgatggaagagacagagaagggggtggcctcttgtctccctggggacctcccattctcagcacaggcgcatggcaggcagcagcctcccttctgccagcagaggagcttaatgcacccggacacatttgtaattcatgtgcggtgagctcactgggatgagtcagtttggatatatattcctccctgggtctgccccattttatggggtgttgcttaatcrtttgcgttattccattgacatgaaatatttgcactcagagatmatttctggtcaggagaaatttgtgcgtttttaaccctaaatagaaaccttcctaaaagcatcataggtctccattcaatattgactataattgttcacatgcccacgctgaatgctaacttgggctcaccctcaacacccacgaggtgggtactattattatcactcacatttgaccagagggattgtttgattagggtgcagtagttgagagttcagacccaggagacagcctgtctgcttcgaatcctggcccagcccctggccctgtgtgaccttgggcaagtgactgcatctctctgtgctgttgtttttttcttaataaaatgggggatataatgatagctacctcttagggttgttgtcagggttgagtacaaaagcctgtggatcagtgcctggctcatggtaaatgcatgtcggtgttagctagtgtttttattcagtctcgaaatgtttaataaatgccttccgtgagccaggcaccatggatcagcagtacccatgacagatgaggctctgcttgcatgggagagccagagaataaacaaagaaatgaataaacaagaaaagaccagatgagagtggctctaaagccaataaaacagggaaatggtgaatggagcaactggggagaagagtcaccaaagtcggggaatcagggaagccttccccaaagagrtggcatttaaactggggcctgastggtgaagcagccagccatgggaagggcttggggaacaggatatgcaaaggccctgtggtggaaacaagccagctgtggttgaggaacaacagcaaggcagccagtgtggctggagtggagtgagcagggtgggccaggggtgagggagaacaggccagagagagggattaggaccaggtcttgtagggcctttcacagcatggaaggagctctgaagcaatgaagtgccttgccctgtgtcacataccagccgagacagtctgcctaagtcgggagcccaagttcgctgctgggcttgaggcccctgtaagaggacaatgtaacccaggctggtatgggcacattctgcatttccacttaaactcagatggcaagcccatcaaaccttggtgccatggctgccctggtaattcctggctgaccagtgcaaccagggagctggcccatgacctgggtggcagctaagtagccaggactaatgcggccaagagtcactcttctagccttyttcctgtgactcatccaggtgcaccytgcggcatctgaatgtcaggctttcagctgctgtggcttccacttccaactggctccacgtccccagggagagatcacacagtgctttgccaacacattctattgcgtgtttaatgttcttgtgaatgcacccttgagatttctctctctcccctccacacagagcttagaagcaaagttaagagactcatcagattctgagctgcggcgggatattttgcagaaggtaagaatcccagagtccctgggactcatgactctgcctcctgaatctctccggaagacctgagagaagaaccgcaggtgtgcttgtaccctttaaaaacacccctgttcaaagaacaaaaccattgagtcagcactgcaggtgggtgtgggcacctccgacggctccagctctttcattttctaagacttagacaaagacatcagaatatacaaaaatctgcatgagaggggggaatctagggaaagttttttaaaccatccacagcaaaaacagagatgacaggtgcaagacagcttctagcatttggtagatgctcagagactttcttttttgcattcatgaggcctgtcctgcccactcctgtctcttctaaacctaaatgggcccttgctttgcccagggtggggtttggactcaagagcatctgcatgcaggtgagasgcaggatcaccacccggcccagccgcagcctgaccttggccttgagggccaagtgcagatcaccctgcatcctgggtcttcaccttcgaagggccatcagcccttctgaaaagacaaagcaatagactccctcccagaaagaagtgcaccagaagaatacattttccatacaaactcaggggaggcagacatcctccaccctcacccacccagcccatcctaggagccccggggaagaattcctgtgctagaggtgaaccaagattatccacgtggaaaagatgcagccacagcagggaagactttcggggcaatacagtaggtcagggcttcatgcatggagatacctgaagttatctcgcaccctgctctgagtttcaccctgagcctcactctcgtaggtggtgaagcatgaaatgtggggagagctgctttaaaacccagcacaaggctgggtgcactggctcacacctgtaatcccaggactttgggaagctgaggtggacggatcacctaaggtcaggagttcgagaccactctagccaacatggcaaaaacccatctctactaaaaatacaaaaattagctgggtgtggttttgcacgcctatagtcccagctactcgggaggctgaggcaggagaatcgcttgaacccggggggtggaggctgccataagccaagatcgggccactgcactccagcctgggcaacacaacgagactgtgtcagaaaaaatgaaaaaccagcaccagcctgaagggcctgtgtattgcgtggggtacttttctgcccttgggcagaatctgcatccctcccagccagcaggtgctgcggaccatctcctccctctccytccagactcctgttttcccaccgtccccactcctgctgcaccagtccctctgccctcctttccatgtgctaggccgtggatacctcagagcttacaccggctgttcccactgcctggaacttgctcgtcctgcacttggcttctcttggctttagctggagtgtcaccctgagcgtcccytcccctccatcctgtccccagggacagaygctccaagagagcagttgcygagtgggccttcccgcctcttccatagagccagacagttggcgactgtccttactgcaaaccctggttcacactggctcccctgggagggaggtggtttgggcccacatgccctgtgttcctgctcagaatgggcattagaaatgctgccatagcctgtgccactgcagtggaagcatttttaggaaacggcttatatcttaagacaaacttcagatgcgtggggccagaacgctgtgtccatctacatctttgctgagggatcgggtagcctggagtttgccctctgctgtgttggcttgaagctcataggagacttcagatgggctctccccagcaaccaacgttctgtcctttgccatagactgtgaagcatcctgtgtgtgtgaagcacccgccgtcagtcaagtatgcccggtgctttctctcagaactcatgaaaaaggtcagttatgggcagtgtccgcagagtagtgggacagcatagccacctgcgtgctggagcccccgtccttcccagtctctgggcctgctttgcaaaccccagcatggcaggggtctccccaggcaactggctgcagctgcgtgtgacccatgggagacagtgcagggcgggaagaaggggaggccagcgtctctccctcactctgcctcctggggtttccgcagcagctgcttctctggagccccagctcctagcatatggattctcattcctaccaggctggcccagcaaacagcactggaacccgcacccacaccctctgtcctgcccgccaaagggtttggagtttcctgctcttgtccatctctgggttgccccacaggcccctgttggaaggtttagctcttgccacacctttggaactagttcctctggtgaattctctgcattgatcctgctggaatgagctctttcctgactgatacaggatggattttattttttacttatttatttatttttttgagacagtctcactgtgttgcccaggctggattaccatggcataatctcggctccctgaaacctctgcctcctgggttcaagcagctctcatgcctagcctcctaagaagctgggactacaggcacacgccaccatgcctggctaatttttgtatttttaatagagacagaatttcaccatgttggccaggctggtctcgaactcctgacctcaggtgatccacctgccttggcctcccaaagtgctgggattacaggcaagagccactgcacctggcctaggatggattttaaagatgggcctgaacatgcagggtttgacatgaggatgtctagaggccgttcctcactaggcagtagcagacctgctgagtgaaagggccacacttttagcaaataaacaatcccctgcttctccaatacctgctttctccctagtcctccccaaaaggctgcatctgtggtcaccagcaggtctgccctgtgccaccaggagagggcagcggtcatccagtgtaccctgttgctgccctgtgaatcttaggacggggccagccgtggagaagcagcctgctgacagccacagcctgcagcatgggccgccctcacagttctgcctgggctcacttaaaagcaccttttgttttcctcctctctgtgtttgatccaaacacagagctctctgtcatggtcaagtggcagctctcatggaattcttgtctcctgccctagactacacctaaccctaccctctcaacacctcttgttgaaggccctcccatccaggtttccctaccaagtgaattttttttttagagataaggtctcttgcccaggctgtcctcgaactcctgggctcaagcagtcctgycatgtcagcttctagagtagctggaactattcggcacacaccaccacgcccaatgaagtgaatattttatatggcagctggccggtattacaccattccatcccaaatctcccctccaaacctggcgaaaatcatctggccatttttacagattagaacgaaagcaaacaagctctcactcagcctgcccccagcacgaggctgtccacacagagcctttggacgagctgtacgaggtgctggcggagactttgatggccaaggagtccacccagggccactggagctatttgctggtatgagaagggcaccctcctccccctcacagcccagatacccttcctgcacagacaaagtgaaaacgtgggtgtgggttcaaatcctgactcacccattctgcagtcttagatatgaggtccattaaccttctttagcctcagtttccctgtctgtaaatcaggcacttcaacaacaacatcatgcctcgtgcggttgttgggcatttgtccaatgggtggcacacactacctgcttcacaaggacctggtgcccagtcctcaaagaacacctgacagggctgggtgtggtggctcacgcctgtaatcccagcactttgggaggccgaggctggtggatctgaggtcaggagttygagaccagcctggccaatatggtgaaaccctgtctctactaaaaatacaaaaattaggctgggcgtggtggctcatgcctgtaatcccagcactttgggaggctgaggcaggggtatcacctgaggtcaggagtttgagaccagcctggccaacatggtgaaactccatctttactaaaaatacaaaaattagcagggtgtggtaatgagcacctgcaatcccagctactctggaggctgaggcaggagaatctcttgaacccaggagctggaggttgtagtgagccaagatcgggccattgcactccagcctgggcaacgagagtgaacctctgtctcaaaaaaaagtacaaaaattagccagacatggcggcacgtgyctgtactcgcagctacttgggcgactgaggcaggagaattgcttgaacccaggaggcagaggttgcagtgagccaagatcatgccactgactccagcctgggtgacagaactgaaaaaaaataasataaaacatagatacagaaaaccacaaaggacaaacacagcatattgaatcatcacaaggcagccaccccttcatagccacacccggcccctggccaccactgaccagtgctccatcgccagaattctgttgtctcaggaatgttcaatgaatggaatcctgtatggcctgagatgagtgtctttcatgccgcatgacacccttgaggcctgtgcaagctgatggcatgtcaacagttagctgtttctcattgctgattagcgattggtcctgtcatggtttattcagccatgtggtggatggctacttgtcttctatgccacttgtcttctgattgctggactgactctctcgccctctcttggtgcagccctcgggaggctcggtcacactctccaagagcacagccatcatctcccacggcaccacaggcctggtcacatgggacgctgccctctaccttgcagaatgggccgagaacccagcagccttcactcacaggtgacctcggggcgcagggcagggcaccgaggcaggcttaccctggtgcagtcacagacacggtcccctttcctcccaccaggactgtcctaaagcttggcagtggcgccggcctcacaggcctggccatctgcaagatgtgccgcccccgggcgtacatcttcagcgactgtcacagccgggtcctcgagcagctccgagggaatgtccttctcaatggcctctcattagaggcagacatcactgccaacttagacggccccagggtgacagtggcccagctggactgggacgtcgcgacggtctgtcagctctctgccgtccagccagatgttgtcattgcagcaggtaatgcccagccccgggcatcctgtgcaggcggtgtccttgcagctctacccagctcttggctctgggaaaagggaacaatggatgctgtcaggcatggacatgatggggcttccagaagagttactctgggcctccaggctgacatcaaaggacaggggtgcctcttaaggtgaccttcaagccacagccctcttgctggagacaggcatactcccgttccagttgtcaccacatggctctgtcccagagccatgccctgtgtccttcagagaccaccggaggaaaacaaccacttctgggatgaggacagggcacttgagagaaggtggtgtttggctgggccaccgaaaacccctcgcccctgccagcacactcagtcccctctctgrtggaacagagctctgcctgtggtcctgggtcccagccctgaaaaccacaggtccagcggtggccagggacacaggcccacccctgcaagccagcagacaaatcagcggatacctgaaacacgaagttcatggcagattcaggctttgtgtcattcaaagccctctagataggccgaaaaccagagctggttttttaaggaacaccagtgagtctggacatttttttcttttgcttcggtcttttgcagctttctctaagggttctcctttttcaccgtagtaattgcctttccatctaatggcccaaatgtttaaatggcatctaatagtctcatatgaccgctgcctctctggcctcgccctgctgctgtggtcagcatgacctggaactttccacttgtccctttcagtaacctgaagatttcaccgtagacgtgctgtattgcccagaagccatcgtgtcgctagtcggggtcctgcggaggctggctgcctgccgggagcaccagcgggctcctgaggtctacgtggcctttaccgtccacaacccacagacgtgccagctgttcaccactgagctagttgagtccccacgcccacccgggcctgcatggtccccgagctgtccctgcaggactccagtggaagtgaaagaactgggcgccggcgtaaagctagcatgccccacactcccacaccatgcggggaactcgggcagaggccggtgagcagggtgggcttggagcatggggggcttgaggcaggaggagggcagctcagcacaggaaggagggtctgagcctagcagccctactgtgtgcttcagagcagggttccctaagcccttgggcctctgttttctcatctataaaatggaggtggtgggaggggcagtcggggtcagggctggacacagctgtggccagcaggatgctggagcacaggctgtacaggcggatccaccacgccactgtcctgagcacccagtcggtggaagacaagcagagtgactgtagagaaggggaattggccctgtagtgggccagccactgtccttagacctaacatttgtcagcccccagcacctgtgagggtgtgctgtccttgtcccatctcagtgacaaatacactaggacacacggaggccaagtgacccccgagctcccgcacactgcagcccggccacctggctcgcaggtctccacactacatccaagccccccattgccaccagcctttgccccagctccccctgagcacagcccctcctggcagccatgtgcacagatgcacgcacagcagcctctgcctgcacacagagacacggacgacccagtgactgtccacgtggggcagcccgttaactacagagtaaacaaacaagccggcacacgaaggcgtactgggttccacgacagagtcctgcacaacctcgcacaggaggctggccgggtgcggggcccaggcctgtcatcccagcactttaggaggctaaggcaggaggactacttgaccccaggtgttcaagacgaacctgggccacatagtgggatcccgtattcacaaaacatacagaaactagccaggcgtggtttcacacacctgtagtcccagctactcgggaggctgaggtggaggatggcttgatcccaggaggtggaggctacaatgagccctgatctcaccactacactccagcctgggcaacagagcaagatcctgtctcaaaaaggcaaaaaaaaaaaaaaaaaaaaaggaagtctttcttcagatacttacgtgaaaaaatacctgcaatatcttttaagtgaaaaaaacagtgccaagcagcacacatagtataagaacccacccaccattttttttttttttttttttttgagacagagtctggctttgtattgcccaggctggagtgcagtggtgccatctgggcccactgcaacctctcacctcccaggttcaagctatcctcccatctcagcctcctgagtagatgggactacaggcaggtgctaccacacctggctaatttttttattttttgtagagtcaaggttttgccatgttggccaggctgatcttgaactcctgacctcaagtgatctgctgcctcagcttcccaaagtgttaggatgacaggcgtgtgccactgtgcccagccccatttttgtttaaaaactaataataatcacccagacatggttatgactacctatattcccaactactcaggaggctgagacgggaggatggcttaagcccaggagtttgtggcaaccttgagcaacgtagcaagacttcatctcaaaaaaaaaattatcacaatcatcattttcacataagtatacctataggagaaaacctagaatatatatatagcaggcttgtccaacctgcggcccaacacaaatctgtaaactttcttaaaacagtacgaggtttttttgtgaatttttttcttttagctcatcagctattgctagcgttagtgtattttatgtgtggcccaaggtgattcttcttccaatgtggcacagggaggccaaaagattggacatccctaatacactcgttaacaggtgccatccttggatggcaggattatagagacttctacacattcatgtctgcactacttcatttttatagatatgcattttccacttgtaacaaaaaactgtgattgaaaatcatcccgggtcacagtgtctcacacctgtaatcccaacactgtaagaggctgaggatttgggaggctgaggtgagcggatcacttgaggtcaagagatcaagaccagcctggccaacacggtgaaaccccatctctactaaaaacacaaaaattagccaggcgtggtgctgcacgcctataatcccagctactcgggatgctgatgcaggaggatcacttgaacctgggaggcatcgcagtgagctgagattgcgccactgcactccagctaggggaacagagttaaactccgtccaaaaaaaaaataataaaagaggctgaggcaggagcatcatttgaggccatgggttcaggaccccatctctacaaaataaaaaaattactggcatggtggcacgcacctgtcatcccagctagtcaggaaatgggaggattgctagagcccaggagtcaaggctgtggtgagcaatgactgtgccactgcactccagcctgggtgaaagaacaagatcgtatctcaaaaaaaaaaaaaaaaagaattattctggctaacggctcttcagacatctgtgcttatgagaacaccagccccttctaagctgtgtgtgtgtgtttttgtttgtttgttttgttttgttttttttggtgttttttttttgaaatggagtctcactctgtcactcaggctggagtgcagtggcacaatctcagctcactgcaacctctgcctcctgggttcaagcaattctcctacctcagcctcccaggtagctgggattacaggcacccgccatcatgcctggctaatttttgtatttttgtagagatggggtttcaccatgttggccaggctgctctcgaactcctgacctcaagtgatccccccaccttggcctcccaaagtgttgggattacaggcgtgagccactgtgcccggccgctttctaagctttgtgaagagtgggttgactgggcagccaggtagatgtgggttcagagctctgcttctgtcccgctgtgccaagtgctggggcagacgccagcagagagtggacagcggcacggtgcctgctgctaaccatttctatgcaaaaccagatttctggtcccatcctggaggccaattctaggtacctgggtgggactgggaaactgtgaaacaagtagactgacttggacactcccccaccacaccacgcctgtcctagcagccccacacaatacgctcatgtcctgtccccaaacaccgccatcctcaaacacatgtgctctgtttccaggccaggccaggatcagatgggaagtggaagcttgtcatgaccagaaactgtttccctacaaagagcacttggagatggcaatgctgaacctaatactgtaggactcacacrcgacttcaacgggattgtgaggatcaagtcactctcatgggaagaatttttacatgggaaagcggataaaactttcattggactggaatgtttggagaatrttaatttccaaatcaggaaccacaaactgccctctaataagacatcrgctrtctaagcgtgtgggtgccccctttctgccagcagttctggttcttaagaaaatcaccataaatcagacatgaaaattctggctcyaaaaatagcattttctttgtgcaaataaaaacgtgtgtatcaagtatgatgttcccccaacgtggacacacccggttcctcacaaagccaagcccgctgcagctgccacatccctgggcttactgtgcagcaggtgcttttttcaagacaggaatcaaaatattaggaacacggcagaaaggcgacacctggagaccaaacgcaggatgaggagtactgcagaggtcacagggaagtcacagaacagtagtacgctagcaggggcatggggcgtgaagaacagaagaagagaggaagtgtttccaagcctccaaaaaagaaatcagagccaaccacagcttcccgggtcacagaagcaattcactcaccaggcggcacyactgccgtcatttcagcttctggccactgggaggcgctgcttgaaagggtttgccctgagactccaagaagaagctgcgggaaggacagcaggggccctggggttttagcctctggcccrggagttatgtgtccataaccaaagggagcacagtctgcacccagctctcatcccatcggagctgctgcractcccgcaggttcttccggaacaggtttagcttgcctgcaggatcaggaaagtttgagaaaagcatctgcataatactaaagagcagagcttacctcattgcctgtccccaccgcatcccaggtcaccacctggctgaccccaggtgcccgacccamcaacarcccctaccaagttcttaactccctcacttggactcragactcttcacgccccagcagcgctccgcctccaacttgacatcacgctttctggraacttccccgcatgtcccactttcccacacttggtgtcctggggcacctcccggcctcttcatgctgtatgctcccctgcgagcaccctcctcttggcctctggccaagtcccacccatctgtgggtaacaagggggtgtcggtgttcttttcagccttgctaaactgtctgaatcaaggatcacaaactacagcctgcaggccaaatccagcccacagcctgtgtttgtaaataaagatttattggaacaaagccacaccccttaatctacagatgatctgtggctactttcacaccccaacagagtaccatggttctgacagagactaggggacccagtctaaatgacttccgacttggacctttactgaaaatcctgccagtcattctgttggcaagaacgatgtattactttttgcaataagaaacaagtaacatttgcagaattccacccatctttcaaggctggtcccagaagctccctttgcccactcacctacctgatcctgctcacttcctaaactgcagcccggcccacccggctccagcgtcatttgtggagtgtctgttccataaatccagcgggcaggcgggcaggtggggttgtgtcctaactttcccgagcctactgtaccgaaacgggacagcagagtaggccagcctctgtgacctctgctccctccctagcttttccgccagaccccacatggtcccaccccgactgtgggaagcagggatcagggagcgtggctcggtgccagtctccagaaccctgcscaccctggcttagtggcagatgtggctacctgcagctgagctgccagttcctctgagtcctcaaagaccaagccgttttcttgatgtttcaccagctcatgtaaactgcagagagaaccaagggagcctgagagctgcctggagaagacaccagacccctggggtgcccacctgggctcccctcgcaccccacgctcaagccaggctggggattggaacagggggtgtggtttctgggagctggttcttagatttggcatctgaagggtataaaggcctgggrgagtgcacatcaaaatggccaaaccgatttgaggagggagccttaaggagggtttgtaccttctgtgctggatgctcttcaaggactgaagaattatttttgtatgtttttcttaattccatggctgtggaacaagtaaggcaaccccctggrgactggttcagcacataaaagatgacttttctagggcaccagatttgatcaagacgttccctgagctcagctcacacgaggggcttgaatccctgaatcccatccaggagccggctcctgagcaggggccaagggctcaacttgtgctggggctactgcttctagaatctcctctaacgccacccttccaaacacccatctatgctgggtgcagtgaggccacagcatgacactcatttaactcattcaaacccaccatgtgagcttggccaaaagggacatggtgggagagaaaaacaaagaaaaccatgtaagcctgcaggcaattcccgccaattctactctaggagcaaaagccccgagtggagttctagtatttaaggtgctttcttttttcatattaggttggtgcaaaagttattgccatttttaatggcaaaaaccgtgattacttttgtaccaacctaaatataacatgagttctaaatggaagcaactacttcagtgaggctcagcccagccacagtaaccacagggctcctcctcatggcctccagtgtgtgctggactgaccaaggggcagggcctcactgtgggcagctggctctgcactgtttccccctcagcggtggatctgtgaagctatccccagaaagattcgggttctgctcctaccacttgaagttcacaacgcacacacaggcaaacagctcctgaacatgtccaccaccttcatgggcaggtccaggccactggaggacgtgtctagacagacrcccaggtccaccgaccctgctaggcaagaggggtgcggtcagagagctggtctctgccctgggaacacaaatcctcccagcacagtgaggcagcatcccccgaggggagtgaaaatcagataaggccccccgcagccccaagcacaagtggcttaagctggccaagcagccacatggtctggctgggacatctgaaaatgtaagttgacactttttctacgtaaycacaatttggtttttttgttgttgttgttttgttttgagacagagtctcactctgtcacccaggctggagtgcagtggcacaatctcagctcactgcaacctccacttcccaggttcacctcccgcatgtaatcccagcattttgggaggccaaggtgggcggatcacctgaggtcrggagttcaagaccagcctggccaacgtggtgaaaccccatctctactaaaagaaacacaaaattagcgaagcgtcgtggcaggtgcctgtaatcccagctactcaggaggctgaggcaggagaattgcttgaacctgggaaggcagaggttgcagtgagccaagatcgtgccattacactgcagcctgggctacaagagcgaaactccttctcaaaataataataataataataataataataataataataataataaaccacagcacacccactacaaaccagctgtcagtgtgaaaataaagcaaaacggcttaacatttctaaagagtagctgggaccaggcgtgatgggtcacgcctggaatcccagcacttagggaggccaagacaggaggatcacttgaggtcaggagttcaagaccagyctggccaacatggtgaatccctgtttctactaaaaatacaaaaataagccaggtgttgtggagggctcctgtaatcccrtaatctactcgggaggctgaggtgggagaatcgcttgaacccaggaggcggaggttgcatgagctgagatcgtgcactccagcctaggcaacrgagcgagactgtctaaaacaaagactagctggagagtcctgccaggaaaaggcctcagcctccaactgctctgctcactagaagctggaagatgcggctctagagacgcatcaggaccaagacacractccccacttggagaaaacaacggggaaagagacggaggcaaagcagaaccatctcactgggagaggcgacgctgtttgacacatcgtccctgtacctcccaaagccactgccttccyacacctgggcaacagtggccccaaccccaggcccagccctcctgcaggaaggaagaggactgaatggagggcgtggcaggctgaaaggatgtgacctcctcaaaccccttggtaaagggcctctggggccacctggctgggaggggctggcacaccagaaagtagcctcctcccgggagttcagccagagcccaggtcccgtgcccaagtggcctccagagccaccttttcagaaaaagtacatcctgcccacccctgttccccctgcttaaggccctgcctcctccctgagcctcccgctggcctctcacctagaagcgggggtagtcctcggccctccagccagggggtgcagacctggatgtgctggaaatgctactggtggatgaggcggctgtaatactccctcagaggccctttgccttcacagagaagaggagacactgccatggacccgtctctgtccctgccacatggccccaggctcaagacactcccccctaggagggatccttttcccagaagctccacccctcggcagctccagtcaggccccatctgggcccttccagaagctacccaggagccccgagacatgcaggggtgtgtgcaccctgacccctgaggcnnnnnnnnnnnnnnnnnnnnctgcaaacatggcggggtaagcactggcctggcacccgaccgcccactgggtggatccagccttctgtctgtgttatgcgcaggggacacgaggactcccccttccctggcacagcccccagagcacatggcgtaggttccaagccgcccctgccctgccacagcctccagagcacatggcgcaggttccaaaccactcctgggagcctagaggccagaggagggaggagagcaggagcagcagctggcccagaccccgcctcttcccacaccgcttccgcttttctccctcctcactgagtcaccttgaaagggctcagcagcagtaactgtgggacaggggctcttccgtttaaaaaattaaaagacgcttggttaaggcaccaatgacatggccagacacagtgattcatgcctgtaattcgagcatattgggaggccaagttgggtggctcacctgaggtcaggagttcaagaccagcctggccaacagggtgaaactccatctctactaaaaatacaaaaattagcagggtgtggtgggcccctgtagtcccagctactcgggaggctaaggcacgagaattgcttgaatgtgagaggtggaggttgcagtgagccaagatcacaccactgcaccccagcctgggcaatagagactgtgtctcaaaaaaaaaaaaaaaagacaccagtgatgtaacaacaacaacaaaaaagatgtttggaaactactgaaaaagtagaaagcttggtatctacagattcaaatctgggctccctgccctgctgtgaaaccctctgagcctcagtttcccccatgtcaagcagtataagaccctatggcagagagctgcagtgaggattaaggagacaagatcgtgggaagcacagggtaaaggctgcgtgcccctccccatccaccatcccccaaccacacagacacccagggtcccaggcrgtacctgttatcacacagacgagagaaggaaggttgtgtccgtcaagagtcagttgttcaaactctgtgtttaaaaaaagaaacaattctacacggaatttctggtagaattttttttttttttktttttktttttccgacagactctggctctgtcacccaggctggaatgcaatggcgtgatgtcagttcactgyaacctctgcctcccgggttcaagtaattctcgtgcatcagcctcccaagtagctgggattacaggyccccaccaccatacccagctaatttttgtatttttagtagagacaggtttcgccatgttggcctcgaactcckgccctcaggtgacctgcctgcctcggcctcccagagttctaggattacaggtgtgagccaccatgcccattcagaaaaaaacttttaaataaacaatagccagagtcacctgttcaggtggagaaagagcactgctctggtggggaggccaccagcctctgtgaratactctcctggagggggcatttcagcctgagggcctggtcactcaatgacccaactggggattcaaggcggcccacctccaccatccccactgtccccaggctgccccacccagtggccagggacaggaacatgctgcaggccaggcaagcagctcacagctcagtggcccccgacaagcccagagctcctcaccgcagccacacacctactttctaaagctgccagcaggatggagaagtcttcgtcctctatgagaagagaattgaatgtcagggtcctgtttctagacacccctcttacagctctcacgacctccccttctcattgagaccgtggcagggtgggggcatgaaggactggcaggtgtgaggacaacacaggttggccaggtgcctgtcacaccaaccccaagtgttgcaggggtcgtgcagacctgtccagcctgtgctgctgaccagcaaggctggccgctcgtggagacgcatcaccagcccgctcccagcatccctcttcatgaaggccgaccgctccgtggctgggtcctcaggttctgagctgaaagagcaggaaaaaagcttgtgagaggccacagagcaggcccaggacccaggacgggcatctcctgccatggcaaggcctgcaggctcccaaaggttggggtgcccggccacatcagcagcaccaggtcacccctgccatccgaggcctgggcttgctttctctaatattgttgctgggtgataagtttacaacagcaaacaagactgactcattccttttctccacgggacttactgtcttatcatcccctggactcaagatgagggtgcagggacgccctcccacaccaccccagcttacacaggggcacacctcagggtgcgtggacctgcacaaaggtcccctccttagccccatgagacaccccaggggacacacaggtccacaggtcctgccacaggcctgggaacccattggcaggagagtaagacagcgcaggggtccacaaacatttcttaaagggccagagagtaaatacttcaggctttgcgggccacaggttctctgttgcaaaacacgattctgctattgcagctcaaaggcggctgtagacaactcagaagttaatgagtgtgctgtgtcccaatgacacttgatttacaaaagcaggagactggcctgtagccttactttgccaaccccygggtgagtgggttcccaggtctgcagtgagaaggggacaggccagggcagtggcgagcaggagagaaggcagctgaggatgggaggcctaccgggccctgaacggagagtgtgtgccgctsagcttcatgaagagcyggcgctgcaggtccagaggtgtgtcttgaaagaaagatgccggcttgtcatagayggtcacagccctgcaatgaaatcatggcagggctattgggagggctgaagaaaggcctcaggaatggaggactcagaggctccaggaaaagaaggacgcttggggaatccaagtctcaggcgatgacaagaagaagccttgcaattacttgggaatgcacagagagatgtcctaggaccaaaagtgcctggacaccctggctggctgggaaagaaactctgccccctcctctcccggcttctccaaattttcccatagtgttgccaagcattagtccagcgtggargctactttttgctcaaaccactcatttgggtcccgcgccccatgtaacccatcctcagcaaaacaacctttatttctttcttcctggtttccagaaagttcccctaaagccctaggaatcaccgaatgaaaggggctttttacaaacaggaaacttaagtggagtgccaatacacaacatgaattgcaccaggctgggtctaagataaaaccagactgtggacagcaggacagagaagacccacatggctctgcactgccggggtctgttatggtgtggaggaatgtcttactctgttgctcctgtgggtgtagctaaaacacgaaccaggagtcttcatccttagaaagtagttagacagacacctgagaaccaatctcaaactgcagccttccacagaaccttctggaaccttcccgaatgcaactcattactgccagagggtctttgatgagagtctactctctaccatttgtcttcaaagagaatacccacatattctctttccatggaaaggtaagttattagagtttatgcagtctggtgtattaattgagagcttcaaagaatgtcactttttcgattcagtctcacagactgggttaaaaaggcagtgttgactattaagttgtaaattactataatgatcattattattattcaagcaagctgtgagaaatgagcattatctcacaatatctgcattttagtgaacatgaaggaagggtgtatttgctggaattacagaagcctgagaaccacaggggaattctcactgcagggtattcagggtcaaaggctcattctattttgtatgctcaatccttcctcaatttatttttatttctttctttattttttgagacagggtctcactctgtcgcccaggctggagcgccttggtgcaatctcagctcactgcaacctcgcctcccrggttcaagtgattctcctgcctcagactccggagtagctgggatttcaggcacccaayacaaaccccagctaatttttgtatttttagtagagatgggatttcaccatgttggccaggctggtctcgaactcctgacctcaggtgatccacccacctcagcctcccaaagtgttgggattacacacgtgagccaccacacctggccgggcctaggtttttgaagaaggaattgaactgagtgtaggccaggttgtactgctgaaggtcttgatgtaaacggtctgttggaggtcaagttctgtttagcgggggtagactatgtgacaaagtgaagaaaggtaatggtctaaacgcagcaaaagtttcattcccactcacgtgacagtctgtggagcaggcagctcctctcctcatgaacctgggacccaggtatcttccatcttgtggctctgcttctccagagccttgtcatttttttcatctagctatggtgacaagatcttttggataagccatgaatattaaaccaaaggcaaactctgaaaattgatttgacgtgtggtcagctgctcatttagcacagtccggggaatgctggggtgacggacaagaaggttttcatgaggaggttgaagagatctaagtatasgggtgccagcctgggcacttcagaaggggcactggcctaggggtagaagcagggtgaccctgatttccctggggtagggtgtggctcacgacggggtgctgagaacccaccaagaaggctggaactttcagtactcattgttttatgagggcctgcctgtgtgccaggcgggaagcactgaccagaggcccagggcaactgaagggtctcagcctggtctcttggtgcctggggggtacactgtacaagcgatgatgtagttccaaggggcaggactctgacccacactcctggtgccaatgtccattttgctactcatgttagattttgcttctttaagtgaacttactcaggatagctgggttcttggccattcttccagtggttttcaagggtgaaaaaaggagtttcagcaagacagctaacgtctggatgagtgagccaggaagggtctgtaaccttcctctagagagcactctgggctggtgggcgcgaggactccagtttcatgcacgtccgtgtgaagagaccaccaaacaggctttgtgtgagcaataaagctgtttatttcacatgggggcaggcaggctgagtctgaaaagagagtcagtgaagggagataggggtggggccgttttataggatttcggtaggtaaaggaaaattacagttaaaggggggttgttctctggcgggcagagtagggatcacaatgtactcagtgggggaggttttgagccaggatgagccaggagaaggaatttcacaagacaatgtcatcagttaaggcaggaacaggccattttcacttcttttgtggtggaatgtcatcagttaaggcaggaaccggccatctggatgtgtacgtgcaggtcacaggggatatgatggcttagcttgggctcagaggcctgacgttcctgtcttcttatattaacaagaaaaataaaacaaaatagtggtaaagtgttgggatggtgaaattttttgggggtggtatggagagacaatgggcgatgtttctcagggctgcttcgagcgggattaggggcggcgtgggaacctagagcgggagagattaagctgaaggaagattttgtggtaaggggtgatattgtggggttgttagaagaaacatttgtcatttagaattattggtgatgtcctggatacagttttgtatgaattgaaaaactaaatggaataagagaaggagaaaaacagatattaaaggtctaagaattgggaggacctaggacatctaattagagagtgcctaaggaggttcagcatagtcctgtcagcagagattgtttatttacttcaagagttaagagtggcagtttggggatagcaccaggagatatcagctgtgatgacttggagaaacagtgtaaaccggcagtgtaaacaagagaagggcatgtatgagtagttgagaacggcaaataggagtttgactagacagaagatagtagggatgacaagttttttggggcacagtctaagttggtctggtgtctggaatgagactggggccaataaaaaggagcgtctatacaggagctcaaatgggctgtattttgtagcattctgaggacagctctgacttctgagaagggaaagtggtaaaagtgttgtccagtcctttttaagttggaggctgagcttggtgaggtgtgtttttaaaagaccattagtctgttctacttttcctgaagactgaggactgtaagggatataaagatttcackgaatactaagagcctgaaaaactgcttggctgatttgactaataaaggctggtatgttgtcagactgtatagaggtgggaaggctaaactgaggaattatgtctgacagaagggaagaaatgactgtggtggccttctcagaccctgtagraaaggcctgtacttatccagtgaaagtgtctacttagattaagaggtactttagttatctgactsggggtacgttgagtaaaactaatttgccagtcctgggtgcgggcaaatccctgagcttgatgtgtagggaagggagggagcctgaataatccctgaggagtagtagaatagcagatggaacactgagaagttatttccttgaggatagatttccacgatggaaagaaaatgagaggttctaagaggagggctagtggcttgtactataacatagcctgcctttgctggtgtgtggtgattaggcctggtggagctgccgtcaataaatcaagagtgatcaggttgaggaacaggaaagaaggaaatatggggaaatgaggtgaatgtcagttggatcagagagatacagtcatgggggtcaggtgtagtatcaggaataatgtgggaggccggactgaagtctgggccaggaacaatggtaattgtgggacttaacaaagagtgagtacagctgaaggagccggggagcagaaagtaagtgcatcaggtgtgaggaagaaaatagattttggaagttatgagaaatgtagagagtgagttgtgcatagtttgtgattttgagggcctctaaaagtattagggcggcagcagccgctgcacagagacgtgagggctaggctaaaacagtaaggtcaagttgtttgcacagaaaggctacagggtgcggtcctggcccttgtgtaagaattctgaccgcactaaccatgcctaggaaggaaaggagttgtcgttttgtaagggattgaggtttgggagattaatcagacacgatcagcagggagagcacgtgtgtttttatgagaattatgccgagataggtaacagatgaggatgaaatttgggcttgactgaagtaatgggggctgtctgtgaagctttgcggcagtacagcccaggtaatctgctgagcctgatgggtgtcagggtcagtccaagtgaaagtgaagagaggctgggatgacaggagcaaaggaatagtaaagataccaagtttgagatccagaacagaataatgggttgttgagggaggtattgaggataggagagtatgtgtgtttggcaccatggggtggataggcaaaacaattttgttgataagaggcaaatcctgaactaacttgtaaggcttgtctggttttaggacaggtaaaatgggagaattgtaaggagagtttataggctttaaaaggccatgctgtagcaggcgagtgataacaggctttaatcctttcaaagcatgctgtgggatgggatattggcgttgagtggggtaagggtgattaggttttaatcagatggtaaggggtgcatgataggtcaacaaggagggagtagaggtatcytatacttgcggattaaggtggggagatacaagaggaggatgtgaagggggctttgaactgggggaaaaggtcacaatgcggtgtggctgtagcccaggaatagtcagggaagcagataatttagttaaagtgtttcggcctaataagggaactgggcaggtggggataactaaaaaggagtgcttaaaagagttytgtctaagttggcacaagacttggggagttttaagaggtttagaagcctggcygtcaatacccacaacagttatggaggcaagggaaacaggcccttgaaaagaaggtaatgtggagtgggkagcctccgtattgattaagaaggggatgaacttactttccactgtgagagttacctaaagctcggcgtccgtgatggtctacggggcttccgaggcaataaggcagcgtcagtcttcagccgctaagccgagaagggatcagtcagagagscttgggccagagttccaggggctctgggagtggctgccaggtgagttggacagtccgatttccagtggagtcccrcacagatgggacgcggcttaggaggaatcctgggctgcaggcattccttggcctggtagtcagatttcyggcacktgtagcaagctcctgggggagaaggttctggartaacgcctggccgctgcggttcaggcatttggaagttcttgtgtgctggagatgtggctggggtttgtctcacagtggaggtaaggaattacagctttttttctattattgtacaccttgaaggcgaggttaattaaatactgttgtggggtttgagggccagaatttaatttttggagttnnnnnnnnnnnnnnnnnnnnnnnnnnnnnnnnnnnnnnnnnnnnnnnnnnnnnnnnnnnnnnnaaatgtatattgagaataacatggccttttgactttttagggtctagggctgtaaagtgtctcagggttgctgctgaacgagccatgaactgggctggatttttatatttgatgaaaaagaggctaaatgctatctgatttaggataaagaaaaaagagcattaacctcgactatgtctttagctccaggcaacttttcaagagtaaattgctgggcaggtgggggagggctagtcatggaatgaaactgtagaccagaccgggtgtgaggaggggaggtgataaaaggattgtagggtggaggagtggaggctgaggaagaattgggacctagctcggcctggcgaggagcagcctggggaggaggggagaggtcagatgggtctgtagaaaaggaagattagaaagactcagcgatgcttgggtttgggactgaggggacaggtgggagggaaaggaggaagatttgggatgagttgctttgggcacagagactaggaagggaccgatgtgtaaaagaatgcctggacgtcaggcacctcagaccatttgcctattttacgacaagaattatttagatcttgcaggatggaaaaattgaaagtgccattttctggctatttggaactactgttgagtttgttttggggtcaagcagcattgcagaagaaataagatgcttagattttaggtcaggtgagagttgaagaggttttaagttcttaaaaacacaggctaagggagaagaaggaggaatggagggtggaaggttgcccatagtgaaggaaggaagcccagaaaaaagagagagtagagacatggagggaagcggttcgggggttcttaccctccagaaaagtgggaaaggggtcgggatgcagagatacaaggtccaggcatggaaataagagatcggggtacagagatataagaggtcagggtgcggaaataagggattggggtgcagagataagaggtaggggcttggaaataagggattggggtgtagagatacgagattggggtacttgtgcctcccccagaaaagcagagaaggggtagagacatggagagaaggggttggggtacttacccctcccccagaaaagcgggacttgccgctaaggktgaaggaccaaggcaggcgtccctgcgtggtctgacacctttgaaacatgggggaatattcagagaggcatccctgtaatgattaaacaccaagggaaggctgccttcccagtccatgaccagcgccggagttttgggtccacggatataacgtgtctcctttgtctctaccagaaaatgaaaggaattgaaatcaagagaagggagagattgaagagtggaaaggagaaagtggttgagggacagtgagacaggttggagaagagtgtaagaagaggctgcttaccagatttaaaattggtgagatgttccttgggctggtgggtctgaggacctgaggttgtaggtggatcgttttcacggagcaaacaacaggaggacatgggattgatctcccaagggaggtctctgatccgagtcatggcaccatgcgtgtctgtgtgaagagacgaccaaacaggctttgtgtgagcaacatggctgtttatttcacctgggtgcaggtgggctgagtctgaaaagagggtcagcaaagggagatggggtggggccgttttataggatttgggtaggtaaaggaaaattacagtcaaaggagggttgttctctggcaggcagagtgggggtcacaagctactcagtgggggaggttttgagccaggatgagccaggagaaggaatttcacaagacaatgtcatcagttaaggcaggaacagaccattttcacttcttttgtggtggaatgtcgtcagttaaggcaggaacgggccatctggatgtgtacctgcaggtcacaggggatatgatggcttagcttgagctcagaggcctgacacccagggcaggctggctcagcccctttgacttcagatttcagagaaggccagggagctggattgggtgcctagattttctgagaattatgtttctsagaggattttgaaacctaaacaggaatactttacacacaggtcatcaagcaggaactgggaagttccraagctgccctccttcacgccacctcctcccttcagaggccaagggcggccaagctgtctcccacacacctcagtgaaaagtcactggctctcctcccagccacgtcgctgtgacctcgtgaggtgtgagaaggaggaaggggatctatgttcttgatgaaccttccttcctccttgccgagaaataatttaggcccctgcgcctgctgggcctcagaccttctcagagcccagggcccactgtggctcctgcaagctgcctgggaattccacggaggctgcctggctgcctgtcttattcccagtctgctgcaacccattccctaagcttgggtggctgaaaacaacagaaattcatcctctcacagttctggaggccatagtctgaatccaggtgttggcagggctgtgctgcctttgaagattctagggaagaatcctgcctgactttttccagttttgggtggtggccggcaatgcgcagcattccttggcttcaggtgcatcattccagctgcacacggctgtcttccctctgtgtctcttcttttcttcttataaggataccagtcatatggtgtgaagggcccaccttactccastatgtcgccaagttaatttgttacatctgcaaccacccaatttccaaatgtcacattctgaggttcctgaytgaaggggtgggttgcccctccacacctgtgggcgtttctcgttatgtggaatgagagacctggaaaagaaagagacacagagacaaagtatagagaaagaaaatagggcccaggggaagggcgttcagcatacggaggacccctgccggtaccggcctctgagttcccttagtatttattgatcattatcgggtgtttcccrgagagggggatttggcaggacaatagggtaatagcggagagaaggtcagtaggaaaacacgtgaacaaagctctctgcatcttaaacaaggtaaagaattaagtgctgtgcttttgatgtgcatacacataaacatcttaatccattaaagagcagtattgctgccagcatgtcccacctccagccctaaggtggttttcccttatctcagtagatggaatatacaatcggtcttgacaccaagaggttccattgcccagggacaagcaggagacagatgccttccttttatctcaactgcaaagaggccttcctctttcactaatcctccccagcacagaccctttaygggtgtccggctgggggacattcaggtctttcccttcctaggaggccatatatcaggctatcacatggggagaaaccttggacaatacctggctttcccaggcagaggtccctgtggccttctgcagcgttttgtgtctctgggtacttgagattagggagtggtgatgactcttaacaagcatgctgccttcaagcatttgtttaataaagcacaccctgcacagcccttaatccatttaaccctgagttgacacagcacatgtctcagggagcacagggttgggggtagggttacagattaacagcatctcaaggcagaagaatttttcttagcacagaacaaaatggagtctcttatgtctactttctacacagacacagtaacaatctgatctctctttcttttccccacactgatgaacgtgaatttgaggggacaccattcaacccacagcagagccccaccatcacctctctgcacagggcacctgcctgtctttccttgccagcaccaagacagagccaagagtgatttcttgaaatgaaactgcatcctctcatcycaataaggcatggcctccctagtgggagatgagcaaatgaaagcctccctcaggatggtcatccacacgtccaygggacactcaccccaattttttttcctggtttataaaggtgcttcaggacctcttggctcctggccaatacgttagtgcttcctgaaggggaaagagccctccaaaccattcattgggccatcccagaccaaggtttctgacccaaacattgaaacaggaggagttcccttatcccccttgcagggcatgatacagsggcatggctcacttctcagtaccctgttgctcaaacccctagagggagcgtgcagatgggcaggtcgtggggagcgtttctgggctctggccccacagcagcgtgtggaattgggtgtttacagctcctgaagccccagtgggcatgtgttacagtggtatccttcagttttgccatctgcaggcggcatgtgttaatcagctcagttaggccctctgccttatcacaaagacagagggctttctgtatcacgggttcttgccctagtgtacttgaaaaatcagatcgcatgtggacttggagaatgaatgcaagattttattgagtggaggaggtggctctcagatggatggggagccagaagggggatggagtgggaaggtggtcttcccctagagtcgggctgcctagcagccagactctcctccaaccgcccccaagtgaattccacatctccccactgtcaaaagcctgccagcatctgctgatgtccatcagtgtgctcttctgcttctctgctcctctggatgtccagccacttgtgtctgtgcccactagggtcttggkttttttatgggcacaggatgggggtcatagcaggccagagtattcttggaaaatgcaacatttggacatgaaaacaggagtgcctgttctcactaaggtgcaagggcacaagcccgagggtggagcgcttgccagggaccccacccttctctaaccagcattcccttgccccccttccatatcaacatgaaagctgacattggctcctgtgccccacctctgggcctggtttggtgacctctgcaccagagcttctagggaggccctaccccacatgttgttaactcaacaacccttccccaggggaaccaacgtcctcctgtccccaaacccaaggaggggtggtgggttcctgggcctcttgtaacccgactgaatattttccaggttacctaaccaaactcctgtaaaaccacaccacctatgcctgtgatggggactatctgaatctacagtgccctcggcattctacaataagtgtccaatcggcattttatggacaagattacccaatgtgtagttcccagaagcctgcctgccagagggaagacagcttaacttgtgtggcacccaccaccttccaggtattgccttttatagacacgttaagatgatacagtttcaacagacactctttctctctctctgggtgtaaatatatttgtgattatatagtttaatccaagcaaaactgatccatgaaaaatcccaacttatacagatcaccagatttgtaggtgagctattatttgcttctcaaaggatttgttacccaacaaaactaaatagaattcctacctattgtagagccccctttgtacacttcaatatgaatttatttgtaggtttactccttacttcagtatagcaaagtacaaccaggatagattccaacctcyaggcccatatctcccataaatactcctgtagaaagagaaggtgggttctttaatggaaaccacaagtatctctttgaggcagacatctgaactcatgaccaacttcttagaaaatgtactcaaagggccaggcgcagtggctcatgcctgtaatcccagcactttgggaggccaaggcaggtggatcacaaggtcaggagattcagaccatcctggctcacatggtgaaacgctgtctctactaaaaatacaaaaaattagccgggtgtggtggtgggcacctgtagtcccagctactccagaggctgaggcaggagaatggcatgaacccgggaggtggagcttgcagtaagcagagatcgagccactgcactgcagcctgggcaacagagcaagactccgtctcaaaaaaaaaaaaatcaaatcattattaaacatttttgctaattaaatggttttggagtacattcttttaaaaaaacaattaactatgttttcttcaacactgcacacgtaacgccaactttgcatgacattgcaaagaaagattttactatattaagcagattaaacaaacaaacttttccttgaattctttaggaacaaagtacaacctggtccaaatcatcctaacctagaatgcaccatcagcttgacagtcagttgttcctggatttaccagatttggggcagacttttcatgcttctctaaagagggattcttaactgacaccgtgccttgtttttgcccttttcctaggaaaggaaatgattttatttggtatcatatcatctttcttgctttttttttttttaattagagatgaggccttgctacatttcccaggctggtctccaaattctgggctcagcaatcctcctgtctcagcctccctcccaaaatgccgggattacgcgtgtgagccactgtgcctggcctctttcttgtcttttaaacaaataaatgtaagctggcatggtgtgcattcatatattcccaggtacttgagaagccgaggcgagaggatcccttgtgcctaggtttgagcccaagagttcaaggctgcagtgarctatgattgcaccactgcactctagcctgggtaacagagtgaaagcctgtctctaaaaaactaaactaatgcttggcgcggtggctcactgctgtaatcccagcactttgggaggccgaggcgggcagatcacgaggtcaggagatcgagaccatcctggttaacatggtgaaaccccatctctactaaaaatacaaaaaaaattagccaggtgtggtggcatnnnnnnnnnnnnnnnnnnnnnnnnnnnnnnnnnnnnnnnnnnnnnnnnnnnnnnnnnnnnnnnnnnnnnnnnnnnnnnnnnnnnnnnnnnnnnnnnnnnnnnnnnnnnnnnnnnnnnnnnnnnnnnnnnnnnnnnnnnnnnnnnnnnnnnnnnnnnnnnnnnnnnnnnnnnnnnnnnnnnnnnnnnnnnnnnnnnnnnnnnnnnnnaactaagctaaactaacataataaataattcgtacacacaaggggatgccagctgaggggctggaggtgaggtttaactgggctctctccagagagagaaagaagcttaatgcttctttcaagtaatttctggtctgtctttacctatgtggatcccaagccaacatttgagaaaaggcccccttcagtgaaggaatgtgtgaccttaagtgctgagcgagagaaacttsctttctagccaggcccttcctggggcctaactccatgtgtctgcctccttaacgccagcacctctcctccatttgccccttagtatcatycccagggtctttgcccttgtcaacaggttgcttcccacctgcttcctgcatagggctttgttttctggggtcagagacagcatgagcccacagggccatccccactgcccccttctcagggtgcagccctggggaaatgagcagtgggacttggacacagctcatcaattccttctgggggaagctgatggtgccttcaatttttgtttctgcttcagatgaattaaaaaacaaaaccgtgtgtgaagacaaggagctgaaactgcactgccatgaatccaagttcctcaacatctactctgtgacctatggcaggaggatccaggaaarggacatgtgctcctccaaggcagagsggctcccccccttttcagtttgtgcttttgtatgggtattagccggggttctctagagggacagaactaataggatatataatgggatatatatatatgattgtggaagtcaatacttaataacacaatcacaatcttgtgatcgtgaatgttaatacttaataaactcccatatgtgtgtgtgtgtgtgtgtgtgtgtgtgtgtgtgtgtgtgtgtataaatgcttgtaaacagtaatctgccaaaaataaataagtaaaacaacaagaactggccgggcacagtggctcatgcctataatcctaggactttgggaagctgaggcgggtggatcacgaggtcaggagttcaagaccagcctggccaacatggtgaaatcccgtctctacttataatacaaaattatctgggtatggtatcgcatgcctgtaatcccagctacttgggaggctgtgacaagaagaatcacttgaacctggtaggcagagttggcagtcagctgagatctcaccaatgcactccaccttgggcgagaagagtgaaactctgtctcgaaaaagaaaaaaaaaagacacggtcctgttttcatggggtgaacagttgagggagaaaggcaagcattaaccaaataggcagacacatcatcatgccctattgtgacaaatgctattttagaaaagggaagaagactatagcagtggagggggcctaatttagcttgggggtggtggtttaagtcttccaaagagaaccatcctgtagggtgaacactagggtatgcacactagctgcactctaggggctgagacgctgagattgctgagtgggagaggaaaggtgttgatgaggaggaagatggccctggtttaaactgctgagaacagggtgttgcacacagtaggagcgccatgaagagtggtccccagtgttctcaccaacatatctgaagtggagcaggacggtgatgaatcacacccctgtccccgacctcattctgaacccgtttgaaacgagcagatgcaaaaatctgacaagtgtgttgacaacggtgattttaaaggtcctaagagattctctggatttcagaaccaatttcccatagtagaggggcacattccctgcagtggcctgtgtcatacacagccaatttcaccttttcactgcctggttattctgcaaagtgcatcctagaatgaccttcctctctgagctcctcttcaaaattctgattctttctcaaactgtaaagcctctggcatttgccaagagccaaggccctcctgaagccacagtttgagaacagccaagaggcagacatgagaaagaagtcccacccctggcagggagagctgacacttcccgggctactgcatccttctcagggcccagaaatgaatgagaggtaattaaagcagaaagcattttgcagcagctccactcagctctccgaagctgccatggtcccaggatcagtggtgtgccctgaggacagtcaagggacattcctcgaggccctagaaatcatcagccacctccagcaacttcaccgggcctccctgggaagtctcccttgctgctgatgggcacgaaggcaccagggcctcctgtacatggaaaactcacaatctaggaatgtcctgtggttgttgatcctgggacatccccagaagaatttagttaagccctccaagaaaggaaacaaggttttcttgctgctgaagatgtctcacttgttcttttttaaaaaagcagtgcaattgaatttgcagtttgtttttgctttctttccatttcctgttgctacatctccaagatctcagctgcgctgaggaacaaacaaaaataagcaattttatgcaggaggaatattcggtttccactcccttctcccagcctgcggcagtgcttggcctgcrgaattcttgctctgccctctgtttcagcgggtgttgtcatctgccagctgctttgcctgggggttctgacatctcagggcttattcttagcgtcagtctcagcagagtcttaaaccacgttcaaaggattcggtccygctgccatcctctctgcatctttctgtagtyctttctgataatatttagcaaatcactttaacacagagtcttcgaattctttccagatttacgatggaaacacagaggcaaagagcttggggtagaaagcagaagagcaggtgctggaagagtttaatggtggattttgagttggtcacagtcattttgctttactaagtccagggaagctcatcttcagagttaaccactgtgtgtgtgtgtgtgtgtgtgtgtgtgtgtgtgtgtgtgtatatatatacacacacactgtgatatatatatatatatatacacacacactggtatatatatnnnnnnnnnnnnnnnnnnnnccggacgtgctcacttgaacccaggaagtggaggttgcagcgagctgagagtgtgccactgcactccagcctgggtgacagagcaagactccatctcaaatacacacacatatatatacacacatatatatatgtatatttttgagatggagtcttgctctgtcacccaggctggagtgcagtggcacactctcagctcgctgcaacctccacttcctgggttcaagtgagcacgtccggctaatttttgtattttttagtagagacagggtttcaccatgttggccaggctggtcttgaactcctgactcaagtgatccacctgcctcagcctcccaaagtgctaggattacagacgtgagtcaccatgcccggcccagagttaaccactctattcaggtgttgtttatttttcttaaaattctattacacgtgaataaaattcaatgctttttagtaaatttagagttgtgcaaccatcactaccctccagttttaaaacatttttacaatcccccgaagctcccttatgcccatttgccatcactgccccattcccaacaccccggtcccaggtaaccacgcatctactttctctctagatttgccttttctgaatatttcatacaaatggaattatgcaatggatgttttgtgtgtgtgtgcacggctgacttctttaactgaatgtaatgtttcagaggttcatccrtgttgtagcatgtatcatatcagtacttcacttttttttttttttggagttgaagtctcaygctgtcacccaggctgggatgcagtggtgcgatcttcgctcactgcaacgtctgcctcccaggttcaagcaattctccctgcctcagccacccaagtagctgggattacagccgtgtgccaccacgcccagctaactttgtatttttagtacagacggggtttcaaatatgttggccaggctggtctcgaactcctgacctcaagtaatctgtccacctcgaactccaaaagtgctgggattacaggtgtaagccaccatgccgagtcttcattcctttttattactgaggtgtattctgctggatggatatatcatatcttgtttttattctccattttttaaatattgcaaaattggcctaaaaccacctctctggggcatttgatgatcacgtggataccattgggttgtgtgtaagtgtgtgtatctaacagggagagggagtgactcttgcaccgatttggaaagtgattttaaaatcttatctacattgcatttaaaaatatattgagtccacattttaaaaatataccacgtatttaaaatatttctttttggcttttagttcccaagaacatactcacagtgattgatccagccattggtaatctaaaaccttctttgaagcagaaagatggtgnnnnnnnnnnnnnnnnnnnnnnnnnnnnnnnnnnnnnnnnnnnnnnnnnnnnnnnnnnnnnnnnnnnnnnnnnnnnnnnnnnnnnnnnnnnnnnnnnnnnnnnnnnnnnnnnnnnnnnnnnnnnnnnnnnnnnnnnnnnnnnnnnnnnnnnnnnnnnnnnnnnnnnnnnnnnnnnnnnnnnnnnnnnnnnnnnnnnnnnnnnnnnnnnnnnnnnnnnnnnnnnnnnnnnnnnnnnnnnnnnnnnnnnnnnnnnnnnnnnnnnnnnnnnnnnnnnnnnnnnnnnnnnnnnnnnnnnnnnnnnnnnnnnnnnnnnnnnnnnnnnnnnnnnnnnnnnnnnnnnnnnnnnnnnnnnnnnnnnnnnnnnnnnnnnnnnnnnnnnnnnnnnnnnnnnnnnnnnnnnnnnnnnnnnnnnnnnnnnnnnnnnnnnnnnnnnnnnnnnnnnnnnnnnnnnnnnnnnnnnnnnnnnnnnnnnnnnnnnnnnnnnnnnnnnnnnnnnnnnnnnnnnnnnnnnnnnnnnnnnnnnnnnnnnnnnnnnnnnnnnnnnnnnnnnnnnnnnnnnnnnnnnnnnnnnnnnnnnnnnnnnnnnnnnnnnnnnnnnnnnnnnnnnnnnnnnnntttttctccttctctctctttatttccctccctccgtcccctctctccttctctctctctctctctctctctctttctttctttcttcctttctttcttctttttctttggagttttgctttttctcacccaggctggagtgcagtggcacaatctccactcactgcaaactctgcctccgggttcaagtgattctcctgcctcagcctcctaagtagctgggattataggtgtccaccascacaccttgctaatttttgtgtttttagtagagatgggattttaccatgttagtcatgctggtctcgaactcctgactttaggtgttctcctcgcctcagcctcccaaagtgctgggattacaggtgtgaaccactgcacccggcccctccttagtcttcacttggcttttgtaaatggggtggggggtgggggggttgagggggttgagcatttggattttcttatcaaatctagaatggaattcaaacccatggggtccctaatagaaatcgcagagacccagtagagcatctaagatgttagactttggtgagagttttgtctcgtgttacctttattgtaggtattaggtctttccnnnnnnnnnnnnnnnnnnnnnnnnnnnnnnnnnnnnnnnnnnnnnnnnnnnnnnnnnnnnnnnnnnnnnnnnnnnnnnnnnnnnnnnnnnnnnnnnnnnnnnnnnnnnnnnnnnnnnnnnnnnnnnnnnnnnnnnnnnnnnnnnnnnnnnnnnnnnnnnnnnnnnnnnnnnnnnnnnnnnnnnnnnnnnnnnnnnnnnnnnnnnnnnnnnnnnnnnnnnnnnnnnnnnnnnnnnnnnnnnnnnnnnnnnnnnnnnnnnnnnnnnnnnnnnnnnnnnnnnnnnnnnnnnnnnnnnnnnnnnnnnnnnnnnnnnnnnnnnnnnnnnnnnnnnnnnnnnnnnnnnnnnnnnnnnnnnnnnnnnnnnnnnnnnnnnnnnnnnnnnnnnnnnnnnnnnnnnnnnnnnnnnnnnnnnnnnnnnnnnnnnnnnnnnnnnnnnnnnnnnnnnnnnnnnnnnnnnnnnnnnnnnnnnnnnnnnnnnnnnnnnnnnnnnnnnnnnnnnnnnnnnnnnnnnnnnnnnnnnnnnnnnnnnnnnnnnnnnnnnnnnnnnnnnnnnnnnnnnnnnnnnnnnnnnnnnttttctaacagggttcccacccgatccataaacagcctggtcccccttcagtgggggcatgagagccagcactgtgccatctttcctcaaaggcatctgtcctgtctgacatggctaggagtcccccaaggcaccaccaggctaccctatcacaggctagctaagctccatccagcactgtaaccaggatctaaaagtggatttgcctcacgttttgctgtagtttccaaaaaaaagtagccccataacacctccctctgtaatggaggcttgttttatctctggccacacagcggacagcaactccatgcttaacgtgagatattattggccgggggtggtggctcacgcctgttatcccagcacattgggagaccgaggcaggcagatcgcctgaggtcaggagttcgagaccaacctggccaacgtggggaagccccatctctaataaaaatacaaaaatttgctggtcatggtggcatgtgcctgtaatcccagctactcaggaggctgagggaggagaatcgcttgaacccaggagatagargttgcagtgagtggagatcgcgccattgcactccagcctgggcaacaagagtgaaactccatctcaaaaataaataaataaataaacaattaaaataaaataaarcgagatgttattaagcctccaaggggcrtgatgaatatcactgtctttaggatgggaaaatccatttgttcccttccgcagtggagtggaagaccagcacctgaagttggaaccaacacttaaaacaatttstaatcctttttgtactttaatattttcggggactgcttattatttaataagtgctcttcctgggttaaacttctataatttatccagaggcccatttgtttgatttctgtgacttttaattattctggctgtccctggggtaggaacagcagaggtctcttagaataggcatactatgaacagctgtgattaattggttttgcatttttcatgaaacaggtatgaacttcgacccaagcgaatcgaaggttctgaggaaagatggaatccttgttagtgactctctggcagcctttgcttacattagagataggtcaatgaatcaaagcttcctagaaagctgatggatttactaaagtcttgttaataaatgtgctgttcaattataacactcagataactaaaggacaatgacttcaagtttgacatgccaaccaccgcttctaagattcagaaacacagaggcctgagttcaggcactgtcacaaccaggcagtcagcaagagaaccacataaacagacaaagtcacactatttaggagttgagctccacagatgtcattcacttttgaaaagtagaaaccggaggaatgtatttctctgctctaaaatttgggaaggaactagaattattgaattccaaccctggctggaagaaaaatgagccagaaggtcacttagtaaacaagacagatgatgccccataaagacagaaccactttctgggtcatgagtgttattcctaatggttgccaaggcttcccttgttagtcttccccgtgagtatgaatcagactcagccctcatgaattaacggagcaaaaaggcttataccaaggtcggccacaccatggggacctctccattgaggggaaggtatctacaatttttcctcaccaccctctctgcttaagatagaatgcatcttggaatgtcatctgcaagtttcagcaatgcctgcctatgttcagagaaataaaaaccagagactttcagtaaaatacatgttaatataacacataacagtattactattcaaggcctgtgaagataggcctattcgggttaagcctgtctcagaggaaaatagaggcttagggaatgtatttgtctgttctcatgctactaataaagacatacctgaggctggataacttataaaggaaagaggttgaatgcactcacagttccccatggttaaggaggcctcacaatctcggtggaaggtgaatgaggagcaaagtcatgtcttacttgggagcaggcaagagagcttgtgcaggggaactcctctttataaaaccatcagatctcgtgagacttattcactatcatgagaacagcatggtaaagacccacccaatgattcaattacctcccaccaagtccctcccatgacacatgcggattaggggagctacaattcaagatgagatttgggtggggacacagccaaaccatatcagggaatgatctcaatacatgagatgcagagttcagtcttggggtcccctgatgttctgttctcctcctgcattaggattcctcctgtgtgtgtgtgttgtgtggttgttggtttcttctgtgggtcctctcttttctagccaccttctcattttcatgtcttgctgttcctgatcattgtcaatgttaagaaccgtaaggatttttcttgtcagaaatatccccatatttacaaagaccccagggagcttattggagaaaagccaacatgaaaatcctccagacagagaataacaattgaaggggaatgagtctgacattgtgctcagtgagctgtggccgtgctgtgtgctttaccccaactaccttgtcggttcctctcaacaactgcctcagccagcccagctgccataacaaagtacccgagaccggatggcctaaataacagacattgattttctcactgttctggaggccagaagttcatgatcaaagtatccaccatccctttctggtaagggctgtcttcctggctggcagacagcagccttcttgcttgtcctcacatggcagagagggggagagacagagacagagacatctcttctttttataaaaccaccaatcctatcagattaggattccacccttatgacctccttgaatgttaattagctcctaatgagtgaattggggggaacacaattcagtccacagcaacaaccctgagagatgggactctggtcccctgttctgcacttgaagccggtggtcagaggagttgagccatttgcctgaggacaccgtggacaacggcagggccaggattcaggctcagctaatacaaggcttgcactccagctactctgaattttgagggatgcaaccacctccccattctgttcctgagttgtctaaattagctttcctccatccctttctatccttttttgtgattgtcattcccagaaatcacaggatagagagattcgtttagtgactgtctcctctgctagtggctcagctccacaggggcaggtgctttgtcatcttatttcgtgtggtgtccctgcatctaggatgcggtgctggtacagaacaggtgcacagtcagtagctaaggaacaattgaatgatgactgctgatctgggcttatgagctttttcctgtgccttattgtcatccaatatttgctatttataagatgtcagttttttttttaatgtaaggagttgatgagctgttatttggttttattgaggggtgtgttgggacatttctctcagcaagccttggccacgcctccatataatgtccaagagaaagagtctctaaatacactgtgttggatgttacctaaatgaaatcaccacaagaagctcgtgactcaaatcacagaggctcacaaagccctagtagaacaggcgactctgagcttgcctgtgggttttcttggtgtgtctgcatcgctgtgtgggtggccactctacaggtgagaagcatgcagtgcgtgctcgggggtctgcaggccagtgtgccgcagaggtgcttgtggacatcaggctgggccattccgacctgaacaggcagtggtcaacagccaacgtcacacagtgctgagcgccatcctccatgctgctggagagaggtgcccagacaactctcagtcgcatccccggccccactgtggggatatgacccacgggatgagctggggtctctaggcacccccaaagtaggagcagctgggagccaagagtgtgagcaggcagtttccagcccaaaccacccaaataggtggcaaatcgagtgaattcaaaagtgcatttcccaggtcaggctgcaagtagctttgacacagtagtgcggtccagtgtacatggggacaaagagatgagaaaccaaaatcgagaggtttgtccccagatattaaagcacaaaggctggcagaagggagagggagatgaacaagtgttcctggtgaaatgtctcctggggtcatttgaatgatctgtgagatggcttccccaatattgaaaaagcttcttaggcatgtttgaatttactgtcatttcaataatacagacttactccctgaattcattctagaatcaagaacgtgagtctgaggaagctcatagaaagaaattggaaattagataaatggaaaaggagtggtgtgtgtgtaagtgtgcatgtgtgtgcatgtgtgcacgtgtgcacgtgtgcatgtgtgcacgtgtgtgcttgtgcatatgtgtgtgcatgtgtgtgcacgtgtgtgcatgcgcatatgtgtgtgcgtgtgcatgtgtatgtgtgtgcacgtctgtgtatgtgtgcaattgtgcatgtgcgtctgtaagcatgtccatgcgtgtgtgcatgtgcacatgcgtgcatatgtgtgagcatgtgtgtgcgagtggatgtgtgcatgtgtgtgccgtctgtgtgtgcatgtttgtctctgtgtgcatgtgtctgtgtgtgcatgtgtgcgtctttatgtgtatatctttatgtgtatgtgtgtgcatgtgtgtgcacgtgnnnnnnnnnnnnnnnnnnnnnnnnnnnnnnnnnnnnnnnnnnnnnnnnnnnnnnnnnnnnnnnnnnnnnnnnnnnnnnnnnnnnnnnnnnnnnnnnnnnnnnnnnnnnnnnnnnnnnnnnnnnnnnnnnnnnnnnnnnnnnnnnnnnnnnnnnnnnnnnnnnnnnnnnnnnnnnnnnnnnnnnnnnnnnnnnnnnnnnnnnnnnnnnnnnnnnnnnnnnnnnnnnnnnnnnnnnnnnnnnnnnnnnnnnnnnnnnnnnnnnnnnnnnnnnnntttgcatgtgtgtgcatgcatgtgtatctctgtgcatatgtgtatctgtgtgtgcatgtgtgtatgtatttgtgtgcctgtgtgtgcatgtgtctgtatgcatgtgcatgtgtgtgccttcgtgtgtttgtgtgcatgtgtgtgtacctgtgtgtgtgcatgtgtgtgcctgtatgtatgtgtatctgtatgtgtgtttgtgtgtgtgtgtgtatctctatgtgtgcttgcatgtgtgtgtgggtgcatgtgtgtatgcatgcatgtgtgtgcatgcatatgtgcgtgtgtatctttgtgtgtaagtgtgtgttggaagttcttagcaaggcagtgtaataggtggcgcggcatgaaccattgtcccttggcagattgtgccccaggagacttatgtatttagacagtcttgcatgagaatatgacctctcctactccaccgaattactgtttcattgacatctggctttgggtgtttccctcatatgtgcctgcaggcatgccttttgtggcctaatatttccatcgctgctcctgcccccttgggacagtgaaagatatgtcgtcagcctctggcaggccctgctgtgggcttttggggcaccttttgtggtaaggggtaaggaagctgggcagaagggacaagcttgcagcctgggatgtcctgtgttgggaggcattattgtttcataagggaggaactccagggccacagacaagctcatactgaaagagaaacacaacaacacgctccagagtcagagctatgtgattccccgaccagggaggaccactggagatcagcaccaccttgtcagggagatgtggattcggatgtgttcccacggtctccaatctctggttccatgacagaaagtttctgtcacacccctaagtgctgtcagaccagcgctcggtatgctttgtgctttcctctggacaaccatcaggccctgactgctgccttgatcctctcaaccgctatagggccccgacagggggaaccctcgccatggcctctgggtgtcttatctggacatgacgagctggagtgtgtgtttgccccaagtcaggatctaagagtggaaaggagccttaaaggccataggaccccctttggaggttcccaagggcatacggcagctgatcaaatgaaagtcattcactccagctggggatgaaccaaggctaaatttaaaacaatgccggcaataacacagtgtgaagattctgttcaatcacaaggaaaactctgtttttccagaatacagaataggaaaaggagacacaaaagtataaagtagtccaagtgattctggagaacacttgacattcccttagtgtaaagcctgggaccatggagagagccctggcctgagcttggggtcccagccaagtggtggctttccacaagtgacttgactacaacaggaggggttggaccagctcatcactaggattccagatgaccaacatctggtgagtttgtaacttcaaactagttgatccagatgactcggaagcctccttcccagggacctgccaaacatggcccatgttacccagctctggcggctgcatctcagcagagtcgatgcagactaaccctaaagagtctcacttagcaggaggcaggcctaggccaagaggcacctggagtcttatgagagagaagctctcctggcaggagaacccagacacccagctcccaggagaagaggagagagaaaaaatgggaactgattttatggagccacatctccagggcgccaagccgagggctcaaatccatgattccctccttttatgcactcagcaaatattttcataatgcccactctgtgccagagatggcactggggatttggcaaagaacaagacggttccagcccctgccctgagggagcttgcattctaggtggagagaaaggatggcacccactcagcaagtgactgaggattgtaagttgggctgtgaagaagacattcaagatactctgagactaaatgacaggggacctggctaggccaaggcagggggaggtatctagtagtgctggatgaagagggaggaaagaactttccaggctaacagaag

SEQ ID NO: 94322 - DNA, 59344 bp, Homo sapiens
  misc_feature (1)...(59344): n = A,T,C or G
ttagccaggcatgttggtgtacctgtaatcatagctactcggtggcttgaggcaggagaatcccttgaacccaggaggccgagtttgcagtcagctgagattgcatctctgcaccctagcctgggcaacagagcgagagtccgtctcaaaaaaacaaaacaaaacaaaaaagatatttcagggaaacagcccacctcagaagcatcatgcagaaattcctcccattcatccaggtcaacccaaaacagctgaaaacctttttctccatttttcaggtgaagagatgcagagggtccaagaggatttcacagagttcacagaaaccagctcctcaagagacatcaagtcacccaagaatagacaagcaggatgatgcacgcagatcttccagatgcttccagatcttccagatgctcccagaagagctagagcagaggcaatgaggctgaatgtccgaggaatgtgctgtggactcttctcgtttttttatttttgtttttttgtttttgttgtgttttttgttttttgtttttgttgttgtgttttttgttttttgtttgtttgttcgtttgtttttgagacagagtcttgccctgttgccagactggagtgcagtggcatgatctcggctcactgcaacctcggcctcccacgttcaagcgattctcccgcctcagcctcccgagtaactgggattacaggtgcacgccaccacgcccagctaattttcatatttttagtagaaacggggtttcatcatgttggccaggctggtctcgaactcctgacctcgtgatccacctgccttggcctccccaagtgctgggattacaggcatgagcctgtttgtttgtttgtttgtttgttttgagacagagtctcgctctgtcgcccaggctggagtgcagtggccagatctcggctcactacaagctccgcccctccaggttaatgtatttttagtagagacggggtttcatcacgttggccaggctagtctcgaactcctgacctcatgatccacccgccttggcctccgcaagtgctgggattacaggcctgagccaccgcacccagcctttcttgtttatttattttttttaatgtatttattttttttgagacagagtctcgctctgttgcccaggctggagtgcagtggtgcgatctcggctcactgcaagctccgcccctccaggtttaagcaattctctgcctcagcctccggagtagctgggattacaggcgtgtgccaccacgcccagctaattttttgtatttttagtagacatggggtttcaccatcttggccaggctggtctcgaactcctgacctcgtgatccacctgcctcggcctccccaagtgctgggattacaggcgtgagccaccgtgcccagccccagaccttcttttaaagtgctcacctgattaggtcgggcctacctagaatactctcctgtttcatgatcttgaagtctgttgactagagagcttattgcatctggaaagttccagcacctttgctgcagcatcatgagactgatatctcagaatctttttatttgcctttcatgctcaattcatggaaatgatacagactgggtacacaacaaagactcatggctacctccccatgacaaaggattacggctgcagatatccgagaactttgtttttttatttctggggtacattcaggagagggatgttttgctccaaaatgctttaggaggccaagcattttccttaaaggttttccagattattataaccatcctttggtgcttgctggttctgaaggagtgaatatctccttctgaatttgctttgcaaataccttcagggaactagctgagtggcaaagtggtttcccaatttaacagctccccccgggaaacacacaccaatggtatgtaaagcagcagcagcgagaagaattttaaagagaaccccaaacgctttcgtgtccctaagaagaagaagaatgtacatgcaggcagcaaaggggtgtgtctcactgagaagcctgcttggggttcacagaatggtccccgtcctggggaccctggtgtgtttgttttctccttggtcaagtagagactcataatcatattaatattagcctttatggacatcatggctcacacaatgcaaacgcccccccaaatacccacaagccctcttcttccttcccctcccctcannnnnnnnnnnnnnnnnnnnnnnnnnnnnnnnnnnnnnnnnnnnnnnnnnnnnnnnnnnnnnnnnnnnnnnnnnnnnnnnnnnnnnnnnnnnnnnnnnnnnnnnnnnnnnnnnnnnnnnnnnnnnnnnnnnnnnnnnnnnnnnnnnnnnnnnnnnnnnnnnnnnnnnnnnnnnnnnnnnnnnnnnnnnnnnnnnnnnnnnnnnnnnnnnnnnnnnnnnnnnnnnnnnnnnnnnnnnnnnnnnnnnnnnnnnnnnnnnnnnnnnnnnnnnnnnnnnnnnnnnnnnnnnnnnnnnnnnnnnnnnnnnnnnnnnnnnnnnnnnnnnnnnnnnnnnnnnnnnnnnnnnnnnnnnnnnnnnnnnnnnnnnnnnnnnnnnnnnnnnnnnnnnnnnnnnnnnnnnnnnnnnnnnnnnnnnnnnnnnnnnnnnnnnnnnnnnnnnnnnnnnnnnnnnnnnnnnnnnnnnnnnnnnnnnnnnnnnnnnnnnnnnnnnnnnnnnnnnnnnnnnnnnnnnnnnnnnnnnnnnnnnnnnnnnnnnnnnnnnnnnnnnnnnnnnnnnnnnnnnnnnnnnnnnnnnnnnnnnnnnnnnnnnnnnnnnnnnnnnnnnnnnnnnnnnnnnnnnnnnnnnnnnnnnnnnnnnnnnnnnnnnnnnnnnnnnnnnnnnnnnnnnnnnnnnnnnnnnnnnnnnnnnnnnnnnnnnnnnnnnnnnnnnnnnnnnnnnnnnnnnnnnnnnnnnnnnnnnnnnnnnnnnnnnnnnnnnnnnnnnnnnnnnnnnnnnnnnnnnnnnnnnnnnnnnnnnnnnnnnnnnnnnnnnnnnnnnnnnnnnnnnnnnnnnnnnnnnnnnnnnnnnnnnnnnnnnnnnnnnnnnnnnnnnnnnnnnnnnnnnnnnnnnnnnnnnnnnnnnnnnnnnnnnnnnnnnnnnnnnnnnnnnnnnnnnnnnnnnnnnnnnnnnnnnnnnnnnnnnnnnnnnnnnnnnnnnnnnnnnnnnnnnnnnnnnnnnnnnnnnnnnnnnnnnnnnnnnnnnnnnnnnnnnnnnnnnnnnnnnnnnnnnnnnnnnnnnnnnnnnnnnnnnnnnnnnnnnnnnnnnnnnnnnnnnnnnnnnnnnnnnnnnnnnnnnnnnnnnnnnnnnnnnnnnnnnnnnnnnnnnnnnnnnnnnnnnnnnnnnnnnnnnnnnnnnnnnnnnnnnnnnnnnnnnnnnnnnnnnnnnnnnnnnnnnnnnnnnnnnnnnnnnnnnnnnnnnnnnnnnnnnnnnnnnnnnnnnnnnnnnnnnnnnnnnnnnnnnnnnnnnnnnnnnnnnnnnnnnnnnnnnnnnnnnnnnnnnnnnnnnnnnnnnnnnnnnnnnnnnnnnnnnnnnnnnnnnnnnnnnnnnnnnnnnnnnnnnnnnnnnnnnnnnnnnnnnnnnnnnnnnnnnnnnnnnnnnnnnnnnnnnnnnnnnnnnnnnnnnnnnnncccttcccctccattcccctcccttcccctcccctccccttcttttgagatggagtcttcctcttgtcatccaggctggagtgcaatggcgcaatcttggctcattgcgacctccacctcccgggttcaagcaattctcctgcctcagcctcctgaatagctgggattacaggtgcgcaccaccacgcccagctaatttttgtatttttagtaaagacagggtttcaccatgttggccacaattgtctcaaactcctgacctcaggtgatccacccgcctcggcttcccaaagtgctgggattacaggcatgagccactgtacccggcctaaatcacagacttttatgtctcacggttctggaggctgagagtccaagatcaatgagtgggaggttcagtgtctagtgaggacccgcttgctggttcacaggtggttccttctggctgtgtcctcacatggtggaaggggtgagagagctctctggggcctgtcttctaagagcacaaatcccactcatgacctaaccacctcctaaaagcaccacctctaatactcttgcagtgggaactgagtttgaacttgagttttggaaggacagaaacatggaaggcatagcaaccctcttacacagcccggcccctctgaagcctgcctgggttcacagaatgttccgtcttcctcaggcccctggtgtgttggctttctcctttgttgatagctgatgttgagcaatgcaagatttctgttctgattatctgaccctggatatccagtttggggacttgtgacatatttgggacgtcagaagcacgtacctctcacatagagcatggcatacttaataaacaataaattataataaaaaatgaataatgcattataaattatcattacttatttatttatttattggagacagagtctcgctctgttgcccaggatggagtgcagtggcgccatcttcgctcactgcaacctctgcctcctgggttcaagtgattctcgggcctgcctcagcctcctgagtagctgggactataggcacccacctccacacccggctagttttttgtctttttagtagagacggggtttcaccatgctggccaggctggtcttttttttgttttgttttgacatggagtctcgctctgtcaaccaggctggagtgcagtggcacggtctcactgcaagccccacctcccaggttcacgccattctcctgccacagcctcccgagtagctggtagctgggactacaggtgcccaccaccacgcccggctgattattttttgtattttagtaaagacggggtttcatcgtgttagccaggatggtctcgatctcctgacctcatcatccgcacatctcggcctcccaaagtgctgggattacaggcatgagccaccgggcccggccccaggctggtcttgaactcctgaccttgtgatctgcccgccttggccctccaaagtgctggcattacagacgtgagccaccgcacctggcctcatttattattttgtaatcacattataaattgtcatttattatttcataattacattataaatgatcatttcagaattacattatatattttcatttatttcataattacactatagattatcatttattattccacaattacgttataaattatgattatattatacaatagcatttgcttcataattacattagattatcatttatttttaaattacattatatttatttcataattacattataaattatcttataattagaaatgatcatttatttcatacttgcaatataaattattattaatttcataataccattgtaagttatcatttattatttcataattacattatgtaatggtatgcgttaataattattaatatacaattaataattattaaccattcaattaatagttaatgaactagcaatttatatgtaattctataattacgtcatagaatatgatatctaatttatacataaattatattattcaagtatattacccataatttgcaagtatagtatagaatcccgttataggatcctattacattttagaattttgttatatatatttgactctacaattggaatttagaccccacaccggcccccctcctgtttggcttaagggctatgaccacagaccctggcccaagtacctcccctggttacccgcaggcaggtggcaccatgggggcggggcggactcgcgcacgcgcagtgcaaaaggtcgggctcccggaagtccctcctcccgggggcggagccagggcaagaaggagaaacccggtgctgccgcgcggcctcttccgcgagcccgcgcgccggaagtggaaatgcgtcatagagggcgggcggcgacggcggtggcggcgtcggaggcgcctccgggggacggtggcggctcccggcggtgaggccgcgcctgtccggggatcgtcgagggacggcgggagcttgggccagcggcggcggcggcctgggacgcaggcggagccccgcgcaggtgagtgccgcccccgtgcctcccgggcctggctgcagccggcgaacgcttcgctcctagggccgggcccggggggccggggcttgggaggcggcgcctaggggtctcggaggtgacggggctggggttggggggcgtggggtgccaccggggggctgggagcgcctgaaactgtacgggggaatcgggggctggggaggtctgcggtcggggtccgggggtccctggaagtaggggtaggggctggagcggttcctgggactgcaccgaaggagctgaggcctggagcggtgtcggagggctgggagctcgggggatcggatgggcgggagactaggaggcctgggactaggggacgtggcgctgcggtcgctcctaggtctacagtgggaagcaaggggctgtccggggttttcggaggctggggcggtgctgtgtaggttggggtattggggctcatccaggagggtggtggggagcggggaactgaggagctgagggtgccgagtggccaagggcctgagaatgtgtggggccctgccaggggtgccagcggcagcctgaggccatgctggggggctgcggtaggtgggaataccaggggcaatgccgcgtactggggattgggcagccaggtgtaccggggtggtcggagggcgctggaggccagagtggggagggttcctcggtggtgaagttgctggggccgcttgggttctgggggagggttcactggtctctgtccagactggagcccctccctggtgccccactgaccttttctggtcgcttctccaccctccctcccttctttcgcacctcccacctcgggcttgggcgaggaggccgtctcctgggcctggcaggaagcctccaggttgatggggtgggcggccgggccggaggcggtcacctgagatggttgggtttctgcgagtgaagcttcctctacttggacttggccgtcaggaagtggctgcccgtcagctcagcagggaagaggtgggttaatgaaggtgggcggagaaagaaggcgcagacgggggactccggcccctaacttgtggaaagttcgttgtactttttggctttgagtgggttaaagctgggatacgtttggccttcgtggagattactagggttcatggttctggattgttgttgcagcccgagacttcctgttttatcagggcaagtacagggccgccgccccctccacaaaacctttccagatgcctgcagctgtgctctccctggccccttcccttccccagtgtctctctgccccttcccgtggagctaggcgtttgtagcgtccccgttcctacttgacctgtgtgaggggcctggtcgtgctcagcttcctattctgcaggccttgggagctgctggctgctggatgtagggtgtcgggcagtgctgaccgaggctttgacactaacctgttctttatcagctcggctctttcccctttggtgtactcttaatgatttcaaaaagtaaagaactccgttgagatggctgttaacaaagtggaaaccggtctctgacacggcagagagacactgctgtttctcttctccgggtccagaaagtgcctgctggcttggcccctcctcattggcgggggaggtggggggtgctggtgctgactgtctgcgtcttatgtttcaggcccarggtcccggaggctatggcagcggctaccatcgtgcacgacacgtctgaggccgtggagctctgccctgcttacggcttgtacctgaagcccatcaccaagatgaccatcagcgtggcactcccgcagctgaagcagccrgggaagtccatctccaactgggaggtgatggagaggctgaagggcatggtgcagaaccaccagttctccacgctgcgtatttccaagagcaccatggacttcatccgcttcgagggggaggtggagaacaagagcctggtcaagtcttttctggcctgcctggacggcaagaccatcaagctcagcggcttctccgacatcctgaaggtgcgcgcggccgagttcaagatcgacttccccacccgccacgactgggactccttcttccgcgacgccaaggacatgaacgagaccctgccgggggagcggccggacaccatccacctggaggggctgccctgcaagtggttcgccctgaaggagtcgggctccgagaagcccagcgaggacgtcctggtcaaggtgtttgagaagttcggggagatccggaatgtggacatccccatgctggacccctaccgggaggagatgacgggccgcaacttccacaccttcagtttcggggggcacttgaacttcgaggcctatgtgcagtaccgygagtacatgggcttcatccaggccatgagcgccctgcgcgggatgaaactcatgtacaagggcgaggacggcaaggccgtggcctgcaacatcaaggtgagtcctgggcaccgagagagccacgcgcttcctccctctggcgactttcttccagcagggtcagcagaacgctcccagccacacccctgaggctgtggggacctcccctaagtaaaatggcagcaacagtcctgtgcctgtccaatttcagaggcacaggcgtgaggtggagtaggggtcccgtgctgtggttttggaaatttggtatcttaaggaagatgtgggggagacacaggtcatatagtaggtgagggatggagcctcaggaactctgacagggatttgaaccgtgtcagaaccaagagaacccggccttcccagaatgcaccttgaaaccagggctgaacgttccctttagcctcatgtgcttttttattttttttattttttttatttttatttttttttcgaggcagagtctcgatctgtttcctggactggagtgcagtggcgcaatctttgctcagtgcatcctccgcctcctgggttcgagcgattcttctgcctcagcctcccgagtagctgggactacaggcgcgtgccatcacacctggctaatttttgtatttttagtagaaacagggttttgccgtattggccaggctggtctcgaactcctgacctcatgaactgcctgcctcgccctcccaaagtgctgggattacaggcgtgagccactgcgctcagcctagcctcgtgttttgaccgtgttggcttcacagtgacaaatgagccagcctcctggagggggttttgtggccttaagatgtgccctgtgggtgtgggcaggcggcctgctcagtgactgtggccacagggaatggtggagccgggtagcggaaggggagctgtgtctcgcagcggtggcgtgtcacttgtgttcagtaagtggcgagggctagttggtgttcctcgctgagtcgtaactccgtgggatgagctaagtcttgagccactgatggtgacttgaagggattggtttggcttctgggctccactgtctggtgagcggtgagcgggcgctcaggctctgaggccactcggccctacggcccaggagagggcgcctggccgtgtgtctggggggttttgggggaaggccatctgacactgtttttgcttttaaaggtttcttttgattcgaccaaacacctgagtgatgcctcaattaagaagcggcagctggagaggcagaagcttcaggaactggagcagcaaagagaagaacaaaagcgcagagagaaggaagcggaggagaggcagcgagcggaggaaaggtaccttctgcgggagcgggccctcggcgctggtgtccggcacctgggagtgtgcgcagacccgtgtgcgtgtgtctgcatgtattcctgtgcgtgtgtgtgtgcatgcatgcttgtgagcttgtgtgtgtacctgtgtgcattggacgcacgtgtgcctgtgaaccggtgtgtgtactttgtatgtcyctatgtgcgcccgagtgtgtgcctgagcatctgtgtgcacgtgtgcctgtgtgtgcgtgcatgtgtgtgagctcgtgtgtgtacctgtgtgtgtatgtgcacgtgtgcccacatgtgtgtgcttctgtatcggcacatagcacacatgtgcctgtgtgcatgcgtgtgtgcctgtgaacccgtgtgtgtacttgtgtgtgcacgtatgggtgtgtgtgcaggcctgtgggtgctcagctgtgcacrtgaggacctgcgtgagtggctrtttgagacgcagcagaatatgaatgtttctctttttcttgtcacacgtcgtggtctgacacgatctctgccggctcccaggaccgcgccttgcccgaagagccacctcttctccctccacatgctgttcacacctcccgctgaaacaagcagaatgccttggctgtttgcaagtttgcatttaggttgaggctacatttacaaaatgaagtagagggttgatggtgatggccagatttaaaaaaaaaaaaaaaaaacaaaaaaccaatgataggacaaaaacccggtttcacataagaggcctttaaagcaattgcctgggtcgttcactgtggttggggtaccagagacaacctcaggtcactctttgtagccccttttatcttcttagcattgcaggagggaaccaacaactttctgtgaatcccccctcccaccctccagtgaggcggaatcctcctcctcctactcctcttcgtcctccgtccctcccgctgtgtcctctgacgactttggtgcgtcctgcacgtctgttgcgcttcatgtcgccgatatcaagtctgggacgtgttggacttggctggggggctcctggacagcctctggtgggaccgagttggtccgttttgtttccatttctcactgctttatgtgacgctggtgccagcgtgttgatgtgtgtggctggtgatgtttgcacgagagtcccggcactgaactcctgggagcaggtccatcctgcccgtggtgttctttacgtagcccccgttgcctccccaggggagagtcgggttgtcagcctctgaatctgaaccccgagggctccttaggtgaggcaggtgcagtgtgtaagcgagtggccgtgaatgtgctgggggggcccatgtcagccgtcaggattcccaggacctaaggcaggcagcacagagaggcagacgccctgggagggagggacatgctgctgcgtcgccatcctgggaggcggtccctgggaggggcggttcggatgtggggttgagtccgggtcccctgtgtcagccgctgtcaggccgagcaggacagctggggtgggagacagtcctggggcgttacagggactcttccaggctgcagacacagcccaggcctggctgaatgtgcctgtccacattctggaagtgtggagtgggactcagagcctcggacctctcggtgtcgcaggagtgtccccgcaacatttcagaaagcagcttgcgggtgcggagaagaagctgcatccttgatctttccctgaggagagatggacgttggagtagtggagtgtgtctctgcagggaagggaccccgtctgcctggccagaccacagagggattgggggaagcggggccgggccatgaggttctcgagagcaggatggggtgtccagagccccggggaggggcaggcctgttgtctgggggagctggccaggagggctccacacgcagggccgtacttgtccccgctgtcccccactgtccttcctcagaggctgagcatgaggggaggcccagggcagcctcctgcatttctttctggtgggtggagatgaggcatgtttgcttgttcagccctcacgtgtaactttgagcttgatgagagctgtcctctgaaagctgcccagcctcgaggcgtcgctktgggtcccgcctaagggcgtgctgtgtgctgggctgccctgagccgccctccgagctcgtggggcggtgacagctcacagggcggttaaaccttcagcacatgaaactgcctgaggacctgcatgccccgcccggagaccgtgtggatcactgtctgggcgtcggcacctggcccggcccccttcttggggtggcagagcgtgggatgccttttctcccggcctgctcctccttgtccccgtgtctcctctcsccttggtgtctgcgtgggtctgtgtcaccccggcgggctttgtggcctcactaggcggttggcggcgcccacccgggcttcagaagtctccgcctccgtgtcgtgttccataggaacagctgcgacttgttcccatgtccggtgttggttgaaatgcatttgagagctgcggggcgggggaggctgagctagggaactccccactgtctcttgtggactctctctggggaccgcgcccctccccggccgcattcatcctcacttcctggacacccctctccacaggaaaagtgcaaggagctgagtggcgtggctgtggttggatttgtttagagagaggtccccccgtgccagtgctgtgtggtgccctcacaggagtcctgcacaacaaggagtcacccagcgcggttcctggtgggcagaaccggcgtcctccgcgccgctgtgcatcccggggccttgttgggcctgctggggttcctctttcacccgtccgtctgcccatccgtctttcccctgactgggggcgtggcttttgatgtggtcggtccagtggtcgttttcttcgtggtttcagggttgggtcacacttagcaggacggtgtgttggaaggtcacggaggtcctcgcccggctcactccttccacctctcgggctgcttkgagtcaaccgaggtccaccttgggataaagagttaaatgcttaatcgttggaccgtggcctgttccgccgtgtgtggaaagccgcttgtatggtgtgtggtgtgttggctgcggcgctctctgtgaccacccccggtgtgttccacacaggaaacaaaaggagctggaagagctggagcgagagaggaaaagagaagagaagcttcgcaagagggagcagaagcagagggaccgtgagctgcgccggaatcagaagaagctggagaagctgcaggcggaggagcagaagcagctgcaggagaagatcaagctggaggagcgcaagctgctgctggcccagaggaacctgcagtccatccggctcatcgccgagctgctcagcagagccaaggtacccgggggctccctctgcagccgccagccgcrcccgggctgccctcagtgccctcccctgaaatgcgggcgrcgtcacggcgccgtttccccgccggctgcagctgtagctacgaaaccagctttaatgccgaggatgacggctccttcccgggagggtgtagcgctcgtctgtcgttcccgatgatttcagagctgtgacggtttccttttgcaaagctggtgcattcaggttccccgagcaggctggcagcctcccgggggccagggcagaggctctctgtttcctttgggtcggggcagtggcagagagtgcagggggccgctccctctggcccgcgcctctgtgtgtggtcagctggcctggctgtgacctcaccagtggcccagagcagaggggcaaggtgggctggggggagggctgagcgcacagagggggcctgccgtgggcccgggtccctcctccgcagcgtgaacctgacaggtctcaccagcgccggtactgacgaccccctcagcaccaagagcctccctgctcctcctgcaggcgcgactggtaactcccatgagcccggggccagggcccacagacagacagacctccccaggacagacgtccccggcacgctccttgtcctcaggagggstgcgtccccctggagtccaacgcggggcgaccccataacctgttgtctgattacagttgtgataagtccccgggaaggagcatgacaagaggctgagacatgtggcagcccagtccttacctcatggtgaatattgaagacactaacccaggctaggccaggctcgccccgcagctacggcggtggcatgcgtctgcggcgtcatctcagctccctgttgctggcggccgcttgtgacctaaccgcaggcgcctgtgtgcaacgtggtggggctcccggcagggctcggctctgcccaagaggcccgccctggggctgcgccgagccgctttgccaaggggtttccttctcactcagacgcatgatggccccaggtgtggccgcgggagccgagggatggacgggctggacctggctcgccgtaggagacgccccccacccctgggctggagtccagccaggccgctgatcctgcatccccagaccatggggcctccaaacaccttcccagctcctgtcccacgtgtccggccaggctcaggaaccgggctcagctgcactttcctcttcccckcaggctgtgaagctacgggaacaggagcagaaggaggagaagctgaggctccagcagcaggaggagcggcggcggctgcaggaggccgagctgcggcgcgtggaggaggagaaggagcgcgcgctgggcctgcagcggaaagagcgggagctgcgcgagcggctgctgagcatcctgctgagcaagaagccggacgacagccacacacacgacgagctgggcgtggcacacgccgacctgctgcagcccgtcctggacatcctgcagaccgtgtcgtccggctgtgtgagcgccaccacrctgcaccccctcgggggccagcccccggccggtgcccccaaggagagcscggcccacccagaggccgacggcgctcccaraagcrtgaacgggagcgtggccgaggaggccccatgcaaggaggttcagagctcctgtcgtgtggtccccgaggatggctctccagagaagaggtgccygggcggcgtcctctcctgcattcctgacaacaaccaacagcccaagggcatccctgcctgcgagcagaatgtctccagaaaggacacccggtcagaacaggacaagtgcaaccgggagcccagcaagggccggggccgggccaccggagacgggcttgctgaccggcacaagcgggagaggagccgggccaggcgggccagcagcagggaggacgggaggccacgcaaggagcggcggccccacaagaagcacgcctacaaggatgacagcccccgccggcgcagcacgagcccggaccacacccggtcccggaggtcccacagcaaagacaggcaccggagggagcggagccgggagcggaggggcagcgccagcaggaagcacagycgccacygccgccgaagcgagcggtcgcgctcccggtccccgagcaggcaccgcagtacctggaacaggtaatgacgggcacggcctccccacggcctgtccgggaaagaccaggacctgctcgagcctcctggccgctccttggccgctctccgtccacccctgcaaagccaagacccttctgcagccacgaatgtccacggagcccgccggcaggaaggaagacaccatgctttagagatccatctttctccactcaccgcagcgtacttggcacttcagtttcaaacacgtagtcctttaaaacttgatccgatagctttaatgcggccggtcctctctcagtcaggaaaattgcacagaccgacagtcgtgaggatggcagagctgctgcattcccccacayggggatttctgtgtctgcttggcgacctccctgcgtgcacggcctaggaggtgcacgggccaccatagtcacactggcactgaaaagaaagcgttgccctggtgattctttcccccccgtttgtaatgttaactgatcaggaagtgcagtttgggtgggatgccgaatcgtcgtgctgacattgagtcacggatgaggaaggtacaagtcctttaagatcaaaactcaaacgggccgttctttctaaggtgtcggtatgtggggagtggtacaaaatggtctgatgctccttcaaaaacattcactttttacaacgtcaaggaattaagcataaaaaagattggttaaaagctttggtttctagtaaaggttagtgtgtgtggtttttttaagaagctgttttgctaaattatttttacttggaatgtttcaaacagatttcaggctgcaaacttgttttataatcgtttgcttctccaagtgaagctcagaaatacctaaaaatagctgtaacgttcgygttaggaaagatggtgtttattccagtttgcatttttatggtgaaataaaatccttttccaatgaactaaaatttttcacgcttacgatttttgtgtttttatgttccttggactgcattattcagctgaggctagccaagtgtgcgtgaaaccagtagagatcgttcgcttttcctagaactgctgattcaacgatgacatatcccacagctctcccgcagctgtacggtagtaaccttctgagaggagaatcctggctcttaagaggcatctgatttgtttgctgagaacataaacttagccaaattcccaaaaccaatcttttttaaagccaaggagctgtttttaaagcaaatttaaaagacggtcgttctttttttttttttgagccggagtctcgctctgtgacccaggctgsagtgcagtggcacgatctcagctcactgcragctccgcctcccgggttcacaccattctcctgcctcggcctcccgagtagctgggactataggcgcccgccaccgtgcccagccaatttttttgtattttttagtagagacrgggtttcacggtgtyagccaggatggtctcgatctcctgacctcgttatccgcccgccttggcctcccaaagtgttgggatkacaggcgtgagccaccgcgcccggccaaagacggttcttttccccgcctaaagtagtggtcgcaggtagcgtaggcactgcctgcttgacccagggtggaatagtctgttcctctgtttaattaaaacacaaacgttcttggggactggagggctggacacgtgcctgttgcacccccaagctcatatcactagcagacagatgagcgctacacacacacctttctctcaaacggctctgtctggcctgagaccaactgacaagatgcgtccagacacagagtgtttgcaaacacggnnnnnnnnnnnnnnnnnnnnnnnnnnnnnnnnnnnnnnnnnnnnnnnnnnnnnnnnnnnnnnnnnnnnnnnnnnnnnnnnnnnnnnnnnnnnnnnnnnnnnnnnnnnnnnnnnntgcatctggccgggcgcggcaattcaagcctgtcatcccagcactttgggaggccgaggcgggcagatcacgagatcaggagatcgagaccatcctggctaacacagtaaaaccccgtctctactaaaaatacaaattagccaggcgtggtggcgggcacctgtagtcccagctactcgggaggctgaggcaggagaatggcgtgaaccggggaggtggagcttacagtgagccgagatcgcgccactgcactccagcctgggcgacagagcgagactccatctcaaaaacaaacaaacaaacaacgttgctaggaccaggtgttgctctgggcacctgggatatggtgctggaaaagacagcactccctgcaacgctgaggaatgtgtagatacagggatgagaagtcccagtgatagcttctcgagagagctgtgtgcgcaagacagaagggtggacgtggtgtgtctgaggtcaagaagtgcatgtggccgggggaaggagtaggcagaagagaagcaggagaggtggacatggagctgatcgcactcatgaggctgacccactccagacttttgggacgagaagcaagaggggctgtaagctgggagtgtgatgagtgtggcggcttgaagtgctggtggactgggctaggggttgatgggagagaaggtggcagaaattgaatgcgtgttgccttgtgatatgttagatgtgggcagtctaggaaagctggagagcaccacccccaggcctatagaattgggtatctatggaagagatttaggaatctgaactccttttctctgttttctcttttgtctatcgctcgtgctctctctctctctccttccttccttccctccctccctccctttcttttccttttctttccttttctctttcttttttcctttccttccttccctctttcctatttctcttttattttttgagacgaattcaaaaattctaaaatttttgaatttttaagtagaggcagggtttcttcatgttggccaggctggtcttgaactcctgacctcaggagatccaccagcctcggcctctcaaagtgctgggattacaggcgtgagccaccgcgcccrgctgaaatttctcttctttgctstagaggtcagtagcagtaagtagcggctgataggtgagaatggagattaattgaagcaacgctgttactgattagattttgtctttacacttgagcctggaaggaagaaatggaagcattcgacccaaggaatgttgccccacagatttctggggggagcataggagattggtgtggtgcgtgccctgccctcctccctctctcaacccctgtcagtctctcccctgtttttccctgctggctcttctctcgcnnnnnnnnnnnnnnnnnnnnnnnnnnnnnnnnnnnnnnnnnnnnnnnnnnnnnnnnnnnnnnnnnnnnnnnnnnnnnnnnnnnnnnnnnnnnnnnnnnnnnnnnnnnnnnnnnnnnnnnnnnnnnnnnnnnnnnnnnnnnnnnnnnnnnnnnnnnnnnnnnnnnnnnnnnnnnnnnnnnnnnnnnnnnnnnnnnnnnnnnnnnnnnnnnnnnnnnnnnnnnnnnnnnnnnnnnnnnnnnnnnnnnnnnnnnnnnnnnnnnnnnnnnnnnnnnnnnnnnnnnnnnnnnnnnnnnnnnnnnnnnnnnnnnnnnnctggtcttgaactcctgacctcgtgatccacctgtcttggcctcccaaaatgctgggattataggcgtgagccaccgctcccggcctgtctctcctcctctcttaatccttccttctctcctctcgcccagcttcccctctgcttgccctctctccctatctctattttagtctctctttgtctctctcggtcttgtgatttagggcactttgtgttcagtccctttctagtgattgggattattatccacttaaaatatccacaataggccgggtgcagtggctcatccctgtaatcccagcacgtcgggaggtcgaggctggtggatctcctgaggtcagaagttcaagaccagcctgaccaacatggagaaaccctgtctctactaaaaatacaaaaattagccaggcgtgttgtcacatgcctatagtcgcagctactcagcaggctgaggcaggagaattacttgaacctggggggcggagattgcggtgagctgagatcgcaccattgcactccagcttgggcgacaagagtgaaactytgtctcacaaaaaataaaaaataaaaaawaaaaatccacaaggaatttcacttccatgtggcagaacagaaaacgaatggatttattgcaaaatacgagtgagaaagtgtgattctctcrttcatacccttttatgacacttagttctgaaccgatttgcctcgtgtcttcagttgggatctcaggatctctttcagccaaaaaaatcaaacttccctgttgagtatggcctgtgtcacggtgaccatcctgggctccttccgtttttttgttttttttcaagacagtctcgctccgtcgcccaggctggagtgcagtggcacaatctcggctctccacaacctccgcctcccgggttcaagtgattctcctgcctcagcctcccaagtagctgggattacaggtgtctgccaccacacctggctatttttttttttttwaatttttagtagagatggggtttcaccaggttgaccaggctggtctcaagctcctgacctcaggtgatccacctgcctcccaaagtgctgggaatataggcatcaaccaccgcacccagcctcaccaggtaaactttcaagttcaaaagtgcagcttggaattccagagggaaggaggatggggatacgggtacgtgtgaataaagcagcgctgtgtctacgattccactctctgtgctcacgtgaacacattactcagctcccactcagaagtgagaacacgctgcgtttgactttctgtgtctctgtgatttcaattaaagtaacggcctccagggtaacgaaactgcacttctatgccctaaatctataataatacatcaaggtaaaaaaaaaaaaaaatgggccaggtgcagtggctgacgcctgtnnnnnnnnnnnnnnnnnnnnnnnnnnnnnnnnnnnnnnnnnnnnnnnnnnnnnnnnnnnnnnnnnnnnnnnnnnnnnnnnnnnnnnnnnnnnnnnncaggagttccagaccagcccagccaacacggtgaaaccccatctctactaaaaatacaaaaattacctggacatggaggtgcgtgcctgtagtcccagctactcgggaggctgaggcaggagaatcgcttgaacccgggaggcggaggttgcagtgagccgagatcaccccactgcacaccagcctggatgacagagtgagattccatctcaaataaataaataaataaataaaatgtatttcaaaagtgccaatatgacatgaactgctgttaatttgttcacctgtattgttaaaatgggtgaatacggttaccagattgtgatcatgttcaaattccataggccgcagccttcgggatgaagcaaagagtttttgaaaaattacatattctatgtctaaaatggcaccatctgcatttttgaaaaattttagataatattacaaatgcgtaggttggctcatgcctgtaatcccagcactctgggaggccgaggcaggaggatagcttgagcccaggagtttgagaacagcctgggcaacatagcaagaccccatctctacaaagataattaatcaggcttggtggcaggcacctgtagtcccagctactcaggaggctgaggcaggaggattgactgagcccaggcattcgagaccagcctgggcaacatggtgagagcttgtctctagcaaacatacagaaactttaaagtttttaaastagctgggcgtggtggtgggtgcctgtggccccagctactcgggaggctgaggcaggaggatcgcttgaccccaggagttcaaggctgcagggagaaatgatggtgcccctgcactccagcctgagcgacagagtgagaccccatctctaaaagagagaccctctgtctctaaaaagaaaaacagaccgggcgcggtggctcacgcctgtaatcccagcacttcgggaggcccaggcgggcggatcacgagatcaggagatcgagaccatccttgctaacacggtgaaaccccgtctctactaaaaatacaaaaaaaattagccgggcgtggtggcgggcgcctgtggtcccagctactccggaggctgaggcaggagaatggtgtgaacccaggaggcggagcttgcagtgagaggcgattgtgccactgcactccagcctgggcgacagagcgagactccatctcaaaaaaagtaaaacagtaaagagtatagaaaaacatgcatgcatggggggtataggagaggtcccagccctcagccgtagccatggatgtccaggtggtgatgtgttgccctggcccgccccgcaggcctccagcatctccaacagcggcttcccaggggatgctgaagctgcggccggaccggcmagctcgggcaggggtgagcggagctgcatcacccaggcgtcccgtctgggacctcctcccatgcctccttcctgggcacctgcccctcctcactagctcatcctccttcccacctggtggaggacacgcacaccctcctggtggcgtcctcgagccccgtccacccgcccaggakctggggcatcctgtgtttcccgccttgctctcctgcacagcctgactcagagcgggagctcgaccccctaccctccccgctgtacgctgccccagcaaacctcccgagtttgcacccggccgctggatcggcctgcacaggggctgccgcctccgtcccagatagcaggggcttttccctgcaccccacctcactcagctcatgcctctgctcctggtgaaaaacttttcccatcactccgtcccgtcccctctctgcagcaaatgactcttgtccaggctgccagagaccactgaggcactcggtccggaagcccatctgtgccagggtcattgggaggtaaaggcaacaggctttacctctccaggccacccctgcgcctactccagctaagactccaggccacccctgaccctactccagccaagcctccaggtcacccctgcccctactccagccaagcctccaggtcacccctgtccctactccaggggctgagcgcggtggctcacgcctgtaatcccagcactttgggactccgagttgggcggatcacgaagtcaggagatcgagaccatcctggctaacacggtgaaatgccgtctctactaaaaatacaaaaacaaaattagccgagtgtggtggcrggtgcctgtagtcccagctactggggaggctgaggcaggagaatggcrtgaacccgggaggcggagcttgcagtgagccragatcacgccactgcactccagcctgggtgacagagygagactccgtctcaaaaaaaaaaaaaaaaagcaacagtatgttcccctgggagaacggagggggcggctgtttacagttgccccagggcaggacctgcacactggaccatccagggccagtcaccccacaggcatctcagactccacacatccccgccaaaccccagccctgggtcttctgcattctggggacatggggacaccacgctggtcggkagggtcccaggctcttctcaatctctctcgggcccctcctctcctgctgccgctgccscggtgagactcygaggcctgtaggaagcttcaggtgcctgagcctccagtacagcccttcccctactccasccaagcctccaggccacccctgtccctactgcagccaaatctccaggcygcccctgtcccctactcaaaccaagcctccagaccgcccctgtcctctactccagccaagcctccaggccgcccctgtcctctactccagccaagcctccaggctgcccgtgtcccctactccagccaagcctccaggccacccctgtccctactgcagccaaatctgccaggccgcccctgtcccctactcaaaccaagcctccagaccgccccctgtcctctactccagccaagcctccagaccgcccctgtcctctactccagccaagcctccagaccgcccctgtcctctactccagccaagcctccaggccgcccctgtcctctactccagccaagcctccaggccgcccctgtcctctactccagccaagcctccaggctgcctgtgtcccctactccagccaaagctccaggccgcccctgcccctactccagccaaagctccaggccacccctgtcccctactccacccaagcctccaggaggccctgtcacctactccagccaagcctccaggccagtccttcctttactccagccaaagctccaggccacccctgtcccctactccacccaagcctccaggaggccctgtcacctactccagccaagcctccaggccagtccttcctttactccagccaagcctccaggccacccctgtccctactgcagccaaacctccaggccgccgctgtcccctactcaaaccaagcctccaggccgcccctgctcctcctccagccaagcctccaggccagccctgtcccctgctccagccaagcgtccagatcgcccccgttcctactccagccaaacctccaggccactcctgcccctgtagcaggactagccgcggataaaacccctcagacaccaggtttaggaaggttttggctttattcggccggaagcgttggcggactcacgtctcgagaaccgggctctccgaagacagagttcctggccctttgaaaggcttacaactctaaggggttccacgtgaaagggttctgatagattgagagcacgtgtggttagagtcgggggttaatgttttaacctcaggcctggtcaggggtgccggctggtcttgccactgacttcattcctgttgtttttcaacttttacttcctccttctcttcagagacaggagatagtaaaataaatggcctctctccccaccccgactccagccaagcctccaggccacccctgaccctactccagccaaacctccaggcctcccctgcccctactccagccaagcccccaggtcactcctactccagccaaacctccaggccacccctgcccctactccagctaagactccaggccacccctgaccctactccagccaaaacttcagcccgtcccactcacccaagttatacaaaagctcctgggctttccggccaactctgtgtcccaaacatcccatccccaaaatggcagcttctgactgtgtccagaccatgcaggcctctcctgaaaccgtcctgccagacsctgtctcaaggtggtgagrggktccgtgcaatgtccctgagggcttttaaagccaccctgtctcctgtccatcggccccctcccctcctctccctctgtctttccagatgctccacccatgcagggttgttgtctcttctttgaacagccyggacgcactgccgctaccccacggcctccgcacctgctgttccctctggcagagacggtctttcctgggagcacccacccrgtccctcctgcctcggatttcaaagacttccaaaaccaccttcaccccaaaatccagctytccctcccctccccttctgtccacacccccaaatcaccttctaacatcttcatctttttttttctttgttttgagatggagtctccttctgtcgcccaggctggagtgcagcggcgcgatctcggctcactgcaaccgccacctcccgggttcaagcgattctcctgcctcagcctcccaagttgctaggataacaggcatgcactgccacgcccagctaattttttgtatttgtagaagagatggggtttcaccatgttggcaggctggtctcaaactgctgacctcaaatgatccacctgtcttcgcctcccaaactgcccggatgacacatgtgagccaccacacctggcccagatctgatggttttataaatgggaggtcccctgctgcacacgccctctggcctgtcaccaggtaagacatgcctttgcttctccttggctttcctgccatgagtgtgatatgtatttatcagcaacatgaaaatggactaatacaatatgcttgtcagccacgtgtgtgtctttttttggagaagtgtctgttggccgggcgcggtggctcacgcctgtcatcccagcactttgggaggccgaggcgggtggatcacgaggtcaagagatcgagaccatcctggctaacatggtgaaaccccgtctctactaaagatacaaaaaattagccaggtgtggtggtgggcgcctgtagtcccagctactcgggaggctgaggcaggagaatctcttgaacccgggaagcggagcttgcagtgagctgagatcgtgccactgcactccagcctggtgacagagcgagattccatctcaaaaaaaaaaaattacccaaaattacgcagtctcagatatgtctttatcagcagcatgaaaacggactaatacaatatgcttgttggccacgtgtgtgtcatctttggaaaagtgcctgttggctgggttcagtggctcatgcctattatcccagcactttgggaggctgaggcagacggatcacctgaggtcaggagttcgagatcatcctggccaatatagtgaaaccctgtctctacgaaaaatacaaaaattagccaggtatggtggcaggtgcttgtaatcccagctactcgggaggctgaggcagaagaatcgcttgaacctggaaggtggaggttacagtgagccaagattacaccactgcactccagcctggtgacaaagcgagactctgtctcaaaaggaaaaagaagaaaaaagaaaaagtgtccgttcatgtcctttgtaagactccactctctagtaaccgtgttcctgcccttctcaattcctaaggtaatcgccttaactcagatccctgagaaatccccacagcaggcagagatttggtctcctgacagtagctttgggattccattaagcaaatatgattgggggccagccccttctgtctccaggtaaggtgtccccaaggacccttcatcgctctgaacttcaaggatttctctctttttctttcttgctttccttctttctttctttccttctttcttccttcttttctttttcttccttcctttctttcttcctttctttttctttctttctttccttctttttcttccttccttcctccctcccttccttctttctttctttctgtatctctctctctctttctttcctttctttccatttctgtctctctctcttctttcttttctcttctttctttctttctttctttctctctctctctctctcctctcctctttctctctctctgtttctctctttctttctttctttttgatacagacctcactgtgttgcccaggctggagtgcaatggcccaatctcggctcactgcaatctctcccttccaggttcaagtgattctcctgcctcagcctcccaagtagctgggatgacaggcacctgccaccatgcccggctaatttttgtatttttagtagagacggggtttcaccatgttgaccaggctgatcttgaactcctgacctcaagtgatcctcgcacctcagcctcccaaagtgctgggattacagacatgagccaccttacctggctaatttttatatttttagtagagtcggggttacaccgtgttagccaggctggtctcgatctcctgacctcatgtgatctgccccacattgctgggatgacaggctgtgtttatatttttcccctagaaaatcactctggaggctgggagtggtggcttacgcctgtgatcccagcaatttgggaggccgaggtannnnnnnnnnnnnnnnnnnnccaacatggagaaaccccgtatctactaaaaatacaaaattagccgggcgtggtggtgggtgcctgtaatctcaactactgggagcctgagacagaagaaycacttgaacctgggaggcagaggttgcggcgagacatgcatcctcagaaatgggrtagagacctggcacggtcacttttttttttttttgagacagattctcgctctgtcgcccaggctggagtgcagtggcgcgatcttggctcactgcaacctcagcctcccgggttcacacccattctcttgcctcagcctcccragtagctgggactacaggcacccgccaccacgcccagctaattttttgtatttttagtagagactgggtttcactgtgttagccaggatkgtctcgatctcctgaccttgtgatccgcctgccccggcctcccaaagtgctgggatgacaggctaccacgcccagccctggcacggtcacattttaattatgtgcaggcatttagattgtccaaataaacgttgcaagatatctaggctgaagtgggaggatctcttgaagtcaggagttcaagaccagcctgggcaacatagtgagacaccccccccccaccccgatctctacaaagaattaaaaaattagtcaggcacattggctcatgcctgtcttcccagcactttkggaggccgaggtgggtggatcaycttaggtcaggagttggagaccagcctggccaacatggtgaaaccctgtctctactacaaatacaaaaattagccaggtgtggtggtgtgtgcctatagtcccagccactcgagaggctgaggcaggagaatcgcttgaacccaggaggcagaggttgcagtgagctgagatggtgccaccgcactccagcctgacgacagagcgagactccatctaaaaaaaaaaaaaaggggtctcactatgttgcccaggctggcctgctggcatcttgatgttgaacttccagcctccagaagtgtgagagaactggtttcttgagccacccagtttgcagaaattcgcacgacccccagaaatgaatgcaggacctgctcaatccataagacgattaatgagtgctaatgatgggtragcatattggtttgggatcagttctacagctgatgagtcaagggctcgggggggcctgatgcagactattttagggctgcggaggggcgcccagaaagccagggaatcsccacacgctttgtgatcccctaatacggttaatgcaaatttctagagtgatccgtctttgtttgagtactgggcaggcagcagggagagtcaggcagcagcygtgagcgggtggctcttccccaccttgccagcaggctctgtgctccttgaagcaagcgctccagaggctccggaagccacggctggattggagacaagatgggatcctcagaggaccaggcctatcgcctccttaatgactacgccaacggcttcatggtgtcccaggtaggatacgctctgtgggacaagggggaatagacttccgttcatcacactcacgttccattgttgtgtcagtcgagaaaaatgatgagtctccatcattttaggaggtttattttccaccgtgaaagacgtacacccacgatgtagcctcaggagttcctgaggacatgtgcccagggtggtctggggacagcttggtttgatacattttacagagacatgagacatcaatcaatgtatgtaagtacattgggccagtygtggtggctcacacctgtgatcccagcactttgggaggctgaggcgggcggatcacctgaggtcgggagttcgagaccagcctgacccacacagagaaaccccatctctactaaaaatacaaaattagccaggcttggtggtacatgcctataatcccagctacttgggaggctgaggcaggagaatcgcttgaacctgggaggcggaggttgcagtgagccgagatcgcaccactgcactcccgcctgggggacacagcaagactctgtgtcaaaaaaaaaccaaacaaacaacaaaaaaaaagaaacaaagcttaaaatgaaatacataggattagaaacaagacaatgtttattgaactgcaagtgttgaaatttttaaaacatttcatgatagagtagtatatgtggttgtttattaacccagtaaataattacactgtgcgtttatcatagaggtgagttttgagggttcacccgtagaggagcaacacctcattccttttttttatttttctgagctggagtctcactctgtaacccaggctggagtgcagtggcacggtcttggctcactgcaacctccgcctccagggttcaggctattctcctgcttcagcctcccgagtatctgggattacaggnnnnnnnnnnnnnnnnnnnnnnnnnnnnnnnnnnnnnnnnnnnnnnnnnnnnnnnnnnnnnnnnnnnnnnnnnnnnnnnnnnnnnnnnnnnnnnnnnnnnnnnnnnnnnnnnnnnnnnnnnnnnnnnnnnnnnnnnnnnnnnnnnnnnnnnnnnnnnnnnnnnnnnnnnnnnnnnnnnnnnnnnnnnnnnnnnnnnnnnnnnnnnnnnnnnnnnnnnnnnnnnnnnnnnnnnnnnnnnnnnnnnnnnnnnnnnnnnnnnnnnnnnnnnnnnnnnnnnnnnnnnnnnnnnnnnnnnnnnnnnnnnnnnnnnnnnnnnnnnnnnnnnnnnnnnnnnnnnnnnnnaatgtactaagtgcccctgaattatgcttgaaaagggttaatgatggccgggctcagcggtgacacctgtcatcccaacggtttgggggtccgaaacgagggaatcgctttagcccaggaattcgagaccagtctgggcaacatagtgagaccccccatttctacaaattcttttttctttttgagacagagtctcgctctgtcgcccaggctggagtgcaatggcacgatctcggctcactgcaagctccacctcccaggttcacgccattctcctgcctcagcctcccgagtagctgggattacaggcrcccgccaccacgcccggctaattttttgtatttttagtagagacggggtttcaccgtgttagccaggatggtctcgatctcctgacctcatgatccgcccgcctcggcctcccaaagtgctgggattacaggcgtgagccactgtgcctggccaaaaatattttaaaaattagccaggtggggtggtgcacacctgtagtcccagctactcaggaggctgaggcgggaggatcgcttaagcctaggagatgaaggctgcagtgagctatgattgcaccactgcactccagcctggatgacagagcaatactgagtctctttaaaaaataaacggcagggcgcggtggctcatgcctgtcatcccagcactttttggggtccaaggtgggcggatcacttgaggtcaggagttcaagaccagcctggccaacatggtgaaaccccgtctctactagaagtataaaaattagccaggcatgatggtgggcacctgtcatcccatttactcgggaggctgaggcaggagaattgcttgaacccggaggaggtagaggttgcagtgagccgagattatgccactgcactccagcctgggtgtcgcagtgagactctgtctcagaacaaaaaccaaaaaccagcatcatcgtgaaagggggtcgtgtgctgacgatattttgagatgtctgcagcagctctcgtgtgacttgaaaatatctgtggtttctctccgtcagcaagccaccggttttttttgtttgtttttttcctttttttttttcagacagagtttccctcttgtcgcccaggctggagcgcagtggcgctatctcggctcactgcaacctctgcctcccgggttcaagcgattctcctgcctcagcctcccgagtagctgggagtacaggcgcgttccaacacgcccagataattttgtatttttagtagagatggggtttctctatgttggtcaggctggtctcgaactcccaacctcaggtgatcctcctggcccccacactttcttctatcatggctgtggtttgccagtacgctcatggttgaagggaacaccacatcttaggaagaggtagtgaaaattagagtgaagtctcttctccytcctggtttgtagagcccgtgaattttacctctaggcccccaagggttaaaaatacctattccccagccactgatacgcagagcggcctccgcctacggggttcaagcgattctcctgcctcagcctcctgagtacctgggattacaggtgcctgccaccaagcctggctaacttttatttttatttttatttttatttatttttctgatatggagtttcactgttgttgcccaggctggagtgcagtggcatgatctcagctcactgcaacctctccctcccaggttcaagcaattcccctgccttagcctcctgagtagctgggatttcaggcgtccaccaccacgcccggctaatttttgtatttttggcagagacggggtttcatcatgttggccaggctggtgtcgaactcctgacctcgggcgatctgcctgcctcggccttccaaagtgctaggattacaggtgtgagctactgcctctggctaattttttgtagttttggtagagatgaggtttcatcatgttggccaggctggtcttgaactcctgaccttgggcaatctgcctgcctcagcctcccaaagtgctaggatgacgggcgtgagccactgacatccagctaattttttgtatttttggtagagacggggtttcatcatgttgtccaggctggtctcgaactcctgacctcgggtgatctgcctgcctcggcctcccaaagtgctaggattataggcatgagccaacatgtctggctaatttttctattttttagtaaaggtgggatttctgttactgtcccagacaacagtaacttgctacctttgcctcctttgaccgcaggcctcctgctggggctattgactgctcattcaaagactgtcgctggttcacagcggtgttcagggaggtggtctggtgggttctaaatcttggaagagcagtcactttaaggcacatgataccatgtcatgggagttgtcagaagtttcacagaaccagagttaatgcagagttaataccaccttaagaggatcaaacttagtacacccttaacagaaacaattagctaatgcagctttcatagaccaagagtgaatatcgccttaagaagataacatttagtatacccttggccaggcacagtggctcacgcctgtaatcccagcactttgggaggccgaggcgggcggatcacaaggtcaggagttcgagaccagcctggccaatatggtgaaatcccatctctactaaaaatacaaaaattacctgggcgtggtggcgggcacctgtagtaccagctacttgggaggctgaggcacgagaatggcgtgaacccgggaggtggaggttgcagtgagccgagatcacgccactgcactccagccttgggggcagagcgggaccctgtctcaaaaaaaaaaaaaaaaagtgggggctggggagggagagcactaggacaaatacctaatgtaggtgacgggttgacaggtgcagcaaaccaccatggcacatgtatacctgtgcaacaaacctgcacgttctgcacatgtaccccagaacttaaagtataataataataataataataataataataataataaaaagtctttgggagcagaaaaaaaaaaagatcaaagttagcgtacccttaacagaaacagttaatgcacctttcatagaccaagggtgaactcagccataagaaggtaacatttaatatatgcccttaaaagaacaattaattgagacaaccccaaaaggaatgaatacaactttaatgaataaaacaaaacagaacgctaatttaaaaaggttaatacgggccgggcgtggtggctcatgcctgtaatctgagcactttgggaggccgaggaaggtggatcaggaggtcaggagattgagaccatcctggctaacacggtgaaaccccgtctctactaaaaatattttaaaaattagccgggcgtggtggtgggcgcctgtagtttcagctactcgggagactgaggcaggagaatcccttgaacccgggaggcggagcttgctgtgagccgagatcgcaccactgcactccagcctgggtgacagagccagactccgtctcaaaataaataaataaataaataaataaaaaagaaaaaggttaatacaacattaaagaacaagaattaatatagctgttttttttttttttttttttttgagacctagtctcactctgttgcccaggctggagggcannnnnnnnnnnnnnnnnnnnnnnnnnnnnntcagctcactgcaacctccgcctcccgggttcaggcgattctcctgcctcagcctcccgaataggtgggattacaggcgtgcaccaccatgcctactttttgtatttttagtagagacggggtttcactatgttggccaggctggtgtcgaactcttgacctcaagtgatctgcctgccttggcctcccaaagtgctgggatgacaggtgtgagccactgcacctggcctaatatagctttaatagaaaaggagctaatacaagcttagaataataaactttatgcagacttactgaaacaaacagtcaatgcaaccttaaccaaacaggaattgataacagtttaataaaaaagctaataccacttgaatagaatatatcttactacaaccttcataagaaaaacaactaatacactttgggagaccgaggcaggcagatcacgaggtcaggagatcgagaccatggtgaaaccccgcctctactaaaaatacaaaaaaattagcctggcattgtggcgggcacctgtagtcccagctagtcgggaggctgaggcaggagaatggcttgaacctgggaggtggaggttgccgtgaggcgtgatcgtgccactgcactccagcctggcgacagagcgagactctgtctcaaaaaaataatgataataataataaacaaataaagataccaaaaaaaaaatacaaaaatttagccgggtgtggtggcacgtgcctgtaatcacagctactcgggaggctggggcaagagaatcacttgaacgcgggaggcgtaggttgcmgtgagccgagattgcaccgctgcactccagcctgggtgacagagcgagactccgtctcaaaaaaaagaacaaacaaaaagatagtggtaggtgtaatctgtgtttctttccccatgctgttgaaataaagctaactgtaagtatcctggaagacacgtggcctgaagaaaccatctttccctgtggtttgtttatgacttcctgtcactaaggttgcctgagccttggcacccatccaaaacgatgtgtgcaagaaaagaaatgcatggatgatttattcttgttttattttttttttgagatggagtctcgctctgttgcccaggctggagtgcagtggcgcgatcttggctcactgcaatctccacctccaggattcaagcaattctcctgcctcaccctccccagtagctgggactacaggctcacaccaccatgcccagctaatttttatacttttagtagagatggggtttcaccatgttggccaggttagccctgaactcctgacctcaggtgatccgcccacctcggcctcccagaatgttgggattacaggcgtgagctaccacgcctggctgatttattcattttttatagtttgtgtattatttgaaggcattacctgattactgctttattttatttttatatgtatttatttatttatctattgagacggagtttcgctcttgttgcccaggctggagtgcaatggcacgatctcggctcaccacaacctctgcctcccgggtgcaagtgattctcctgcctcagcctcccgagtagctgggattacaggcatgcaccaccacaccaggctaattttgtatttttagtagagatggggtttctccacgttggtcaggctggtcacgaactcacaacctcagttgctccacckgcctcggcctcccaaagtgctgggatgacaggcgtgagccaccgcacccggcctatttattttttttgagacggagtctcactctgtccagcccaggctggagtgcagtgatgcgatcttggctcactgcaacctctgcctcccgggtttacgccattctcctgcctcagcctcccgagtagctgggatacaggtgcgcaccaccatgcctggctaatttttgtatttttagtagagacggagtttcaccatgttggccaggctggtctcgaacccctgacctcaagtgatctaccctcctaggcctcccaaagtgctgggattacaggcgtgagccaccacgcccggtcctctgtatactgtttttgagacagagtcttactctgtcacccagnnnnnnnnnnnnnnnnnnnnnnnnnnnnnnnnnnnnnnnnnnnnnnnnnnnnnnnnnnnnnnnnnnnnnnnnnnnnnnnnnnnnnnnnnnnnnnnnnnnnnnnnnnnnnnnnnnnnnnnnnnnnnnnnnnnnnnnnnnnnnnnnnnnnnnnnnnnnnnnnnnnnnnnnnnnnnnnnnnnnnnnnnnnnnnnnnnnnnnnnnnnnnnnnnnnnnnnnnnnnnnnnnnnnnnnnnnnnnnnnnnnnnnnnnnnnnnnnnnnnnnnnnnnnnnnnnnnnnnnnnnnnnnnnnnnnnnnnnnnnnnnnnnnnnnnnnnnnnnnnnnnnnnnnnnnnnnnnnnnnnnnnnnnnnnnnnnnnnnnnnnnnnnnnnnnnnnnnnnnnnnnnnnnnnnnnnnnnnnnnnnnnnnnnnnnnnnnnnnnnnnnnnnnnnnntttactaaaaacactaaaattagacaggcatggtggaacaggcctgtaatcccagctactcgggaggctgaggcaggagaatggtgtgaagccgggaggcagaggttgcagtgagccgagaccgcaccactgccctccagcctgggtgatacagtgagacttcaactcaaaataaataaattaattaattaataaaaataaataaataaatatgactgttttccatagtggtgcaatctcatttgactctgtctcaaaaaaaaaaataaataaatgaataagaatataaataaaacaatgctttcctccccagcctgccatggtatggggtgtttctaagactgtggttcccaggaggctgagccctgaccttttatttccgctcctgctccaaggttctcttcgccgcctgcgagctgggcgtgtttgaccttctcgccgaggccccagggcccctggacgtggcggcagtggctgcaggtgtgagggccagcgcccatgggacagagctcctgctggacatctgtgtgtccctgaagctgctgaaagtggagacgaggggaggaaaaggtgaggacacgggcgttttgaaggaggcattttacatagacaccctctgcagcccacgtgttctgtaaaaagtgaaacagtctccatcctggctcacacagtgaaaccccgtctctactaaaaaaaatacaaaaaattagccgggtgtggtggcgtgcacctgtcatcccagctactcaggaggctgaggcaggagaatggcatgaacccgggaggcagaggttgcagtgagccgagatcgtgccactgcactccagtctgggcgacagagcgagactccatctgtatttgcaggtttgggggtcgtgtggtttttgtggcagctaccgacctctgccctggggacgtcaaagctgccagagtgtgagacccgggctgggggattccttgagcccaggagttcgagaccagcctgggccacgtatttttagtagagacaggatttcatcacgttggccaggctggtctcgagctcctgacctcaggtgatccaccagcctgggccacttatttttagtagagacaggatttcgtcacgttggccaggccggtctcgagctcctgacctcaggtgatccacccgcctcggcctccctaagcgctgagattacaggtgtgagccaccacgcccggcctcaataagttattttagacattctgtggaatgtaacgtacgtttcctctcgtggctcatctgcctttgtacttgctgcacccaaactcccgatggggatttgtacaaaccgaacccgacgggggtgctagccgccccaggtcacctttgcgccttccacagaaggctccagctgtacaaggcaagaggaagaccccatctctaaagaagagatgggcttgtaatcatgttgaaatcacgatgttgtcgagctggggagcgtccgccggcaggaactcggaatctcactgctttttccctgtttttttgtgtgtgtttcagctttctatcgaaacacagagctgtccagcgactacctgaccacggtcagcccgacgtcacaatgcagcatgctgaagtacatgggcaggaccagctaccggtgctggggccacctggcagacgccgtgaggtgggggctgcccccaggcagatgctgggaggtggtggctgcacccaggcagatgctgggaggtgggggctgcccccaggcagatgctgggaggtggtggctgaccccaggcagatgctgggaggtgggggctgaccccaggcagatgctgggaggtgggggctgcacccaggcagatgctgggaggtgggggctgcccccaggcagatgctgggaggtggtggctgcacccaggcagatgctgggaggtgggggctgcccccaggcagatgctgggaggtggtggctgcacccaggcagatgctgggaagtgnnnnnnnnnnnnnnnnnnnnnnnnnnnnnnnnnnnnnnnnnnnnnnnnnnnnnnnnnnnnnnnnnnnnnnnnnnnnnnnnnnnnnnnnnnnnnnnnnnnnnnnnnnnnnnnnnnnnnnnnnnnnnnnnnnnnnnnnnnnnnnnnnnnnnnnnnnnnnnnnnnnnnnnnnnnnnnnnnnnnnnnnnnnnnnnnnnnnnnnnnnnnnnnnnnnnnnnnnnnnnnnnnnnnnnnnnnnnnnnnnnnnnnnnnnnnnnnnnnnnnnnnnnnnnnnnnnnnnnnnnnnnnnnnnnnnnnnnnnnnnnnnnnnnnnnnnnnnnnnnnnnnnnnnnnnnnnnnnnnnnnnnnnnnnnnnnnnnnnnnnnnnnnnnnnnnnnnnnnnnnnnnnnnnnnnnnnnnnnnnnnnnnnnnnnnnnnnnnnnnnnnnnnnnnnnnnnnnnnnnnnnnnnnnnnnnnnnnnnnnnnnnnnnnnnnnnnnnnnnnnnnnnnnnnnnnnnnnnnnnnnnnnnnnnnnnnnnnnnnnnnnnnnnnnnnnnnnnnnnnnnnnnnnnnnnnnnnnnnnnnnnnnnnnnnnnnnnnnnnnnnnnnnnnnnnnnnnnnnnnnnnnnnnnnnnnnnnnnnnnnnnnnnnnnnnnnnnnnnnnnnnnnnnnnnnnnnnnnnnnnnnnnnnnnnnnnnnnnnnnnnnnnnnnnnnnnnnnnnnnnnnnnnnnnnnnnnnnnnnnnnnnnnnnnnnnnnnnnnnnnnnnnnnnnnnnnnnnnnnnnnnnnnnnnnnnnnnnnnnnnnnnnnnnnnnnnnnnnnnnnnnnnnnnnnnnnnnnnnnnnnnnnnnnnnnnnnnnnnnnnnnnnnnnnnnnnnnnnnnnnnnnnnnnnnnnnnnnnnnnnnnnnnnnnnnnnnnnnnnnnnnnnnnnnnnnnnnnnnnnnnnnnnnnnnnnnnnnnnnnnnnnnnnnnnnnnnnnnnnnnnnnnnnnnnnnnnnnnnnnnnnnnnnnnnnnnnnnnnnnnnnnnnnnnnnnnnnnnnnnnnnnnnnnnnnnnnnnnnnnnnnnnnnnnnnnnaaattagccgggcgtggtggcgggcgcctgtagtcccagctactcggagaggctgaggcaggaaaatggtgtgaacccgggaggcggaggttgcagtgagccaagatcgcaccactgcactccagcctgggcgacagagcgagactccatctcaaaaaaaaaaaaaaaaaaataggggtgtctgggttaacatagggggttgtggagaccaaattcttattatgtagatgaaatctccaggtagcaggcttcagaaagaatagactgttactgtttcctatctgacttggttctctcctggatcagaaaaaaggaaggaaaaggaaggtgattctctccagaacgtagattttctccacaacaggtagctttacaggagtatttcaagctatggtaaagagaacatgtttggggctaaaatatttttatttcctttttttttttttttttgagacagagttttgttttgttgcccaggctggagtgcagtggtatgatctcgactcactgcaacctccgcctcctgggtttaagtgattcacctgcctcagcctccccagtagctgggagtataggcatccaccacacctggctgattgtttgtgttttagtagagacggggtttcaccctgtctttgaggctggtctccaactcctgagctcaggctatctgcccccgtcttggcctcccagagtgttaggattataggtgtgagccaccacgcccagcctttgattttcttctttatctgtgatgggttgttatgccagagtcaggttggaaagtgagccacgtaatatagggttaaataaaacccatctcacgagactttatagttatagagcataactccctaggccccttagataagaatttgggcaaggaagaaaaaggtcacgtgtaacaattaagtcctcaggtttaaacaattaagcaacagctggccaggcgcggtggctcacgcctgtaatcccagcactttgagaggccgaggtgggtggatcacctgaggtcatgagtttgagaccagcctgaccaacatagtgaaaccccatctctactaaaaaatacaaaaatgagccaggcatggtggcrggtgcctgtcatcccagctactcgggaggttgaggcaggagaatcgcttgaacccaggaggtggagattgcagtgagccaagatcgcgccattgcactccagcctgggcgacacagcgagactccgtctcataaaataaaataaggccaggtgcggtggctcacgcctgtaatcccagcactttgggaggccaaggcgggcagatcacctgaggtcaggagttcgagaccagcctgaccaacatgatgaaaccccatctgtactaaaaagtacaaaaattagccaggcacggtggcaggtgcctgtaatcccagctactcgggaggctgaggtaggaaaatcgcttgaacccgggaggcggagattacagtgagccaagatcgtgccattgcactccagcctgggcgacacagcgagactccgtctcataaaataaaataaggccaggtgtggtggctcacacctgtaaccccaccactttgggaggccgaggcgggtggatcacctgaggtcacgagtttgagaccagcctgaccaacatggtgaaacctgtctccactaaaaatacaaaaattagctgggcgtggtggcgggcgcctatagtcccagctactcgggaggctgaggcaggagaatggcgtgaacccagaaggcagaggttgcagtgagccgagatcgtgccattgcactccagcctgggctacagagctgaaatgaaatgaaacgaaatgaaacgtaaatgaaatgaaatgaaatgaaatgaaaatcagccttctctctcttttcttagagaaggaaggaaccagtacctggagacgtttggcgttcccgctgaagagctttttacggccatctacaggtaacacccatcactttgaaaccaacaactcagataagattctgtttatttttaaaggacttaggaaacccaatccatttactcaaatggcacaacccaggaggaaggtgccatttaatttaaaataacatcccctatccccactactaccccagattttgctcatctgatgtttaaattgatcaaattcctgaggaggtgcaacgtgacccttccttcgaaaggactactcacaaactcagtgtttatgtagaaaatggaggcacgcgccgggcgcggtggctcacgcctatcatcccagaactttgggaggccgaggcaggtggatcacctgaggtcaggagttcgagaccagcctggccaacagggtgaaaccccgtctctactaaaaatacaaaaattagccgggcgtggtggcggacgcctgtaatcccagctagtcgggaggctgaggcaggagaactgcttgaacccgggaggcggaggttgcggtgatctgagatcgcaccactgcactccagcctgggcaacaagagtgaaactccatctcaaaaaagaaaagaaaagaatatagaggcccagtttttgatttggtcagaggtgaaggtgaggccaggtgagacctcagctcttcactttgctttgcgatgtggacgcagctttggcctttgcccgaagctcttacctagaattcccagatggaggtgaattgatgggcccgtccagtgttccagctggctgaggcatggagtagggaagggtatgaaggacaaggggatgcctgagtggttcgcctgccccccaacctctcctctcctcccctgctctcccctcccctctcttctccttctgtcctgttccctctcttttcctcttccatcctcctctctttctctccttttccttctcttctcttctctcctctcttttcctctccatcttccccctcctctctcccatcttccctctcttgtctcctctctcttcttccctctctcctttcctctcgcctcccttcccctcccttcacctgcctctctccttctcctctcccgtcttctttctctcatcttctctgttttcatgccccgtatttcacctccttttctcctcctctcttctcctcggtctgctttcctttcccccrtttctctctttctttytctctctctctttytttctttccttctttctccttccttccttcgttccttcctctttccttctgcctgccttccttccttccctccctccytyctttctttctttttctttcttccttcttccttctttcctttctttatatatatatatatgtgtgtatacatgtgtatgtgtatgtgaatatatgtatctgtttagggggcacaagtacccatgtcttccatgcttacatgttgcaccttgcagcctaggcttttagtgtgcccatcacctgaatagtgaccgtggtacctaagaggcaatttttcagccctcgctactctgaggcaaacccctacagcaggctctgcagagaggacaggaggasagagggagctgtggggggggaggagcaggaaatgcttccaacaccagagccctgtccgcctctgtgtccacctatccttcttggctccatctcacctgcctcccttcctagttcctgccttttctctagcctcttccccaggatgtgtggacctcccacccgcttcctggatttgtcctctggggctgagctctgtggatgggggaacgtattattgactttcctcttagaaaacatctaaactcctcttcagatagaaatcccttcccatccagagaacaatcgtccgttctgaatcaactccaggtttcccggagctgggtacactttgctggctgacctatggttcccccatcccgaatgacttcctgttccmtttcacaaatgcaagccttccaggtgcacctgtggggtatagctccgttctcaacagggggttatgtacacccttgctctgggcacgtccccagatcctcaccatcttgacaagcgtggttttgcatgccaggtccgagggcgagcggctacagttcatgcaagctctgcaggaggtctggagcgtcaacgggagaagcgtgctgaccgcctttgacctgtcagtgttcccacttatgtgtgaccttggtggtaagtacccctcaccactaatacctcggaggtgtggcttctgttctgtatggggaatgtgttattcatgtcttttattttctgcattctgatgctttgacatgtgcggccttactggtcttagaggaatcattcctcccagcactgggcacttcctagagtcagcaaacatctcctctgcgagcacacgtttctttttcttttctttttttaagatggaagcttgctccatcgcccaggctgcagcgcagtggcgtgatctcggctcactgcaacctttgcctcctgggttcaagcgattctcctgcctcagcctcccgagtagctgggattacaggcacctgccaccgcaccaggctaattttttttttttttttttttttttgagatgaagtgtcgctctgtcgcccaggctggagtgcagtggcacgatctcggctcaccgcaacctccgcctcctgggttcaagcgattctcctgccccagcctcccgagtaggtgggattatgggtgcgcaccactctgtcaggctaatttttgtattttttaatagagacggggttttgccatgttggccaggctggtctcgaactcctgacctcatgatccacccgcctcggtcttgtttttagtttttgagagagggtcctgtttgtcacccaggctcgagtgcaatggtgtgttgatagctcactgcagcctcagactctcaggctcaagtggtcctcccacctcagcctcccaagtagctgggattacagatgactgccgccacacctagctcatttaaaaacttttctgtagagcctgagtctctctacgttgccctggctggtctcagactcctgggctcatgcaatcctgctgcctcagcctccaaaagtgctgggattacaggcgcccgccaccacacccaggctgagctgagcttgttttatttatttatttatttatttatttatttacttgtatttatttatttttttttttttttgagatggagtcttgctctgtcacccaggctggaatgcagtggtgcaatctccactcactgcaagctctgcctcccgggttcacgccattctcctgcctcagcctcctgagtagctgggactacaggcgcccgccaccacgcccagctaattttttgttttttttttagtagagacggggtttctccgtgttagtcaggatggtctcgatctcctgacctcgtgatccacccgcctccgcctcccaaagtgccaggattgcaggcatgagccactgcgccgagctcattttcaaacttttttgtagagaacgagtctccctatgttgccctggctggtctcagactccagggtcatgcagtcctcctgcctcggcctcccagagtgagtgatgggattacaggcatgagccactgcacccaagctgagcttgctttttgaataccaatgcccaaccccgagctgaccccttaagcacctcctctaccccatatggctggcccactctagggcgtgatccacccaccctttgtgcgtggggtggctgtgggggtcactgagaacagtttcggggtgggggaaggcctgttgtcggagtggcgctgtgttcgtttctcgggtgggcttctgtgcggccgttggagctgggggacgctcgcccggctggggagggccgcggttcggcctgtgtcgttgtgtgccggggcgggcgttgctggcgggccgcgggcggggcgggggcccgcttgtgttgtgccggtcggtttcgcccttcagacgcgccgccccaacagccaaagaatannnnnnnnnnnnnnnnnnnnccatagggctgtcacactccaggccgtgatccacccaccctatctccctcctgtgactcagtggatcactcagaacagctcctggctggtagaaggccctttgcagagtgaggagcttctccaagtttattacttttagtcactgtgagcagggatagatagagttcaggatccccctgcctggggagcagcttgggaagaaaataatgaacaagcagaccgggcgcggtggctcactcctgtaatcccagcactttgggaggccgaggcgggtggatctcctgaggtcaggagttcgagatcagcctggtcaacatggtgaaaccccgtctctactaaaaatacaaaaaaaggctgggtgcggtggctcatgcctgtaatcccagcactttgggaggctgaggcgggcggatcccaaggtcaggagttcgagaccagcctgaccaacggggtgaaacccggtctctactaaaaatacaaaaacttagccaggcatgacagtaggtgcctgtcatcccaggtactcaggaggctgaggcaggagaatcgcttgtacccgggaagtgaaggttgcagtgagctgagatcgcgccactgcactccagcctggtgacagagtgagactccatctcaaaataaataaaaagactgactttctacagaaataatgnnnnnnnnnnnnnnnnnnnnnnnnnnnnnnnnnnnnnnnnnnnnnnnnnnnnnnnnnnnnnnnnnnnnnnnnnnnnnnnnnnnnnnnnnnnnnnnnnnnnnnnnnnnnnnnnnnnnnnnnnnnnnnnnnnnnnnnnnnnnnnnnnnnnnnnnnnnnnnnnnnnnnnnnnnnnnnnnnnnnnnnnnnnnnnnnnnnnnnnnnnnnnnnnnnnnnnnnnnnnnnnnnnnnnnnnnnnnnnnnnnnnnnnnnnnnnnnnnnnnnnnnnnnnnnnnnnnnnnnnnnnnnnnnnnnnnnnnnnnnnnnnnnnnnnnnnnnnnnnnnnnnnnnnnnnnnnnnnnnnnnnnnnnnnnnnnnnnnnnnnnnnnnnnnnnnnnnnnnnnnnnnnnnnnnnnnnnnnnnnnnnnnnnnnnnnnnnnnnnnnnnnnnnnnnnnnnnnnnncttgcagtgagcggaaatcgtgccactgcactccagcctgggcgacagagccagactctgtctcaaaaataaataaattaataaataaaaggatgcgttcatgtcctttgcagggacatggataaagctggaaaccatcattctcagcaaactatcgcaaggacagaaaaccaaacaccgcgtgttctcactcataggtgggaactgaacaatgagaccacgtggacacagggaggggaacgtcacacactggggcctgtcagggcctggggggctgggaggctgggggagggagagcactaggacaaatacctaatgtaaatgacgagtcgatgggtgcagcaaaccaccatggcacatggatacctatgtaacaaaaccgcatgttctgcacatgtaccctagaacttaaagtataataaaaagaaaaaaagaccagacatggcggaaggacccaagttcctgggttggacccttcatgagtccatggtgtgtggagggtgrgcgatgtctctcaggttcatctctgaggktcaaacgggctgtgtccccttccaggtggggctggagctctggctaaggaatgcatgtctctgtaccctggatgtaagatcaccgtttttgacatcccagaagtggtgtggacggcaaagcagcacttctcattccaggaggaagaacagattgacttccaggaaggtgtgtttgtgtccgtggggaagcagagatgtgtctcacggcttctccagggggactggatgtttctgggaaatgaagaagatgtgatgtggttttcctctcactcccggaaacaccctcaactcaacactgtctgttattcatgatggatggaaagctgggtgtagatatacagttttcttacaattattattattattattgatacagagtcttgctttgtcgcccaggctggagtgcagtggtgcagtctcggctcactgcaacctccacctcctgggttcaagcaattctcctgcctcagcctcccaagtagctgggattacaggcatgcgccaccacatccagctaattttttttttttttttgagatggagtctcactctcttgcccgggctggagtgtggtgacagatctcggctcccttcaagctccgcctcccgggttcacaccattctcctgcctcagcctcccaagtagctgggactacaggcacccaccaccacacctggctaatcttttatatttttagtagaggtggagtttcactgtgttagccaggatggtctcgatctcctgaccgcgtgatccgcccaccttggcctcccaaagtgctgggattacaggtgtgaaccatcacacccggcctctttttgtatttttagtagagatggggtttcaccgtgttgaccaggctggtctcaaactcctgacctcaggagatccacccgcctcggcctcccaaagtgctgggattacaggcgtgagccaccgcacccagccagtcatatcatttctgcagtgaagggtgtggccagggtctccacgactaccttcaggttcaataattcactagaaggacacaccgagctcagaagagccatcatacacatagttatatttacaacaatgaaagaatacagatgcatatcagcgaaggagaaaggagcatgggatagakttcgggagaaaccacatgtgagcttcttgttgtcttctcccagtggagctgtggacagcaatcaattcccccaacaacaaggtttgacaacacacaccactcactgccagcctggagagcctccgcaatccctgacatccaaggattttcttggagactggttacatagacatggcagacaccctgcatggctgactccaatcttcacctcttccagagttcccaaggtgatcctatagtaaatcccactgttagtacaaactatcctgggtggcccagagacccagctgaacaaagatacccttgtgaggtaggacattcttagagattacagttgccaattaagtgccaatcctctctttagaatgtggagggtttggacaacacaggcctgctgagttaacccccccccctttttttttcttgtttttttgagacggagtctcactctgtcacccaggctggagtgcagtggcgtgatccaagctcactgcaacctctgcctcccaggttcaagcaattttttgcctcagcctcctaagtagctgagattttacaggtgcctatcaccatgcctggctaattttttgtatttttagtagagacagggtttcactatctcggccaggctggttttgaattcctgacctcgtgatccacctgcctcggcctcccaaagtgctggggattacaggagtgagccaccgcgcctggcctgagttaactcttttttttttttttttgagatggagtctcgctctgtcacccaggctggagtgcagtggtgggatctcggctcactgcaagctccacctcccgggttcacaccattctcctgcctcagcctcccgagtagctgggactacaggcgcccaccaccacgcccagctaattttttttttttttttgtatttttggtagagatggggtttcaccgtgttagccaggatggtctcaatctcctgatctcgtgatctgccccgctcagactcccaaagtgctgggattacaggcgtgagccaccgcgcctggcctgaattaactcttcactgcacagagctcaccaagatctctcccaagattggcaccttatcattttgcgggaaaactatgacaagacttgagcgtttcacatcgcacacacataaagggtcagtcttgcgtatttactttaaatctggagaacaggtcttgactgtaggttcagttcagctcatcagttaggagctgctgaccgaattcccagggactcctggaatccacggctttgggtgatatcagcagcagtgcttttgcaggggacatcagaaagaaagaaagaaagaacatgggccgggcacagcagctcatgcctgtaatcccagcactttgggaggccgaggcgggcggatcacctcaggttgggggttcgagaccagcctcagcaacatggagaaatcccatctctactaaaaatacaaaaattagccgggcgtggtggcgggtgcctgtaatcccagctactcaggaggctgaggcaggagaatcgcttgaaaccaggaggtggaggttgcggtgagctgagatcaggcccttgcactccagcctgggcaacaagagcaaaactccatctcaaacaaacaaacaaacaaaaaaacaaaaaagaaaccatattatgatttttttttaaaggaggaggagagaaagaggccacacttattcagtattttctttctttttttttttttggagacagtctcgctgtcgcccaggctggagtgcaatggtgcaatctcggctcactgcaagctccgcctcccgggttcatgccattctcctgcctcagcctcccgagtagctgggaccacaggcacccgccatcacgcccggctaattttttttgtatttttagtagagacagggtttcaccgtgttagccaggatggtcttgatctcctgacctcgtgatctgcccacctccgcctcccaaagtgctaggattacaggcgtgagccaccgcgcccgacctcagtattttcttatctttctcctaagcctttttgttttctgaggctaggtctgcaggtgactagcctggaagacctgggaaaggcrtgacccatccaggtgaccttttgtgcccagaataggtttagtcaaatgggattggattgcaggctgacctcggtgtgcctgccctgtgttccaggggatttcttcaaagaccctcttccggaagctgatctgtacatcctggccagggtcctccatgactgggcagayggaaagtgctcacacctgctggagaggatctaccacacttgcaagccaggtaagttgtggggtttgcatttcagcgtgtgcttgtgacayggggcagaattgtacgagtcacatttagaaggcaggcactgaaatcatcccacaggtaagggtagacatcctgcccaatatggctttccttttagataacgacctgaaataaatagggtcctaatttctattctattgataaaaccacataaagatggaaaaagtgaaaggccctctgaaacttcagtggcctcactttggtgaaattctttcagaattaggctagtatttgtgtgtgtgatgaggacagtgccccactgacttctgaggtccacccatcctgatggttcatgaggatgtgggcacagcctctgtgtgtgatggggacagtgtcccagctctcctgtgaggtccatccatcctgatggcacatgaggatgtgggcacagcctctgtgtgtgatggggacagtgtcccagctctcctgtgaggtccatccatcctgatggcacatgaggatgtgggcacagcctctgtgtgtgatggggacagtgtcccagctctcctgtgaggtccacccatcctgatgcttcacgaggacgtgggcacagcctctgtgtatgatggggacagtgtcccagtgtcctgtgaggtccatccatcctgatggcacatgaggatgtggacacagcctctgtgtgtgtgatggggacagtgtcccagtgtcctgtgagatccatccctcctgatggttcatgaggatgtgggcacagcctctgtgtgtgagatagggaccatgtcccagctctcctgtgaggtccacccatcctgatgatccatgaggatgtggacacagcctctgtgtgtgtgatggggacagtgtcccagtgtcctgtgagatccatccctcctgatggttcatgaggatgtgggcacagcctctgtgtgtgagatagggaccatgtcccagctctcctgtgaggtccacccatcctgatgcttcatgaggacgtgggcacagcctctgtgtgtgatggggacagtgtcccagtgtcctgtgagatccatccatcctgatggttcatgaggatgtgggcacagcctctgtgtgtgagatagggaccatgtcccagctctcctgtgaggtccacccatcctgatgatccattaggatgtgggcacagcctctgtgtgtgagatagggaccatgtcccagtgtcctgtgaggtccacctatcctgatggtccatgaggacatggacacagccgctctgtgtgtgatggggacagtgtcccagctctcctgtgaggtccatccatcctgatggttcatgaggacgtgagcacagcctctgtgtgtgtgttggggacagtgtcccagttctcctgtgaggtccacccatcctgatggttcatgaggatgtgggcacagcctctgtgtgtgtgatggggacagtgtcccagtgtcctgtgaggtccacccatcctggtggtccatgagtacatggacacagcctctctgtgtgagatggggacagtgtcccagttctcctgtgaggtccacccatcctggtggtccatgagtacatggacacagcctctctgtgtgtgataaggacagtgttccagctctcctgtgaggtccacccatcttgatggttcatgaggacttgggcatggactctatgtgtgtgatggggacagtgtcccagtgtcctgtgaggtccacccatcctgatggtccatgaggatgtgggcacaacctctttgtgtgtgatggggacagtgtcccagtgtctgtgaggtccacccatccgatggttcatgaggacgtgggcacagcctctgtgtgtaatggggatagcatcccagtgtcctgtgaggtccatccatcctgatggcccatgaggatgtgggcacagcctctgtgtgtgtgtgtgtgatggggacggtgtcccagttctcctgtgaggtccacccatcctgatggtccatgaggacatgggcacagcctctctgtgtgtgataaggacagtgttccagctctcctgtgaggtccacccatcttgatggttcatgaggacttgggcacagcctctgtgtgtgtgatggggacagtgtcccagtgtcctgtgaggtccatacatcctgatggtccatgaggacatgggcacaacctctgtgtgtataatggggacagtgtcccagtgtcctgtgaggtccacccatcctgatggttcatgaggacgtgggctcagcctctgtgtgtaatgaggacagtgtcccagtgtcctgagaggtccatcgatcctgatggcccatgaggatgtgggcacagcctctgtgtgtgtgtgatggggacggtgtcccagttctcctgtgaggtccatccatcctgatggttcatgaggacatgggcacagcctctatgtgtgtgatggggacagtgtcccagcgtcctgtgaggttcacccatcctgatgatcgatgaggacgtgggcacagcctctgagtgtgtgatggggacggtgccctgactgtcctctgaggtctggctgtccttatggttcactgkgactttggcacagtctgtctgtgtgtttgtgtgtgatgtggactgtgcccctccctttctaggtggtggcattctggtaattgaaagcctcctggatgaagacaggcgaggtcctctgctcacgcagctctactctctgaacatgcttgtgcagacggaagggcaggagaggacccccacccactaccacatgctcctctcttctgctggcttcagagacttccagtttaagaaaacaggagccatttatgatgccattttagccaggaaataactgtttcttgtgacctggaactaacgtcaaagcacacaagacataataataaagacatgtacctccagtggcttcttgttcttggtgttcacatgataagtgactggaggcttctgtggacagggttggactgcttctactttgtagattatttcccaggctttactgaggaccacgctgatgggggtgtgagctcagctttgatattgactgtaagcaaagttttggtcctcttcatgctgtaaagtgggactccagtgttcaccttgaggggtgtctgttagaagcttcaccctgaacagaactttggcaccagtgatggatgtagcaactataggtgtctatgaaatatgaggttctcctttcaggctgccttgcacagctctgtgacttattagtgatgccatttcaaccgtgagaaaggtgaggctttctgtctctctctctctgcctcagacagtcccatctgtctctcctgtatggatctgtactcaaatctcttcatgtagccaccatgagagtgcgggcatttgccgccagattagatcacgccacatctgtggatacagagaaatcagcagatgctacagaagaggaaaatatttccctcctaccaatctcatacccatttctccctggacctcttccgcaatgtcaacaaggttttctacttcttgttttcctctagtgtacattttagattattttggtactttctttactctcagtctaaacattgtttttttcaactaaaaagatgagaaaacaaaacaaaatggaataatcgtcaaagcaagttgttgtgggttgaattctgttccccaaaagatatgtccaggctgtggcccctggaacctgtgaatggtatcttatttagaagtaagatctttgctgatgaaatcaagttcagatgaggtcattaggatgagcgctaaatccaatatgactgatgtgcttataagaaaacaagagacacagaaacgcacagaagagaggggagaatgccacatgaggacacagacacaggtgagaaggccacatggagacagaggcagagactagagtgatgcggccacaagcccagggacacctggagcccccaggaactgggagaggcaggaagagtcctcccctagagcctctggagggaatgtagctctgcaacatcttgatctcagaattctagtttgcagcactgggcaagtttattattattattattattattattattattattattattattttgagatggagtcttgctctgttgcccaggctggagtgcagtggcatgatctcggctcgctgcaagcgccacctcccaggttcacgccattctgcctcagcctcctgagtagctgggactacaggtgcccgccaccacacccagctaattttttgtatttttagtaaagacacggtttcaccatgttaggtggtcctaacaaactcatctacaagaaaggtaaggaatggtgtgcacatttcaaattttaagtttgaaaaagcacaagagaatctgcttctttttgcaatgtctaatctgtttaaaaggcatctttcacagagagtgtgatttgggaatatttgcagagttgcatgacaccttttaaaattagattaaacaggaagaaaagagactcagggacatcttaattctctgttgaggagttctcataaactaaacggtctaatttcaaaatgttcaagctgaagtttggaaatgaactctttcgaaaaacatgcttatgtcagttgctgggagttgcagctggtggtcatccccgagaacatgcattcaccacaagtccatggaggccttattcatgccaagagtagtggagtccagtccctcagagtgccctgtgtgccctgctgcaaataggaccttttcctgggtattcagtgatgcacaggcaactaattataggggaacgcttatttaataaggaatgaagattttatcttcttatttatttttcagagatgaagtcttgctctgtttcccaggctggagtacagtggtacagtgatagctcactgcagcctccaactcatgggctcaagcgattctcctgcctcagcctccctagtagctgggactacaggctcaactaatcgattttttttttttttttttttagagacaggatcttgctatgttgcccaggctgttctcaaactcctggtctcaagtgagtctcctgcctcagcctcccaaaatgctggaattactggcatgagtcactgcacctggcctatttgatctttctaattcttgccccatcaatgccctgtcaaatttcttcacccaagtaacagannnnnnnnnnnnnnnnnnnnnnnnnnnnnnnnnnnnnnnnnnnnnnnnnnnnnnnnnnnnnnnnnnnnnnnnnnnnnnnnnnnnnnnnnnnnnnnnnnnnnnnnnnnnnnnnnnnnnnnnnnnnnnnnnnnnnnnnnnnnnnnnnnnnnnnnnnnnnnnnnnnnnnnnnnnnnnnnnnnnnnnnnnnnnnnnnnnnnnnnnnnnnnnnnnnnnnnnnnnnnnnnnnnnnnnnnnnnnnnnnnnnnnnnnnnnnnnnnnnnnnnnnnnnnnnnnnnnnnnnnnnnnnnnnnnnnnnnnnnnnnnnnnnnnnnnnnnnnnnnnnnnnnnnnnnnnnnnnnnnnnnnnnnnnnnnnnnnnnnnnnnnnnnnnnnnnnnnnnnnnnnnnnnnnnnnnnnnnnnnnnnnnnnnnnnnnnnnnnnnnnnnnnnnnnnnnnnnnnnnnnnnnnnnnnnnnnnnnnnnnnnnnnnnnnnnnnnnnnnnnnnnnnnnnnnnnnnnnnnnnnnnnnnnnnnnnnnnnnnnnnnnnnnnnnnnnnnnnnnnnnnnnnnnnnnnnnnnnnnnnnnnnnnnnnnnnnnnnnnnnnnnnnnnnnnnnnnnnnnnnnnnnnnnnnnnnnnnnnnnnnnnnnnnnnnnnnnnnnnnnnnnnnnnnnnnnnnnnnnnnnnnnnnnnnnnnnnnnnnnnnnnnnnnnnnnnnnnnnnnnnnnnnnnnnnnnntttgttttttttttttgaggacagaatctcgctctgtcacccaggctggagtgcagtggcatgatctcgggtcactgcaagctccaccttcgggttcatgccattctcctgcctcagcctcccaagtagctgggactacaggtgcccaccaccacgcctggctaatttttttgtatttttagtagagacagggtttcattgtggtctcgatctcctgacctcatgatctgcccacctcagcctcccaaagtgctgggattacaggcatgagccactgcacccggccccaagcccctatcagctttaaagaaaacttcagtttttaaaactaagatcctgactttcctgcatggtgagtgctgagacattcctccctgatggctgctccatggaggaagggctagggtctgacttgggaactgcctccccttctgggcagagaggaggaccagagcaggcagggtcttccatccctactgaaggggttggaggtgggcaatggtctctgtccaggctgacccttttgatgctggagcctggctggttttccaagtccccatccatgtggtagacatggctatggtgggcattgttcattgccatcctgtcttcctttgtattcagagatcctcttagagacagccaaggagtctccattagaatttctggggtgggcatgccttgtgcttggctgggagccacctcatcagcaccactgtcctgcctctccattcaccatgagaacctcatgggctcctcttccaagttcaggagccagggggttctagaaggtgcccattataccatcactccccattggaccctctttgccccaggtcaagtaggcacagggagttttcttcctaaccagaaacttagcagagaaagacagctcctcttgtcttcttgtaggctcccctcaatctttatgagtggttttctgggatttctttctcttgtctgggaggagaccccagcttctctttcctgaggcagagcattcagacagatgctaattccttcccacccacccaaagttttttgtcacttatgccactgggctggggttactgggagtgggaaggtgtatatatttgggattttttttcccttttgtccttaaattccaagtcctggtgagttaatygaggacataatgtaccaaaatctattttttcctcctatttcttcctctccttccttcctcccttccttccttccttccctctttctttctctctctctttctttctttctttctttttttttttttttaacagagtctcgctgtctcccaagctggagtgcagtggtgtgatctcggctcactgcaagctccgcctcccaggttcacgcctttctcctgtctcagcctcctgagtagctgggactacaggcacctgccaccatgcccggctaattttttgcatttttagtagagacggggtttcaccatgttagccaggatggtctcaatctcctgacctcgtgatccacctgcctcagcctcccaaagtgctgggaatacaggcatgagccatcacgcccagattcactctttctttctttctttctttctttttctttctttctttctctttcttctttctttctttcttctttcttctctcttttgttctctcctttctttccttgtttctctttcctcctttacctctttcttctttttcttcctttcttccctttcatttctctctttctttctttcttcctttctttcctttctttcttttcttcctttctttctttctttcccctttctgattttctatctatctaatgctctaagtcgtaaaaagaagaaaaaacgtgagcatttgtcactgctttttcttcttgcagacagtttcattgggtggttgtatttggctgggtagtgacctgtagctattagtgacctgtagctgctgtaacaagttatcacaaatgtggtagctgaaaacaacacaaattaactgtcttgcagttatgaagaacagaaggctgaagtcagtttccctaggctaacataaaagtgttggcaggactgctttattctagaggctttggaggtgaatgcattttcttgccttgccagcttccagaagctgcctgctttccttggctcatggtcccttcctccacttgcaaaacccacacccacatcactccgggctctgcttccattgtcacctcttctataactttgatcctcttgcctccctctcataaggagccttctgatgacagatggccaacccagagaatccaggacagcccccctcttaggatcactaattaaaccacagttgccaagtgtgtttttccaggtgaggtcacatattcacaggttctagagactgggatgtggacagctttgggggatattattcctctaccatatggggagtgggatgtataaatctttggggccattattctgtctatcacatggggatttgggtgttgataacatttttagggtcattattctgtccaccacgtggggattaggatgtggacatctttgggggccattactccttctaccacatgggattgcaatgtagacatctttgggggccattttctgtctcccacatgggattaggatgtggacatctttggggccattattctgtctaccacatggggattaggatgtggacatctggctgggcgcagtggctcacgcctgtaatcccagcactttgggaggctgaggcaggtggatcacaaggtcaggagatggagaccatcctggctaacatggtgaaaccccatctctactaaaaatacaaaaaattggccaggcatggaggcgggcgcctgtagccccagctactagggaggctgaggcaggagaatgtcgtgaacccgggaggcagaggttgcagtgagccgagatcgcgccactgcactccagcctggtcgacagagcgagagtccatctcaaaataaataaataagtaaaataaaagcgtgtgtatacgttcatatatacagacggtttccagcttacagtggt

SEQ ID NO: 94323 - DNA, 19757 bp, Homo sapiens
  misc_feature (1)...(19757): n = A,T,C or G
nnnnnaactccaaaaattaaattctggccctcaaaccccacaacagtatttaattaacctcgccttcaaggtgtacaataatagaaaaaaagctgtaattccttacctccactgtgagacaaaccccagccacatctccagcacacaagaacttccaaatgcctgaaccgcagcggccaggcgttactccagaaccttctcccccaggagcttgctacaagtgccagaaatctgactaccaggccaaggaatgcctgcagcccaggattcctcctaagccgcgtcccatctgtgygggactccactggaaatcggactgtccaactcacctggcagccactcccagagcccctggaactctggcccaagcctctctgactgatcccttctcggcttagcggctgaagactgacgctgccttattgcctcggaagccccgtagaccatcacggacgccgagctttaggtaactctcacagtggaaagtaagttcatccccttcttaatcaatacggaggctccccactccacattaccttcttttcaagggcctgtttcccttgcctccataactgttgtgggtattgacggccaggcttctaaacctcttaaaactccccaagtcttgtgccaacttagacagaactcttttaagcactcctttttagttatccccacctgcccagttcccttattaggccgaaacactttaactaaattatctgcttccctgactattcctgggctacagccacaccgcattgtgaccttttcccccagttcaaagcccccttcacatcctcctcttgtatctccccaccttaatccgcaagtataggatacctctactccctccttgttgacctatcatgcaccccttaccatctgattaaaacctaatcacccttaccccactcaacgccaatatcccatcccacagcatgctttgaaaggattaaagcctgttatcactcgcctgctacagcatggccttttaaagcctataaactctccttacaattctcccattttacctgtcctaaaaccagacaagccttacaagttagttcaggatttgcctcttatcaacaaaattgttttgcctatccaccccatggtgccaaacacacatactctcctatcctcaatacctccctcaacaacccattattctgttctggatctcaaacttggtatctttactattcctttgctcctgtcatcccagcctctcttcactttcacttggactgaccctgacacccatcaggctcagcagattacctgggctgtactgccgcaaagcttcacagacagcccccattacttcagtcaagcccaaatttcatcctcatctgttacctatctcggcataattctcataaaaacacacgtgctctccctgctgatcgtgtctgattaatctcccaaacctcaatcccttacaaaacgacaactcctttccttcctaggcatggttagtgcggtcagaattcttacacaagggccaggaccgcaccctgtagcctttctgtgcaaacaacttgaccttactgttttagcctagccctcacgtctctgtgcagcggctgctgccgccctaatacttttagaggccctcaaaatcacaaactatgcacaactcactctctacatttctcataacttccaaaatctattttcttcctcacacctgatgcacttactttctgctccccggctccttcagctgtactcactctttgttaagtcccacaattaccattgttcctggcccagacttcagtccggcctcccacattattcctgatactacacctgacccccatgactgtatctctctgatccaactgacattcacctcatttccccatatttccttctttcctgttcctcaacctgatcactcttgatttattgacggcagctccaccaggcctaatcaccacacaccagcaaaggcaggctatgttatagtacaagccactagccctcctcttagaacctctcattttctttccatcgtggaaatctatcctcaaggaaataacttctcagtgttccatctgctattctactactcctcagggattattcaggctccctcccttccctacacatcaagctcagggatttgcccgcacccaggactggcaaattagttttactcaacgtaccccgagtcagataactaaagtacctcttaatctaagtagacactttcactggataagtacaggcctttcctacagggtctgagaaggccaccacagtcatttcttcccttctgtcagacataattcctcagtttagccttcccacctctatacagtctgacaacataccagcctttattagtcaaatcagccaagcagtttttcaggctcttagtattcagtgaaatctttatatcccttacagtcctcagtcttcaggaaaagtagaacagactaatggtcttttaaaaacacacctcaccaagctcagcctccaacttaaaaaggactggacaacacttttaccactttcccttctcagaagtcagagctgtcctcagaatgctacaaaatacagcccatttgagctcctgtatagacgctcctttttattggccccagtctcattccagacaccagaccaacttagactgtgccccaaaaaacttgtcatccctactatcttctgtctagtcaaactcctatttgccgttctcaactactcatacatgcccttctcttgtttacactgccggtttacactgtttctccaagtcatcacagctgatatctcctggtgctatccccaaactgccactcttaactcttgaagtaaataaacaatctctgctgacaggactatgctgaacctccttaggcactctctaattagatgtcctaggtcctcccaattcttagacctttaatatctgtttttctccttctcttattccatttagtttttcaattcatacaaaactgtatccaggacatcaccaataattctaaatgacaaatgtttcttctaacaaccccacaatatcaccccttaccacaaaatcttccttcagcttaatctctcccgctctaggttcccacgccgcccctaatcccgctcgaagcagccctgagaaacatcgcccattgtctctccataccacccccaaaaaatttcaccatcccaacactttaccactattttgttttatttttcttgttaatataagaagacaggaacgtcaggcctctgagcccaagctaagccatcatatcccctgtgacctgcacgtacacatccagatggccggttcctgccttaactgatgacattccaccacaaaagaagtgaaaatggcctgttcctgccttaactgatgacattgtcttgtgaaattccttctcctggctcatcctggctcaaaacctcccccactgagtacattgtgatccctactctgcccgccagagaacaacccccctttaactgtaattttcctttacctaccgaaatcctataaaacggccccacccctatctcccttcactgactctcttttcagactcagcctgcctgcccccatgtgaaataaacagctttattgctcacacaaagcctgtttggtggtctcttcacacggacgtgcatgaaactggagtcctcgcgcccaccagcccagagtgctctctagaggaaggttacagacccttcctggctcactcatccagacgttagctgtcttgctgaaactccttttttcacccttgaaaaccactggaagaatggccaagaacccagctatcctgagtaagttcacttaaagaagcaaaatctaacatgagtagcaaaatggacattggcaccaggagtgtgggtcagagtcctgccccttggaactacatcatcgcttgtacagtgtaccccccaggcaccaagagaccaggctgagacccttcagttgccctgggcctctggtcagtgcttcccgcctggcacacaggcaggccctcataaaacaatgagtactgaaagttccagccttcttggtgggttctcagcaccccgtcgtgagccacaccctaccccagggaaatcagggtcaccctgcttctacccctaggccagtgccccttctgaagtgcccaggctggcacccctatacttagatctcttcaacctcctcatgaaaaccttcttgtccgtcaccccagcattccccggactgtgctaaatgagcagctgaccacacgtcaaatcaattttcagagtttgcctttggtttaatattcatggcttatccaaaagatcttgtcaccatagctagatgaaaaaaatgacaaggctctggagaagcagagccacaagatggaagatacctgggtcccaggttcatgaggagaggagctgcctgctccacagactgtcacgtgagtgggaatgaaacttttgctgcgtttagaccattacctttcttcactttgtcacatagtctacccccgctaaacagaacttgacctccaacagaccgtttacatcaagaccttcagcagtacaacctggcctacactcagttcaattccttcttcaaaaacctaggcccggccaggtgtggtggctcacgtgtgtaatcccaacactttgggaggctgaggtgggtggatcacctgaggtcaggagttcgagaccagcctggccaacatggtgaaatcccatctctactaaaaatacaaaaattagctggggtttgtattgggtgcctgaaatcccagctactccggagtctgaggcaggagaatcacttgaacctgggaggcgaggttgcagtgagctgagattgcaccaaggcgctccagcctgggcgacagagtgagaccctgtctcaaaaaataaagaaagaaataaaaataaattgaggaaggattgagcatacaaaatagaatgagcctttgaccctgaataccctgcagtgagaattcccctgtggttctcaggcttctgtaattccagcaaatacacccttccttcatgttcactaaaatgcagatattgtgagataatgctcatttctcacagcttgcttgaataataataatgatcattatagtaatttacaacttaatagtcaacactgcctttttaacccagtctgtgagactgaatcgaaaaagtgacattctttgaagctctcaattaatacaccagactgcataaactctaataacttacctttccatggaaagagaatatgtgggtattctctttgaagacaaatggtagagagtagactctcatcaaagaccctctggcagtaatgagttgcattcgggaaggttccagaaggttctgtggaaggctgcagtttgagattggttctcaggtgtctgtctaactactttctaaggatgaagactcctggttcgtgttttagctacacccacaggagcaacagagtaagacattcctccacaccataacagaccccggcagtgcagagccatgtgggtcttctctgtcctgctgtccacagtctggttttatcttagacccagcctggtgcaattcatgttgtgtattggcactccacttaagtttcctgtttgtaaaaagcccctttcattcggtgattcctagggctttaggggaactttctggaaaccaggaagaaagaaataaaggttgttttgctgaggatgggttacatggggcgcgggacccaaatgagtggtttgagcaaaaagtagcttccacgctggactaatgcttggcaacactatgggaaaatttggagaagccgggagaggagggggcagagtttctttcccagccagccagggtgtccaggcacttttggtcctaggacatctctctgtgcattcccaagtaattgcaaggcttcttcttgtcatcgcctgagacttggattccccaagcgtccttcttttcctggagcctctgagtcctccattcctgaggcctttcttcagccctcccaatagccctgccatgatttcattgcagggctgtgaccrtctatgacaagccggcatctttctttcaagacacacctctggacctgcagcgccrgctcttcatgaagctsagcggcacacactctccgttcagggcccggtaggcctcccatcctcagctgccttctctcctgctcgccactgccctggcctgtccccttctcactgcagacctgggaacccactcacccrggggttggcaaagtaaggctacaggccagtctcctgcttttgtaaatcaagtgtcattgggacacagcacactcattaacttctgagttgtctacagccgcctttgagctgcaatagcagaatcgtgttttgcaacagagaacctgtggcccgcaaagcctgaagtatttactctctggccctttaagaaatgtttgtggacccctgcgctgtcttactctcctgccaatgggttcccaggcctgtggcaggacctgtggacctgtgtgtcccctggggtgtctcatggggctaaggaggggacctttgtgcaggtccacgcaccctgaggtgtgcccctgtgtaagctggggtggtgtgggagggcgtccctgcaccctcatcttgagtccaggggatgataagacagtaagtcccgtggagaaaaggaatgagtcagtcttgtttgctgttgtaaacttatcacccagcaacaatattagagaaagcaagcccaggcctcggatggcaggggtgacctggtgctgctgatgtggccgggcaccccaacctttgggagcctgcaggccttgccatggcaggagatgcccgtcctgggtcctgggcctgctctgtggcctctcacaagcttttttcctgctctttcagctcagaacctgaggacccagccacggagcggtcggccttcatgaagagggatgctgggagcgggctggtgatgcgtctccacgagcggccagccttgctggtcagcagcacaggctggacaggtctgcacgacccctgcaacacttggggttggtgtgacaggcacctggccaacctgtgttgtcctcacacctgccagtccttcatgcccccaccctgccacggtctcaatgagaaggggaggtcgtgagagctgtaagaggggtgtctagaaacaggaccctgacattcaattctcttctcatagaggacgaagacttctccatcctgctggcagctttagaaagtaggtgtgtggctgcggtgaggagctctgggcttgtcgggggccactgagctgtgagctgcttgcctggcctgcagcatgttcctgtccctggccactgggtggggcagcctggggacagtggggatggtggaggtgggccgccttgaatccccagttgggtcattgagtgaccaggccctcaggctgaaatgccccctccaggagagtatytcacagaggctggtggcctccccaccagagcagtgctctttctccacctgaacaggtgactctggctattgtttatttaaaagtttttttctgaatgggcatggtggctcacacctgtaatcctagaactctgggaggccgaggcaggcaggtcacctgagggcmggagttcgaggccaacatggcgaaacctgtctctactaaaaatacaaaaattagctgggtatggtggtggggrcctgtaatcccagctacttgggaggctgatgcacgagaattacttgaacccgggaggcagaggttrcagtgaactgacatcacgccattgcattccagcctgggtgacagagccagagtctgtcggaaaaamaaaaamaaaaaaaaaaaaaattctaccagaaattccgtgtagaattgtttctttttttaaacacagagtttgaacaactgactcttgacggacacaaccttccttctctcgtctgtgtgataacaggtacygcctgggaccctgggtgtctgtgtggttgggggatggtggatggggaggggcacgcagcctttaccctgtgcttcccacgatcttgtctccttaatcctcactgcagctctctgccatagggtcttatactgcttgacatgggggaaactgaggctcagagggtttcacagcagggcagggagcccagatttgaatctgtagataccaagctttctactttttcagtagtttccaaacatcttttttgttgttgttgttacatcactggtgtcttttttttttttttttgagacacagtctctattgcccaggctggggtgcagtggtgtgatcttggctcactgcaacctccacctctcacattcaagcaattctcgtgccttagcctcccgagtagctgggactacaggggcccaccacaccctgctaatttttgtatttttagtagagatggagtttcaccctgttggccaggctggtcttgaactcctgacctcaggtgagccacccaacttggcctcccaatatgctcgaattacaggcatgaatcactgtgtctggccatgtcattggtgccttaaccaagcgtcttttaattttttaaacggaagagcccctgtcccacagttactgctgctgagccctttcaaggtgactcagtgaggagggagaaaagcggaagcggtgtgggaagaggcggggtctgggccagctgctgctcctgctctcctccctcctctggcctctaggctcccaggagtggtttggaacctgcgccatgtgctctggaggctgtggcagggcaggggcggcttggaacctacgccatgtgctctgggggctgtgccagggaagggggagtcctcgtgtcccctgcgcataacacagacagaaggctggatccacccagtgggcggtcgggtgccaggccagtgcttaccccgccatgtttgcagnnnnnnnnnnnnnnnnnnnngcctcaggggtcagggtgcacacacccctgcatgtctcggggctcctgggtagcttctggaagggcccagatggggcctgactggagctgccgaggggtggagcttctgggaaaaggatccctcctaggggggagtgtcttgagcctggggccatgtggcagggacagagacgggtccatggcagtgtctcctcttctctgtgaaggcaaagggcctctgagggagtattacagccgcctcatccaccagtagcatttccagcacatccaggtctgcaccccctggctggagggccgaggactacccccgcttctaggtgagaggccagcgggaggctcagggaggaggcagggccttaagcagggggaacaggggtgggcaggatgtactttttctgaaaaggtggctctggaggccacttgggcacgggacctgggctctggctgaactcccgggaggaggctactttctggtgtgccagcccctcccagccaggtggccccagaggccctttaccaaggggtttgaggaggtcacatcctttcagcctgccacgccctccattcagtcctcttccttcctgcaggagggctgggcctggggttggggccactgttgcccaggtgtrggaaggcagtggctttgggaggtacagggacgatgtgtcaaacagcgtcgcctctcccagtgagatggttctgctttgcctccgtctctttccccgttgttttctccaagtggggagtygtgtcttggtcctgatgcgtctctagagccgcatcttccagcttctagtgagcagagcagttggaggctgaggccttttcctggcaggactctccagctagtctttgttttagacagtctcgctcygttgcctaggctggagtgcacgatctcagctcatgcaacctccgcctcctgggttcaagcgattctcccacctcagcctcccgagtagattaygggattacaggagccctccacaacacctggcttatttttgtatttttagtagaaacagggattcaccatgttggccagrctggtcttgaactcctgacctcaagtgatcctcctgtcttggcctccctaagtgctgggattccaggcgtgacccatcacgcctggtcccagctactctttagaaatgttaagccgttttgctttattttcacactgacagctggtttgtagtgggtgtgctgtggtttattattattattattattattattattattattattattattttgagaaggagtttcgctcttgtagcccaggctgcagtgtaatggcacgatcttggctcactgcaacctctgccttcccaggttcaagcaattctcctgcctcagcctcctgagtagctgggattacaggcacctgccacgacgcttcgctaattttgtgtttcttttagtagagatggggtttcaccacgttggccaggctggtcttgaactccygacctcaggtgatccgcccaccttggcctcccaaaatgctgggattacatgcgggaggtgaacctgggaagtggaggttgcagtgagctgagattgtgccactgcactccagcctgggtgacagagtgagactctgtctcaaaacaaaacaacaacaacaaaaaaaccaaattgtgrttacgtagaaaaagtgtcaacttacattttcagatgtcccagccagaccatgtggctgcttggccagcttaagccacttgtgcttggggctgcggggggccttatctgattttcactcccctcgggggatgctgcctcactgtgctgggaggatttgtgttcccagggcagagaccagctctctgaccgcacccctcttgcctagcagggtcggtggacctgggygtctgtctagacacgtcctccagtggcctggacctgcccatgaaggtggtggacatgttcaggagctgtttgcctgtgtgtgcgttgtgaacttcaagtggtaggagcagaacccgaatctttctggggatagcttcacagatccaccgctgagggggaaacagtgcagagccagctgcccacagtgaggccctgccccttggtcagtccagcacacactggaggccatgaggaggagccctgtggttactgtggctgggctgagcctcactgaagtagttgcttccatttagaactcatgttatatttaggttggtacaaaagtaatcacggtttttgccattaaaaatggcaataacttttgcaccaacctaatatgaaaaaagaaagcaccttaaatactagaactccactcggggcttttgctcctagagtagaattggcgggaattgcctgcaggcttacatggttttctttgtttttctctcccaccatgtcccttttggccaagctcacatggtgggtttgaatgagttaaatgagtgtcatgctgtggcctcactgcacccagcatagatgggtgtttggaagggtggcgttagaggagattctagaagcagtagccccagcacaagttgagcccttggcccctgctcaggagccggctcctggatgggattcagggattcaagcccctcgtgtgagctgagctcagggaacgtcttgatcaaatctggtgccctagaaaagtcatcttttatgtgctgaaccagtcyccagggggttgccttacttgttccacagccatggaattaagaaaaacatacaaaaataattcttcagtccttgaagagcatccagcacagaaggtacaaaccctccttaaggctccctcctcaaatcggtttggccattttgatgtgcactcycccaggcctttatacccttcagatgccaaatctaagaaccagctcccagaaaccacaccccctgttccaatccccagcctggcttgagcgtggggtgcgaggggagcccaggtgggcaccccaggggtctggtgtcttctccaggcagctctcaggctcccttggttctctctgcagtttacatgagctggtgaaacatcaagaaaacggcttggtctttgaggactcagaggaactggcagctcagctgcaggtagccacatctgccactaagccagggtgsgcagggttctggagactggcaccgagccacgctccctgatccctgcttcccacagtcggggtgggaccatgtggggtctggcggaaaagctagggagggagcagaggtcacagaggctggcctactctgctgtcccgtttcggtacagtaggctcgggaaagttaggacacaaccccacctgcccgcctgcccgctggatttatggaacagacactccacaaatgacgctggagccgggtgggccgggctgcagtttaggaagtgagcaggatcaggtaggtgagtgggcaaagggagcttctgggaccagccttgaaagatgggtggaattctgcaaatgttacttgtttcttattgcaaaaagtaatacatcgttcttgccaacagaatgactggcaggattttcagtaaaggtccaagtcggaagtcatttagactgggtcccctagtctctgtcagaaccatggtactctgttggggtgtgaaagtagccacagatcatctgtagattaaggggtgtggctttgttccaataaatctttatttacaaacacaggctgtgggctggatttggcctgcaggctgtagtttgtgatccttgattcagacagtttagcaaggctgaaaagaacaccgacacccccttgttacccacagatgggtgggacttggccagaggccaagaggagggtgctcgcaggggagcatacagcatgaagaggccgggaggtgccccaggacaccaagtgtgggaaagtgggacatgcggggaagttyccagaaagcgtgatgtcaagttggaggcggagcgctgctggggcgtgaagagtctygagtccaagtgagggagttaagaacttggtaggggytgttgktgggtcgggcacctggggtcagccaggtggtgacctgggatgcggtggggacaggcaatgaggtaagctctgctctttagtattatgcagatgcttttctcaaactttcctgatcctgcaggcaagctaaacctgttccggaagaacctgcgggagtygcagcagctccgatgggatgagagctgggtgcagactgtgctccctttggttatggacacataactccygggccagaggctaaaaccccagggcccctgctgtccttcccgcagcttcttcttggagtctcagggcaaaccctttcaagcagcgcctcccagtggccagaagctgaaatgacggcagtrgtgccgcctggtgagtgaattgcttctgtgacccgggaagctgtggttggctctgatttcttttttggaggcttggaaacacttcctctcttcttctgttcttcacgccccatgcccctgctagcgtactactgttctgtgacttccctgtgacctctgcagtactcctcatcctgcgtttggtctccaggtgtcgcctttctgccgtgttcctaatattttgattcctgtcttgaaaaaagcacctgctgcacagtaagcccagggatgtggcagctgcagcgggcttggctttgtgaggaaccgggtgtgtccacgttgggggaacatcatacttgatacacacgtttttatttgcacaaagaaaatgctatttttrgagccagaattttcatgtctgatttatggtgattttcttaagaaccagaactgctggcagaaagggggcacccacacgcttagayagcygatgtcttattagagggcagtttgtggttcctgatttggaaattaayattctccaaacattccagtccaatgaaagttttatccgctttcccatgtaaaaattcttcccatgagagtgacttgatcctcacaatcccgttgaagtcgtgtgtgagtcctacagtattaggttcagcattgccatctccaagtgctctttgtagggaaacagtttctggtcatgacaagcttccacttcccatctgatcctggcctggcctggaaacagagcacatgtgtttgaggatggcggtgtttggggacaggacatgagcgtattgtgtggggctgctaggacaggcgtggtgtggtgggggagtgtccaagtcagtctacttgtttcacagtttcccagtcccacccaggtacctagaattggcctccaggatgggaccagaaatctggttttgcatagaaatggttagcagcaggcaccgtgccgctgtccactctctgctggcgtctgccccagcacttggcacagcgggacagaagcagagctctgaacccacatctacctggctgcccagtcaacccactcttcacaaagcttagaaagcggccgggcacagtggctcacgcctgtaatcccaacactttgggaggccaaggtggggggatcacttgaggtcaggagttcgagagcagcctggccaacatggtgaaaccccatctctacaaaaatacaaaaattagccaggcatgatggcgggtgcctgtaatcccagctacctgggaggctgaggtaggagaattgcttgaacccaggaggcagaggttgcagtgagctgagattgtgccactgcactccagcctgagtgacagagtgagactccatttcaaaaaaaaaacaccaaaaaaaacaaaacaaaacaaacaaacaaaaacacacacacacagcttagaaggggctggtgttctcataagcacagatgtctgaagagccgttagccagaataattctttttttttttttttttgagatacgatcttgttctttcacccaggctggagtgcagtggcacagtcattgctcaccacagccttgactcctgggctctagcaatcctcccatttcctgactagctgggatgacaggtgcgtgccaccatgccagtaatttttttattttgtagagatggggtcctgaacccatggcctcaaatgatgctcctgcctcagcctcttttattattttttttttggacggagtttaactctgttcccctagctggagtgcagtggcgcaatctcagctcactgcgatgcctcccaggttcaagtgatcctcctgcatcagcatcccgagtagctgggattataggcgtgcagcaccacgcctggctaatttttgtgtttttagtagagatggggtttcaccgtgttggccaggctggtcttgatctcttgacctcaagtgatccgctcacctcagcctcccaaatcctcagcctcttacagtgttgggattacaggtgtgagacactgtgacccgggatgattttcaatcacagttttttgttacaagtggaaaatgcatatctataaaaatgaagtagtgcagacatgaatgtgtagaagtctctataatcctgccatccaaggatggcacctgttaacgagtgtattagggatgtccaatcttttggcctccctgtgccacattggaagaagaatcaccttgggccacacataaaatacactaacgctagcaatagctgatgagctaaaagaaaaaaattcacaaaaaaacctcgtactgttttaagaaagtttacagatttgtgttgggccgcaggttggacaagcctgctatatatatattctaggttttctcctataggtatacttatgtgaaaatgatgattgtgataattttttttttgagatgaagtcttgctacgttgctcaaggttgccacaaactcctgggcttaagccatcctcccgtctcagcctcctgagtagttgggaatataggtagtcataaccatgtctgggtgattattattagtttttaaacaaaaatggggctgggcacagtggcacacgcctgtcatcctaacactttgggaagctgaggcagcagatcacttgaggtcaggagttcaagatcagcctggccaacatggcaaaaccttgactctacaaaaaataaaaaaattagccaggtgtggtagcacctgcctgtagtcccatctactcaggaggctgagatgggaggatagcttgaacctgggaggtgagaggttgcagtgggcccagatggcaccactgcactccagcctgggcaatacaaagccagactctgtctcaaaaaaaaaaaaaaaaaaaaaatggtgggtgggttcttatactatgtgtgctgcttggcactgtttttttcacttaaaagatattgcaggtattttttcacgtaagtatctgaagaaagacttcctttttttttttttttttttttgcctttttgagacaggatcttgctctgttgcccaggctggagtgtagtggtgagatcagggctcattgtagcctccacctcctgggatcaagccatcctccacctcagcctcccgagtagctgggactacaggtgtgtgaaaccacgcctggctagtttctgtatgttttgtgaatacgggatcccactatgtggcccaggttcgtcttgaacacctggggtcaagtagtcctcctgccttagcctcctaaagtgctgggatgacaggcctgggccccgcacccggccagcctcctgtgcgaggttgtgcaggactctgtcgtggaacccagtacgccttcgtgtgccggcttgtttgtttactctgtagttaacgggctgccccacgtggacagtcactgggtcgtccgtgtctctgtgtgcaggcagaggctgctgtgcgtgcatctgtgcacatggctgccaggaggggctgtgctcagggggagctggggcaaaggctggtggcaatggggggcttggatgtagtgtggagacctgcgagccaggtggccgggctgcagtgtgcgggagctcgggggtcacttggcctccgtgtgtcctagtgtatttgtcactgagatgggacaaggacagcacaccctcacaggtgctgggggctgacaaatgttaggtctaaggacagtggctggcccactacagggccaattccccttctctacagtcactctgcttgtcttccaccgactgggtgctcaggacagtggcgtggtggatccgcctgtacagcctgtgctccagcatcctgctggccacagctgtgtccagccctgaccccgactgcccctcccaccacctccattttatagatgagaaaacagaggcccaagggcttagggaaccctgctctgaagcacacagtagggctgctaggctcagaccctccttcctgtgctgagctgccctcctcctgcctcaagccccccatgctccaagcccaccctgctcaccggcctctgcccgagttccccgcatggtgtgggagtgtggggcatgctagctttacgccggcgcccagttctttcacttccactggagtcctgcagggacagctcggggaccatgcaggcccgggtgggcgtggggactcaactagctcagtggtgaacagctggcacgtctgtgggttgtggacggtaaaggccacgtagacctcaggagcccgctggtgctcccggcaggcagccagcctccgcaggaccccgactagcgacacgatggcttctgggcaatacagcacgtctacggtgaaatcttcaggttactgaaagggacaagtggaaagttccaggtcatgctgaccacagcagcagggcgaggccagagaggcagcggtcatatgagactattagatgccatttaaacatttgggccattagatggaaaggcaattactacggtgaaaaaggagaacccttagagaaagctgcaaaagaccgaagcaaaagaaaaaaatgtccagactcactggtgttccttaaaaaaccagctctggttttcggcctatctagagggctttgaatgacacaaagcctgaatctgccatgaacttcgtgtttcaggtatccgctgatttgtctgctggcttgcaggggtgggcctgtgtccctggccaccgctggacctgtggttttcagggctgggacccaggaccacaggcagagctctgttccatcagagaggggactgagtgtgctggcaggggcgaggggttttcggtggcccagccaaacaccaccttctctcaagtgccctgtcctcatcccagaagtggttgttttcctccggtggtctctgaaggacacagggcatggctctgggacagagccatgtggtgacaactggaacgggagtatgcctgtctccagcaagagggctgtggcttgaaggtcaccttaagaggcacccctgtcctttgatgtcagcctggaggcccagagtaactcttctggaagccccatcatgtccatgcctgacagcatccattgttcccttttcccagagccaagagctgggtagagctgcaaggacaccgcctgcacaggatgcccggggctgggcattacctgctgcaatgacaacatctggctggacggcagagagctgacagaccgtcgcgacgtcccagtccagctgggccactgtcaccctggggccgtctaagttggcagtgatgtctgcctctaatgagaggccattgagaaggacattccctcggagctgctcgaggacccggctgtgacagtcgctgaagatgtacgcccgggggcggcacatcttgcagatggccaggcctgtgaggccggcgccactgccaagctttaggacagtcctggtgggaggaaaggggaccgtgtctgtgactgcaccagggtaagcctgcctcggtgccctgccctgcgccccgaggtcacctgtgagtgaaggctgctgggttctcggcccattctgcaaggtagagggcagcgtcccatgtgaccaggcctgtggtgccgtgggagatgatggctgtgctcttggagagtgtgaccgagcctcccgagggctgcaccaagagagggcgagagagtcagtccagcaatcagaagacaagtggcatagaagacaagtagccatccaccacatggctgaataaaccatgacaggaccaatcgctaatcagcaatgagaaacagctaactgttgacatgccatcagcttgcacaggcctcaagggtgtcatgcggcatgaaagacactcatctcaggccatacaggattccattcattgaacattcctgagacaacagaattctggcgatggagcactggtcagtggtggccaggggccgggtgtggctatgaaggggtggctgccttgtgatgattcaatatgctgtgtttgtcctttgtggttttctgtatctatgttttatcttattttttttcagttctgtcacccaggctggagtcagtggcatgatcttggctcactgcaacctctgcctcctgggttcaagcaattctcctgcctcagtcgcccaagtagctgcgagtacagrcacgtgccgccatgtctggctaatttttgtacttttttttgagacagaggttcactctcgttgcccaggctggagtgcaatggcccgatcttggctcactacaacctccagctcctgggttcaagagattctcctgcctcagcctccagagtagctgggattgcaggtgctcattaccacaccctgctaatttttgtatttttagtaaagatggagtttcaccatgttggccaggctggtctcaaactcctgacctcaggtgatacccctgcctcagcctcccaaagtgctgggattacaggcatgagccaccacgcccagcctaatttttgtatttttagtagagacagggtttcaccatattggccaggctggtctcgaactcctgacctcagatccaccagcctcggcctcccaaagtgctgggattacaggcgtgagccaccacacccagccctgtcaggtgttctttgaggact

SEQ ID NO: 94324 - DNA, 35164 bp, Homo sapiens
gcgggcattccagctccactaagtagcctgctgcagaatcacaggagtctattatgctcactgtgggcattgtccacaacagccctgatcccataaaagacacgtgtctggcctcccctcagaagcccagccctcacaccctgcaggaggccccatcctctaaaaacccccttcagaacctgtgctggacacatgcctggccccaccttgttcaggagccccgggcctcacccccataagtatagctcccccagcctggtacagaagactagctctgaagctctaggggagcccttcatctaattatcgacaggaaacccatcctgatcctgtacaggaatgccagcgcttaccctgaataggaggaacctctgcctaaccccagctagggacatctggactaagctgtaaggaagcccctgcacaccctggacaggaacccttgtcctgaccatccacacaagcctcagtctccctatacgaatcctgtcttgacctcagacaggaacacctttgtactcacactgctgcagtcctgtcctccaggtagcattttaaaaacacctcactcacaataatctgagtagtaaaccatggacccagctctgtctttacagaaatccctgtcctcaacctcttcaaggaccctgactgtgtgtggaacctcttgccttcattgttgacaatgatccctgatgttgccctgcacaacaatccatgacctcacaccctatcccatagagtccacaggaacccatgatccaactctcaacatgaacctcagtctttaacttgtatagaaaaccacttcctgaccttatggcaggaatgcctgtcttgaccatttactttaagccctgacctcagcctatacaggcacctatggcctcacctgatacaggacccccccttctcactatataggtcgcatttattgatgctgcacgaggctcctgggccttaccttgtattagctccactaccctgaccctctacagcaggggttcccaacccccaggacacggactggtactggtccatggcctattaggaattggtccacacagcaggaggtgggcagcaggcaagcaagcattaccacctaagctccgcctcctgtcagatcagcagtggcattagattctcataggagcacgaaccttattgtgaactgtgcatgcaaggaatctaggttgcgtgctccttatgagaatctaactactgcctgatgagctgaggtggaacagtttcatccccaaaccatcccccaccatccgtggaaagactgtcttccacgaaaccggtccctggtgccaaaaaggttggggaccgctgctctacaggaagcctgaccctaaaactgttccaggacttctgactggtctctgcagaaagcctttgtcctgaacctcaacagaaatcctttacttttacagtaatttatttacaggaatctctgtaatttacaggaatctctgatctttataggaactcctagctttactctctggaaatacactgcttaccctgaacaggaagcttaatgtgattctctataacagccttttccctggccttgtcccagaagccccacctgcaccctgtacaggaaccactgccctgacccaacaaagaaacaccgacctgaatctctgaaggggcagtgtcctaactacacagaggatctttgtcctgaacccgcacaggaacctctattacccccagcaggaacctgtgccctgagctagcacagaaaatcctgcccttacactcaacaggaacctttgatttgcctctttagagtaatccaaagaatgaaccagtataaaaaacctctacactgtacaagaacctctgttctgtacttgttaaacaacccataatcagaatcaccatgaatacctgcctggagactgtacaggaacccctgacctaacccccaatggaatcacctgatctgtctgtctctagtaacacagctctgatcctggacagaaatacctggcctgagtacgctgtgatcctctggcctggccgtctacagaaaaccactctcctggcctcaaaaggaacacctaaccttaatctgtatgggaaaaaatgccttcacagttttccctctcactttacaatgtctccaacctttgtatttccctgcaaacctgccttaccaggtaacagaatcattctcctgaccccagacaggaaacactaacctgacccagagatgctcctacccctacacagtaagagtccctgtctcaatgctttaaagagaaatttctatagcagtgctgtccaatagaaatatgtgagtcacacgggtaattttatattttcaatgtagccacattaaaaagagaaaaaaaagataaaattattttcaataacatcaatatacttaactttacccaatatattcaaatattattttaacatgtaatcaatataaaaattactgagctattttaaactttttatactgagttttgtgatctggtgtacatttcacatttatagcacatcatctcaagttagactggccacatttcaagagcagtagccacacgtggctggtagctaccatataggacagcataggtctgtggagtctacggaaccctatagcagacactgctataagctcattgagacctgttcctgttcttcctgagctcactctacctattccagcctcctctgcagatagatgtgggcacatgacagagttctgaccaatggagtatgggcaaaagtgacatataccagttccaggcctgacccataaaaatctctcatgcaatcctccatttcctctctttccctgtctaccaactgaaaaccaactaactccaaggacctagaggaggacagagtcacaaaatagagtttgcctgggtccatgaatgaacagtagtaaatattcagattggcttttgaatgagcaagaaataaacatttattcgttaagcccctgaaattctgggttacagcagctaggataatttagcctaattaataataatctctccccctctctctctctccttttttttttttttttttttttttgagatggagtcgcccaggctggagtgcagtggtgcaatcttggttcactgcaacctccgcctcccagattctcctgcctcagcctcctgagtagctgggattacaggtgtattagcccggctaatttttgtagttttggtaaagatgggatttcaccatgttggccaagctggtctcaaattcctgacctcaaattatctgcccacctaggcctcccaaagtgctgagattacaggcgtgagccaccacgcctggccagtaattttttttttttttttttgagacaggatctcactctattacccaggatggagtacagtggcacaatctcggctcactgcaacctctgcctcccctcccaggctcaagcgatcctcacacctcagcctcccgagtagctgggactacagatgcacaccaccacacccagctaatttttgtgttttttattgagatggggttttgtaatgttgcccagctggtctcaaactcctgagctcaagcaatctgccctcctctgcctcccaaagtgctgggattacaagtgtgagccattctgcctggccaataataatctcttgaccgaaatctagacacctgatctcactgtctatatgaacacaagctctgaacctatacagaaacacctgtgacccagtactggcccacctgatctctttgtaggaagctgtcataacataggtctaagaagccccatcctggccacgaatggtggctcacacctgtaatcccagcactttgggaagctgaagcaggcagattgcttgagtccaggagtttgagaccagcttgggcaacatggcgagaccccatctctataaagaaaaaaaaattaggcaggcatggtggcatgcacttgtagtcccagctacttgggaggctgaggtaggaagacagcttgagcccaagaggttgaagcagcagtgagccgtgttcacaccactgcactccagcctaggcaacagagtgagaccctgtcccctgtatcaaaaaacaaaaacaaaaaaacaaaaaaacaaaaccttaatccttaacttgcacaggaacaggaacccatagtctggagctctctagaaacccctgcttgattcagtaaaggtacaatatagaaaccataggaatccctgtcctcattctgtccaggaacatttggaatgacccaccagaggtacactagaagtgacctgaccctgcccatgaatccctgtcctcacacacctcacacaaaaggaatacctctccttaggaaaaaaggcccctaccctcaatcctgcaaaagaataccagccagatagagaccaaggcctgacactacagcacagatcggcaaactatggcattcaagccaaagccagactgtgggctgttttacatttttaaagggttgttttttaaaaagagaaaaaaagaaaaatgccactgagaccgtatgtggcctgcaaagcctaagatgtttactctctgtccctttataaagtttgctgacccctgctcttcagaaacctctcttctgatccaacagaaaaatgggccttgaccctttgcaagactccctactctatcaggctgcaggtatcagaactctagaatttttttgtagtgtgttatcattgtatgtgttttctttggtgagtgtaggggtttaaaggtcttaggtctgcaactcttttgcgctgagacaaaagataggttcacgtaggaggggtgagagggaagaggcggcaggacatcttcaagaggatcagagggcaaagctactgggcggtgagaccgtcaatctgtcagtctgatgcagaacccccggactgcttatctctccggtcccagcttatagcccggtaggaaatggtggagaatgagacagggagattaggaggacaaaccggcctcctgcagagctgacatttagacatggagtgggagttgcgggggagagggggtgcctagggacagctccccagacgcacacacactttctattactgcttgggagcagtggttacccgttggagggggcagatagggagagctgctgcccatgagaactcccatcctcaaggccattctggccctgggcactattattatcacaactttccagatgaggaaacggagcacagaactgttcagcaacttgcccaaagtcacatggttaagtcccgtaacctcagtttccttatctgcaaagcagccttaataatgggaactacctcatagaattgtggtttacaacgatgcctgtcacataatacttgctatcattaccattccctgcccccactaagactccttccactcagaatattgcggcagaatattaatagctaatattcggccagtgtttcctgtgtaccaccatagtgaatattaactcggaaaatcctcacatttagcatcgtcaccacgcctattttggccgccaccaccaacgtccagtggcaacctcgctctcggcccagccacaaccagcccgcccgcgctacgtcatcacggcgcgtcgcgcgggaagtcgcggggaaaaggtaagatgccccttcctaattccctcgcttccttgcttgctctccagacaccgccgacccgaagggctcctaagtgactggacagggacggaggggcggcggctatggcatccgggacgacagcgacgatagccgaggcaagaaaaagcttgcaccgcagccctgtcgggaaccgccggcgcctgccttttacgtaggcgcagcacagctggcgtagcacgccgacgcaccgccccgtcgcctgtgagctcgcggtgtggctcagcccagctggcgtagcacgccgacgcaccgccccgccgcttgtgagctcgcgagaggtgtggctcgcgcgaggggcgcggccttgaggcacggtcccctctggaggcgggatctgggcgggcagtcgagagacgaggcccaatggaaaagaaaagcctgagcgctcgcgtccccacaggtcgccagaaacttggtggagcgagccaagggcggagtttgagaaaggggctgcgtccaatgagtggagcggtgagtacagcgcgtcgacggcggaggcgggaagggggcggaggccgaccgaaggcggctagggactggctgaagagggttagcgaaacgttagcggtcgggtctgggcagggggtggagctggttgaaggaacggggcagtcccctgaggagcggggctggttgaaacgctaggggcgggatctggcggagtggaaggtaccggtccggcccgataaggggtggagttaagtgaatcgttaagggtggagtcgaaaccggggtcggggccggggccggctgagtgaaagggtgggtgattatcccgggagataggccgaaagggcaggttcstgaaggaatggggtctgggctgggcttagagggtctgggaatggggcttaggagagtagaaggggcggtgattggttggaaagggcaggccctaagacggactgtgtgagcccgggggctcattgctccgtgaaagggcaagaccagggaaagagaatcgtgtaaaaggggtggagtctagcgggccgggcggggccgggtagaatggccacctgagtggagggagaaggcctgagagaggcggagtttggaaggctgtggagaatcagatcgcgtaaggaatggaatctaatagagggggcggagcctggaaaagggcagagaggtggggtcctcagggcacactagccccctcacatacccacgctcctccccccacccccagaaccgcggcaggggccaagcctcctcaactatgacctcaaccggccaggattccaccacaaccaggcagcgaagaagtaggcagaacccccagtcgccccctcaggactccagtgtcacttcggtgaggccctagacccgccctgatgagggggagagggagcaagttggtcatgccctggactctgacccttctctctgattcacagaagcgaaatattaaaaagggagccgttccccgctctatccccaatctagcggaggtaaagaagaaaggcaaaatgaagaagctcggccaagcaatggaagaagacctaatcgtgggactgcaagggatggtgagcagggcctggctgcagtttagcctcgtatgacaatcaaaacccaaaggttccccaccctggacagttccctctgactcagggcctaaaatggatctgtgtctccttttttttttcctctgcaggatctgaaccttgaggctgaagcactggctggcactggcttggtgttggatgagcagttaaatgaattccattgcctctgggatgacaggtgaggctgggtcctccaggctgtctccaaaccacaaaaatacacacacttagagcccattagcaagaataaatcttttcttaccccagcctggatactggaagcagatgatttggggaggtagggctcacacttgaaagggttcttttatgtagctaacaaacatttattgagtgcctattgtgtgccaagagttggtgatacaaatgtaccaaacaacagacaggggtccttctctaggagcggattgatgagtaggagggcagatcattaaacagccaacagcagtatgaggtgtttaatgaagacagacttaagaccaggggattcaagggtgtataatagaggatcctaaactagtatccgggcttcccagaagcctttatagaggaagagacgtttgtactgaaacagaaggatgaaacctcccgtttgctttacttttcaaaaagaatcagcaaatccttttggctatatgttcaaaatatattcaccatctgacctctcctcaccacctccactgccaccatcatcatcactcacctagacttgcagaggcctcctccctggtcccctacttccaacctcacctctattatctgttcatgcagcaacctaaaaaaatatgtatgagttgatgtctttgttaaaatactttaaggaggccaggcatggtggctcacgcctataatcccagcactttgggggggccaaggcaggtggatcacttgaggtcaggagttcgagaccggtctgaccaacgcgatgaaacactgtctctactaaaaatacaaaaattagttgggcgtggtggcacacacctgtaatcctagctacttgggaggctgaggcaggagaatcgcttgatctgggaggcggaggttgcagtgagccgagattgtgccattgcaccccagcctgggcaacaagagcaaaactctgtctcaaaaagtaaaaataaaaaaaaaaaaagtactttaagggcaaactgttgccctcaaggtaaagtccaaatttttcatcctggcctcaaaggttccacatgatctggctccacatcactttgtgacctcatcagccaatccttctcgcccacactactccccttgttcttccaacatgccaggcaccctcttgcctctggtctgtaccctgaccaacccctttcccagagattcttttcggtcttctactcttccagctgcctttcacatcccaatgagactttctcagagaaggttttgcctggccaaaccctaccccaatacctgatcttattttcctagcccatgacattgtttgctaattatcatacttgtgtgtttaccaattaatatctatatcccttatcccaacctaagactaacttactatgggaaaaagacttcttttatggaatacctatttaccatctattgaggagctagggatacagcagtaaacaaaacaaacaaaagcctgtgtcttcagggtaaagggggaagacagacaataaataaacaaaaagtaaatgatgcactgtggtagaaagagcagtgttatgaagaagcagtaaagggaggatagtaggagaaagtacagtggaggagacttcaattttaaataggctggtcagggaaggcctcactatttgagcagggatctgaagaggtgaaggagtaagtcatggagacagttggaggaagagtattctaggcgggggtgggggggccagctagagtaaagttctagggctggctgaagagtatttggttcaactgagaaccagggaagagaccagtgtaggtgaagcgaagcaaaggaaagagggaggggtaggagatggggtcagagaggtgatggaggacagattgtttagggccttctgggcatgggtaatactttggcttttactcagaatgggatgggagcctcgaagggacatgaactgattagggttttaaccagtgtctagctgctatgcacagaaaggaccgttgaggtggcgagggtcgaagcagggaggccgaggagatgccgccacagcccaggcgggagggtatggtaatagcagtggcagtggtgaggagagggtcacacaccagagctgatgggaggcaggactgacaccacagttttgrggtaagcagctgtggaagggtrgatggggagatgtggagagaacagatgtggagctccccagtgtcctcatgcatctgtgactgtgactccatctccccagcttcccggaaggccctgagcggctccatgccatcaaggagcaactgatccaggagggcctcctagatcgctgcgtgtcctttcaggtaaggcccccaagccaacactctgggtgaagggcagggagctgacctgacctgggtgcagcccatgccttaaccctttaccccactttattcctcatctctccccaggcccggtttgctgaaaaggaagagctgatgttggttcacaggtgaaggcttgggagccttgtagggatggggaggagcctgccctggacaaaccagggcaagctaaacgctttgggaagcaatgtcatggtctctgcagccagccttgggcaagtcgctgagcctttctgaatctgtgtcatcgcctgtaacaaggggaccagtaaacataagttcctcaggagagtttgatgtgtgtcaggtgcttagaacagggcctgatatataatcagcccatgatgagctattactgttatcatgatctgattgtgtgaatagatggtggatgtgtggacagagtgatcggggttcccccaggggcttccagatttagaggcctagtgctatgtggcttgaggaaagctagcttccagagcaggtatctgagctgaactttaagaggagaaaaagagtgagtcagatgaagagggtgactgagggaagggaagaacagacagctgaaccagtgtggccaaaggcctgaaagtaggatttggtgtggctactgcaggggagcagagaacattacctgaactgaggcgggctagggaagaaacagaatgtgtcttatatcctggctattccttcaggttgacagttgggggagccaagccctaatttgaccagggggttggtgtatggacagctcagttggggaagagacagggccctgaatctcatctcccatctgtgtctagcctagaatatattgatctgatggaaacaacccagtacatgaatgagggagaactccgtgtcctagcagacacctacgactcagtttatctgcatccggtatggatgagaactctgcgggcagggaatggtggcaatcttggggtccccatccctatgcccaccccaccctgggggaagcagctgagtggatagggctgttctctcccttactccctttmtggctccccactgtctctccagaactcatactcctgtgcctgcctggcctcaggctctgtcctcaggctggtggatgcggtcctgggggctgagatccggaatggcatggccatcattaggtaggactctacagcatttgactttttacattgttttaaagtccttccttcaagtgtaaaatgtattgatatgggtaatatattcatgtgattcaagaatccaaaggtaaaaaagagaatataattaaaaatctgyctcccatccttgtcacccagacacctgcctcctctcatgggaggtagtcattggaaccactgactcatgtgtcctcccacaaagtcttattcaagaaataaataccatatttcattgattctaaggtgtacattttttcatatttgtaacatcttgaaatccagatgcatcttacaaacagtgacatctcagaattccattggcagtattttctgcttcgtttttggcatgtaaaatcatggtacatcttatcatcattggcatcccagaactgatgaaatgcaaaagctttctcctccctcccctgtttttaaccacaaatggtagtaacatgacatactcccttcgtaccatcttttcacttacacatcttggaaacctttctctaacagtatgtatcttggagcccggtagaacaccattgtgtaaatgcactctatgttaatcagtccccgactaatgggcattttggttctccccagtcatttgctgttttaaaaaaatgctacagcaaatatgctagtacctttataaaaataaaattttattttacactaacataaaataaaaatgttacttcaccctttttaaaacacaggttgtgggctaagttcctgcagcagaatgactgggtatgagaatgaatgcgttgatcattttatttttatttttatttatttatttattttgagacggagtctcgctctgtcaccaggctggagtgcagtgatgcaatcttggctcactgcaacctctgcctcccaggttcaagtgattctcctgcctcagcctcccaagtagctgggactacagtcgcccgccaccacacccagctaattttttgtatttttagtagagacggggtttcaccgtgttggccaggatggtcttgatctcttgacctcgtggtccacccacctcggcctcccaaagtgctgggattacaggcctgagccaccgcacccggcctttatcattttagtgaacattttcaaatctcctttggagacagaggggtagattggcagggggtgagagtttgagggcctccattactcagttcccggcagatttttaggcatcagcattaaaggaattggtggtccaggattagagagcaggggacagtctgtctctgcagaggaggacccctcacatactccaagctgttatttccttgtcttgcccaggcctcctggacatcacgcccagcacagtcttatggatggctattgcatgttcaaccacgtggctgtggcagcccgctatgctcaacagaaacaccgcatccggaggtcagcaacagagggcagatgtgatgggggtggcatgggrtggggtgtcctggtctgggctcttcccccagattcaccttgatctccttgcacagagtcccctctctctgctgctcctagggtccttatcgtagattgggatgtgcaccacggtcaaggaacacagttcaccttcgaccaggaccccaggtataccccgactcccacctaggtgctagactcccagccacctcccacccttacaggcccagccagaaggggtccagaaggaggaaaaggcattcacattcatggggcctatcctgggatcaggatctgtgctacttttgtgtgtctgccatctctcctaatttcactctgaggcagggactgttgggttccctattttacagatagggggactgaggcttatacgttaagaggtcacacagagaagaactgggagagacgggatttgacccacaaatatttgaagatcttattcactgattaaccgttgggttagagtgaacctcaaattactgctttattttttctgattaggataatgcttcaaagtgtttgtttatcctttcagtagatagtaaaaaacaaatataaataaataaataacaaactatttgtttaaagaaattaaataatacagaagtgtctgaagcagtgagtctcctctaatttccattacctcaaaaataagtgttgacagtttaggttatatccttacagattttctctatagatgtctgaatttttattattattgttataattattaataacacactgcctaatggaataattctccacatgttcttcgacaacttgctttattcatttaacagcatatctgggacatttctccatgttagtacctcttaaagtatctcgttctttgtagtattcaattttatgactgtacctctggttatttaaccccaggacttttaagatgcctgccagtttttgctattacaggcacttctactgtgaatagtctagtaaatatgtaattctgcacttctctgagtctatctgtaggatgaatttctaacagtgggttgcttgggccagagagtcagcatactttaaagtctggtatacactgccagacttccctccaggaggggaccagcttacccttcctgcagaaagtgattgagcaagtccttgtcagtaggagacattactaagtacatgtcgagtatcccttatatgaagtgcttggaaccagaagtatttcacatttcagattttttcagattttgaaatatttatattatacttagtggttgagcatccttaatctgaaaacccaaaatccgaaataccccaatgagcatttcctttgagcatcatgttggccttcaaaaagtttaggattttagggccgggtgaagtagctcactcctgtaatcccagtactttgggaggccgaggcggatcacctgaggtcaggagttcaagatcagcttggccaacatggtgaaaccccgtctctacaaaaatacagaaaaattagccaggcgtggtggcacacacctgtatttccagctactcaggaggctgaggcaggagaatcacttgaacccaggaggcagaggttgcagtgagctgagatcgcaccactgcactccagcctgggtgatagactgagaccccatctaaaaaaaaaaaaaaagtttaggattttacagcatttcagatttcagatttctagattagggatgctcaacctgtagtagttttatctagccttcttcctagctgactacagagaatccacttatccaagatctgaagaatccaatttaggttggttgttctctagacattgctttattattttgcagcattcagtgttcctgacaggtgtctgcttttcattcctttccaagtaatctactttcctctctgcaaggttatcttggtgttcttttttttttttttttaaattattagacagggtatcactstgtcacccaggctggagtatagtagcatgatcatagcccactgtaacctcaaactcctgggctcaagcaatcctcctgcctcagcctcccaagtagctaggactgcaggcatgtgccaccacacccagctaattttttaaattatttgtagagacagggtctcactatattgcccagactggtctcgaactcctgacctcaagtgtcctcccactgcagcctctcaaagcactgagattacaggcatgagccactgtacctagccttgatgttctaaacttttaccctggccttttcactctgtttaatagtaggtagacattttacatctgaagattcatgcttttcttaaactcttggaaattattttctattagatctttgataatttcttctttgttttctctgttctctttctaggacttctgttagtcagatgttagacttcctgggttgatcctctatgtctctctcttttttattatttatttatttatttatttatttattttttttgagacaaggtcttgctctgttgcccagactggagtacagtggcacaaatacgactcactgcagcctcgacctcccgggctcaagcaatcctcatgcctcagcctcctgagtagctgggaccacaggtgcacaccagcatacccagctaattttttaatcttttgtagagatggggtctcaccatgttgcccaggcttcttattttttatcttatgttttctgtctcttttttcttttgctgtgacctgggagattttgtcaactttatcttcaagcccttctgttgaattatgtatttagatatcctgttaaactccaaaagctctttcttcctctctgtttctatgtcctctcatacctgatcttgtttttatagagtatggattagaagtgccggctgggtgcggtggctcatgcctgtaatcccagcactttgggaggccgaggtgagtggatcacttgaggccaggagttcgagaccagtctggccaacatggtgaaaccccatctctactaaaaatacaaaaattacccagacgtgatggtgcgcacctgtaatcccagctactcaggaggctgaggcaggagaatcgcttgaacccaggaggcggaggttgcagtgagacaagatcatgccactgcactccagcctgggcgatagagggagaccctgtctcaaaaaaggaagtgccttaagtttcttctgttgtctgagttatgtctctttattctgaggctggttgaattatttttttcttggtccttctcttttatgctgatggttttcctcaaatgtctagcaatccttatttggctatttatacccaagaatgaaggcccattgtagggggctgtcagaggactactctgctgcagtgtttgtaggtctgttttcctgaaaggcatttccccagaatggggacagggaatgtccactgacaggttgcaactttagcgagtgtgggcaaggacccgggcattagatgggatcctgccagatgtcagaacaaaggaggcctcttctttggggtaacatctcttttttccctcagcctttccaaagtgtatctgttgtacttatcttttccagtgtagctttgggctttgttggtcatctctactgttttattatggtgggtttttaatacttcattaatttttctggttttatctttattaatgttttcctccgacgttctttattttgttcatttctggcttctggaatttaatgcttcaacatttatcaactcattggccgatctcatttcatctatacctgtacccactgccctcttcctgttttccttcaaagctaatcccagataccatataatttctcctgtaaatatttcagaatgcatctctaaaacataagtacacttttttagaaaagcattaccttagtatcaatacctgaaaattaacaataattatttttttaatctgccaagggtctgtcattcaaagaattctttaatatcattaatcattctttttgtttgaataaatgcataggaggctatagctgtgtgttctttcatgggtacactattgattacacacacagatgtgaaacactgtgaatatattcagtgcattcttccttattaacaaacgtgtgtaaacaaacaaacaaaaagaacatgtccatgcccttggatctcccagctccccatctctcagtctctgaactccagcagcagggagacaaactggataatccttaaaatactgttgtgaagacaaggaaagcagatgatctaaaactaagtagttaaaagaaacaagtaactttgttgtattggtgattcagtgagttggctcttcagaagggattttgtgtgcattgacctggatctgtactggatttctccagaaaggaaacttcagcttatcttgggtgcccccttatcctgctcagcatgagacagagcaccctggggcccctggaatctcaaagtctactttctagaaattcattgaagtctcttattctctgacatcctttccactctctctttctgggttgctgtttgtttacaatttctttactgtattttgaatggggtagtaggaggttgaggaagtaaacctgtgctatcaatccaccatttaacttgaaggtggttgaacttattttgaatttcccttctgttttctttttaaacttagcttgagtgctagttctgctgtttattgactttgatggctctcttttagagtcagctttcttcagatcttttctttcttcctgtcttccccaatgatatttttttcttttcctttctttttttttgagacagagtcatgctctgtcgcccaggctggagtgcagtggcccgatctcggctcactgcaacctccgcctcctgggttcaagcaattctcctacctccacctcccaagtagctaggattacaggcacgcgccaccacgcccagcaaattttttgtatttttagtagagacagggtttcgccatgttggccatgctggtctcgaacttctggcctctagtgatccgcccaccttggcctcccaaagtgctgggattacaggtgtgaaccactgcgcccagccctctggtgataatttttatgtcctactgtgtttctcttcctctaatgattaacttactaaaagtttagaaccaagatttatctatcaatgtcaaaaataaaacaatcatcctccacctactcaacaccagagcttttgcttgtttttattccccaattccaagctcttttccctcaattttaagaatctttctatatcacttgcattaaatttcacaactacattatcaacccattaaaatgtgactcttaagtttgtctagattcaatgcataccactatttcttgcatttccctaaaaaagctgccttagatcctctctggaacaaagcagggggtaaatgaccagatagaaggatggatggatgatagattattcattttgctttccccagtcagaattaagccctcccatggccccttgctgggctttctgtcaaaacacgtgcatcgcatcttttcagtatctgttttgcgtgtcggtcatactcacccctctgagtgctcattctctcgcctataaaatagaagaagtagtagaggtggcctgtaaggcattggggaggaggaactgccctttcactggcctcatgacagccccagccagcacccccgctctagttccacccacagaagcaagtctcacccctaccccccaggtctctccacttcctgctagagaatcacccagctccccagcctggcttgaggctcttttcagccttagctggctccccgcagctaagagccccatgctccatttgggcctccagtgtcacagggtttgacctgctgttactactacctttgtcataggggcaggtagtgggcggacatgatctagagtaccccacagagtcaggagcccccatgatctgagatagaccctagagctgagcctgaaattgggtgggcactgagggggcagcgatgtttgctgagggagaggttctggtgagagactaaatgaatgagcgagtgaggtaatggataaataaagataagaatgaaaaaatggtaagatgattaaattggtgactgaatgtaagggtaaattaatggaagaatggattcatggattaaataattaatggggaaattaatgaatgagagaatgaacgagtggttgaatggggaaatgagtggtagaggaaactggcaactgttgggttgrgggtgtctatggggattgacttctccaactctcttacctctttttcttctgcccccagtgtcctctatttctccayccaccgctacgagcagggtaggttctggccccacctgaaggcctctaactggtccaccacaggtttcggccaaggccaaggatataccatcaatgtgccttggaaccaggtcagcatctacccacctctgcccccaaagtgaggcccagccccgcccttctgtcagcggctcgggacaggtggctgaacatcccccatcacactcctgtgtctgcaggtggggatgcgggatgctgactacattgctgctttcctgcacgtcctgctgccagtcgccctcgaggtcctggggatctggggtgtgttgggaggaggagtggccttgaaggttaggctgtgagggtaggtagcctcatggagtctgttcccccttcagttccagcctcagctggtcctggtggctgctggatttgatgccctgcaaggggaccccaaggtaaggcaggctccctggggcggcaggtgggttgcatggagccaggctgaccctccatgtccccccagggtgagatggccgccactccggcagggttcgcccagctaacccacctgctcatgggtctggcaggaggcaagctgatcctgtctctggaggtgagtgactcaccttcgtccctcagcctgtggatcctggagggcttaagaacgaagctttcaagtccaacaggagttcctggcccaggaattcacttactagctggacaaccttgcataagtcacttcacttctttgtgcctccgctttccttctataaaacgagcataatgtaatcacctcatatcattgtccagtgaattcagtgaggcacccttctaagttccttgttgcttgacatgtggtatgcactctcttattatcatcattattattattccctggtcatgtctggtcctttcctgatcccccttcacaactccttgccccagggtggctacaacctccgcgccctggctgaaggcgtcagtgcttcgctccacacccttctgggagacccttgccccatgctggagtcacctggtgccccctgccggaggtgagccccggtggaggaggggaaagcgggagcctcactgcccgcccacattccttgacatcatattttctccctgccctgcagtgcccaggcttcagtttcctgtgctctggaagcccttgagcccttctgggaggttcttgtgagatcaagtaggaagtggggtgtgggcctggtgtggggtggacgtgggatgagccctgggggagactgtcttcagacttcctctgactttactgggctgccttggtgggagagggtcaggccctctctctctccctgggccctggtttcaggcctcccacccctttttctgtttgggtcacctgagttccagagtatgacggggattcagattgagagggtaggacaaacgtggcctcccccttttagctgagaccgtggagagggacaacatggaggaggacaatgtagaggagagcgaggaggaaggaccctgggagccccctgtgctcccaatcctgacatggccagtgctacagtctcgcacagggctggtctatgaccaaaatatgatgaatcactgcaacttgtgggacaggtaggcatttggagggctggatgagtaggtgttgggggtccctccccmtcaggcactaagcctctacctctcgtttccccactgctagccaccaccctgaggtaccccagcgcatcttgcggatcatgtgccgtctggaggagctgggccttgccgggcgctgcctcaccctgacaccgcgccctgccacagaggctgagctgctcacctgtcacaggtcagaccccggtgcctggggtgggtggattcccaggactgtggatgaggtctcaggggctggaacttgggtttcccctcctggggagctgctgcaggacttgagaggggctgaagtccctgtcttaggggtggggaccagggaggggacagaccctcctcactgtcctgcgggtgctcctctctgtgcttccagtgctgagtacgtgggtcatctccgggccacagagaaaatgaaaacccgggagctgcaccgtgagagttccaactttgactccatctatatctgccccagtaccttcgcctgtgcacagcttgccactggcgctgcctgccgcctggtggaggctgtgctctcaggagaggtgtgtcctctgtgggctggggagaggaggacctggggggaatggaaaaagagagccatctgctgtttctggaggctctgagagagtcaagcagggcctgaggaaaggggccatggggaggggcacgggagggggtgggcctagaggctgggggaataatggaaggaactggagaaagggaagggtggccaagtgcagtggctcacgtctgtaatcctagcgctttgagaagctgaggtgagctcaggaggtcaaggctgcagtaagccatgattgcaccactgcactctagcctgggcaacagagtgagaccctgtgtcaaaaaaaaaaaaaggtccgggcgtgatggctcacacctgtaatcccagcactttgggaggccgaggtgggcagatcacgaggtcaggagatcgagaccatcctggataacatggtgaaaccccgtctctactaaaaaacatacaaaaaattagccgggcgtggcagcaagcgcctgtagtcctagctactcaggaggctgaggcaggagaatggcgggaacctggcaggcggcgcttgcagtgagccgagatggcgccactgcattccagcctgggcgacagagcgagactccgtctcaaaaaaaaaaaaaaaaaaggaagaaaggaaggtgagggcaggctgtccgatcttagcaccctgctgcttcccaggttctgaatggtgctgctgtggtgcgtcccccaggacaccacgcagagcaggatgcagcttgcggtttttgctttttcaactctgtggctgtggctgctcgccatgcccagactatcagtgggcatgccctacggtaaggactccctggggaccccccaaatcctgatccttgtggggacctggatgctccccscagcccattgtttactcatgccccatggtccagctcccaggacttccttccccagaaagaagtaagggtgcagtccttacccagagaaggaccgaggatggagcctctcagtgcttatttagataggacccccagatcatgttacctgggcacttacaaaacaggatccagggtcccaccccagcatttctggcctatagcagctgcctcgacagaacccaggtctaggctcctgatgcatactccagaagacccacgaaccagcccccagcattagctgcccaaggcccagggtccagttccctagcaatgacccagaagagcccagggcccagccccgagcacttgctcaggcctaccgggcagcccttgggaaccaggatcagacttttctccttaactgataggacccagggtcctgccactcagcactaaatgcccctgcagaccccaggggtctagcccagccctcttccagggcgtgagtatcgtcggttactgaggtgctgtctcctccccaggatcctgattgtggattgggatgtccaccacggtaatggaactcagcacatgtttgaggatgaccccaggtaagggctgcagtcaggggccgcagtgtgatcagggaggcgggtgagcacctcaggggtactggagcccctaaccagccatggtccgcttcccaccccctccctggcagtgtgctatatgtgtccctgcaccgctatgatcatggcaccttcttccccatgggggatgagggtgccagcagccagatcggccgggctgcgggcacaggcttcaccgycaacgtggcatggaacgggccccgcatgggtgatgctgactacctagctgcctggcatcgcctggtgcttcccattgcctacgaggtacagctcaggatagatcrcaggacgtatgtgacacgcctgtgcaggtggcagcctggacctgcctccttggcatgtgtgtgtgtgactaccatgtggctgatgatatgagacagcgcatgggtgtttaatgaggctaccagggcagttggtggctgtgatcaccttgtgtatttgtgcacagatggctgtacatgactgccttctctgtgtgacactgtgtgagtgactgtcttggctgtgtgtgtgagggccttctgactatgcaccaatggcccgtgtcctggctggatctgtgttgtatgtgcgtgccatcacaagtgcttgagtatgtgcgtgtgcgactctgtgcaggcaggtatttctcaccttttctctgtgtgatgggtgtgatactgtatgtcactaaatgcaaccatctctgtgacagcctgtgtgggaccttctggatgtggaaggctgtgtgtgacagcagtcactgtctggctgtctgccctggctgtttgtgtgtatgtctctgactgggaggtagctgccttccctctgtgtgagctaggaggctggtggcttgtgtatggctgactctgggagggagggaaagggtgtgagcaccgctctgtcaccctgggcgccggtgtgcatctttggatctgcatgtgcatctgactgtgcatgggtagccaggacagccttctgtgtgtgtacaactgtatgtgcaaataaccagctcttgtggacataccagagtgcatgtcgccgttgtggctgtgtggtgatggcatgtgtatgtgactgtgcaggatggctgtgggttattgtcctctttgagaaactgtgtgtgtgtacatgactagtgcagatatatagtactgatctatatggtactgtctgtgtggcagtacgtgtggctctgtgtgaccatcttctctgtatgtggttcttgcgttgccatcttctgttttggaagtgtgcaagcacctctctttggcactatgtatataaaaccctgtatcttgtgtatgtgtgtcccacgtttgaccctggggtatgtgtgtgtgaggacatgtctctgtctctctgtttttcatgtcactctcttgacgtgtcagtctgtctcatgtccccatctgtccctttttttttttttttgaaatggagtcttgctctgtcacccaggctagagtgcagtggtgcaatctcggctcactgccagctccgcctcctgggttcatgccattctcctgcctcagcctcctgcgtagctgggactacaggckcccgccaccacgtctggctaattttttgtatttttagtagagacagggtttcactgtgttagccaggatggtctcaatctgacctcatgatctgcccgcctcggcctcccaaagtgctgggattacaggcctgagccaccatgcccggcccccatctgtccctttctgccatctccatgtctctaagtctgcatctatttcttctacctctgagtctgtatttcttttcttcccttcttcattttcagtctctgcttttgtgtctcctagtctccaggttctgtgtctccatctctctgacttgcatctccatgtcttcatttgtccttttctccatgtctctgggtcgccatcacttactgcctaccaaaagcccctaccctcatgcttatacatctcttctctccctgcctcagtttaacccagaactggtgctggtctcagctggctttgatgctgcacggggggatccgctggggggctgccaggtgtcacctgagggttatgcccacctcacccacctgctgatgggccttgccagtggccgcattatccttatcctagaggtaactttctcttggtccctcttcccacagtgggagggtagtttggaaatgttggcaccatcactcaggacagtttcctgaaatctcctttgagtgtccctgcctgggattgttggcacatactgggtagtaataagaataacagcaacattaacagccttaattgagtgctcactatgtgcagagcactcttctgagcacctcatgtgtcttattcattcagttacttggcaaagcagccttatgaggtagggtaagcttacctcattattttcctctctgaagatcagggaaactgaggcacaaagaggtgtgatgactagcctgagatggcacatttactgatggcagaaccaggacttgaacccatgcagcctggctccagggtttgtgctttttactctacctgaactgcctctaacaagttcctgggacaaaggaaattcactgacctttgtaaatgactcagtatccccacgccctgtgcctcagtttcctcatctttatgaggcaggctaatcatggaggaatgcctggcatatggtaaatgctggatcttttggatctggttttttgttgttgttgttgttgttgttgtttgtgagacaagagtctcgctctgtcacccaggctagtctgcagtggcatgatctcagctcactgcagcctccacctcccggcttcaagtgatcctcccacctcagcctcctgagtcgctgggattacaggcacccgccaccacgcccagctaatttttgtatttttagtagagatggggtttcaccatgttggtcaggctggtcttgagctcctggcctcaagaaatccacccaccttagcctcccagagtgctggaattacaggcatgagccaccgcacctggcccctggttactgttatgcgttgttcagatattaacccactcagcaaccttctgtgctcttattttctttttctttttctttttttttttgagacgttgtcttgctctgtcgcccaggctagagtgcagtggtgcgattgtggctcactgggttcaagcagttctctgcctcagcctcctgagtagctaggattacaggtgcctgccaccacacccagctaatttttttgtatttttagtagagacggggtttcaccatgttggccaggctggtgttgaactcctgacctcgtgatccacctgcctcagcctcccaaagtgttgggattacaggcatgagctaccatacctgcctctttttttttttttttttttttttccttttgagacagagtctcgccgtgtcacccaggctggagtgcaatggcgctatctcggctcactgcagcctctatctcccaggctcgagcaagcaattctcatgcctcagcctcccgagtagctgggactacaggcgcatgccaccacgcctggctaatttttgtatttttagtagagacgggggtttcaccatgttggccaggctggcctcaaactcctgacctcaggtaaccttcccgcctcggcctcccaaagtgctgggattataggggtgagccaccgcgcccagcctgtgctgttattttcaccactttacagatgaggaaaataagtcactgagaaattaattggcttgcaaaaagtcgcacttactatgtgcccagtactgcttgtgacaggacacggtgggagttaagaacacagatgactccatcagagagcccaagttcaaaccccagtgctgcctcttcagctgttatgacctcggacaagtcatctaaccactctgagcctcagtttctttatctgtaaaaagaatagcaactgggattcctgtagagtgtaaaaaaagtcaatacaggagtccatgtggagaaagagtccagttgttcctgtactaggtcagggcaggggcttttgtatgggttcacagcagtcgtcttgtgcaggtcaggtcagtggttactgtatgatgtgaggccaggggttcctggacagtgtgaagacggatttctgtatggcatgaaggcaagttcctgtatagattgagcgcctgtggttgtgaggattgagttaatatgcatgaagtacttaaaatcgggtctggcacacagcaaacaataaatgtcagctgttactaatgcttttatcagtattgttatcttgcactttacatcacaatttactccccacaacaaccaccttacacagtgggtgctgcctatcttaaaggtgtgggttctgttcacttgttctcagtactccccctccctctccagacttgcagggctcagtagggaggattggggaggcaggacatgttgtcctccaaattccccaatgaacccccaccatacctttccctccccttttccttaacaaagggtggctataacctgacatccatctcagagtccatggctgcctgcactcgctccctccttggagacccaccacccctgctgaccctgccacggcccccactatcaggggccctggcctcaatcactgagaccatccaagtccatcgcagatactggcrcagcttacgggtcatgagtgagtggatttgggggtgatggggggaacccagggaaggagggggctgaggggcagagatcagaggcaggaagggtgacagtacccacactcaaggatctccctccctggttccagaggtagaagacagagaaggaccctccagttctaagttggtcaccaagaaggcaccccaaccagccaaacctaggttagctgagcggatgaccacacgagaaaagaaggttctggaagcaggcatggggaaagtcacctcggcatcatttggggaagagtccactccaggccagactaactcagagacagctgtggtggccctcactcaggaccagccctcagaggcagccacagggggagccactctggcccagaccatttctgaggcagccattgggggagccatgctgggccagaccacctcagaggaggctgtcgggggagccactccggaccagaccacctcagaggagactgtgggaggagccattctggaccagaccacctcagaggatgctgttgggggagccacgctgggccagactacctcagaggaggctgtaggaggagctacactggcccagaccayctcggaggcagccatggagggagccacactggaccagactacgtcagaggaggctccagggggcaccgagctgatccaaactcctctagcctcgagcacagaccaccagacccccccaacctcacctgtgcagggaactacaccccagatatctcccagtacactgattgggagtctcaggaccttggagctaggcagcgaatctcaggtaaggctcaccacacccaggtaggggcaagaaggggcaagaatcgggcttctctgatacatctcttacttctgcgtgtccagggggcctcagaatctcaggccccaggagaggagaacctactaggagaggcagctggaggtcaggacatggctgattcgatgctgatgcagggatctaggggcctcactgatcaggtgagctcagggagaggctgggactgtggcttccttctcttgccaatttgtgtctccaggtaggagcatgtgatgaataaacatataatggggagatggggtcttcagcttacctagtttcacccacccactccaggccatattttatgctgtgacaccactgccctggtgtccccatttggtggcagtatgccccatacctgcagcaggcctagacgtgacccaaccttgtggggactgtggaacaatccaagagaattgggtgtgtctctcttgctatcaggtatggagcagaggaaggggatggggcggaggttggcccgggagcaaactgcagggggatgctgacccccacctgacactcacacccccaacctcaggtctactgtggtcgttacatcaatggccacatgctccaacaccatggaaattctggacacccgctggtcctcagctacatcgacctgtcagcctggtgttactactgtcaggcctatgtccaccaccaggtgggccctgggtagacccttcgacacgtgcacactcaccccccacacacacaccccttctgtgattgggtaaagggagaccacaggcccctctgcatggctgcctcatgtgattattttgcatggggcgggggctgtgggatagtccagaagacagagtggttgagggctggagtgggggcagccctgcagccgaggtagaggggtcctcactctctctcacctgccctattcttgcctcctcctcaggctctcctagatgtgaagaacatcgcccaccagaacaagtttggggaggatatgccccacccacactaagccccagaatacggtccctcttcaccttctgaggcccacgatagaccagctgtagctcattccagcctgtaccttggatgaggggtagcctcccactgcatcccatcctgaatatcctttgcaactccccaagagtgcttatttaagtgttaatacttttaagagaactgcgacgattaattgtggatctccccctgcccattgcctgcttgaggggcaccactactccagcccagaaggaaaggggggcagctcagtggccccaagagggagctgatatcatgaggataacattggcgggaggggagttaactggcaggcatggcaaggttgcatatgtaataaagtacaagctgttaaaaaacctggagaaagctttttgactttgagcaggtggagaaccccacatccctggccagcagagccgatgagtaatgaaggaatgagggagtgggtctctgtcaggtcaatcccctgcccatccattgcccccaaaaaactaactgaaaatagagcagccatcttgactggctccacgggatataaaatggtagaatccatgagaaaatgggtgcttgccttataaataggagcctcacagccagtcccagccacacccacaccctaggctgagaaggcaagaaaactagcaggaagtatccttaccaggcctgtttccccactgtctcattggcctgactggggatggtgggaggtccaggtttaacttgaatgtggtggtcatggtagcttcttggcagaaggggtgcctgccattgaccacaggtgggaaattggaggacagtctgagagctgaatttctcccacgtggtgagaattgctttggcagctcaagggagttggatctgaggtttccaggacttttcttcatggccaccttatgatcccaagctgaccaccacagccttactgagtcaagaagaggagggatggggaagggccggggctgccccgttcttgttttgttttgttttttgagatggagtcttgctcttgtcacccaggctggagtgcagtggcacgatctcggctcattgcagcctctgcctcccaggttcaagtgattctccttcctcaacctcctgagtagctgggattacaggtgcctaccaccacacctggctaatttttgtatttttagtagagacggggttttgccatattgggcaggctggtctcaaactcctgacctggtgatccgctggccttggtctcccaaagtgctgggattatgggtgtgagccaccactcccgggccaggggctgccctgttttaagagccctctggatgccccacctctgctgccctctcattgatcaggactgtgcatgtggttgccatagctgcaagggagcctgggaaatgtgtagtttgacaggcagccgcctccaatcagggtctttcttccctgacagaatgacccctcctctgtcactgtcttttctccagagctaccaaaaaaccgagttgaggcagcacaggctctgtggcctgaaagagcttcccacaaaaccgttcccaaagtcaggccatcctggtcaaaatctaacacccaactctcccacacacacacaccaccaacaggaaagcaagggagaggcgccacaggggacacacggggaggtttggccgccgtccgtgcacccctagaggccgctgtggcacccacgtgcctgtgcgcaagccgcctgggggggcacgaccccttgctcccccggggcaatggcacgggcaggggcggggcagtggcaggggcaggggcgcggcgcaggggggtgggcggcctgaggagccgagggagggcggctgcgcatgtccactcccccaaccgccgccggggtgccccggggagcagcgtcgccccccgccaggcctgtcagagcgtcccagcgcgcccgcctccccacggacacaggtgagcgaggcgccggtgcccctggccctgccaggcctgggggtatccccgcgccggctttgggggatcgtcccccaagcgccaagccttctcccgggcgagcggcccctcactcggccggccgggaggggtgtcggcgcttggctggaagcggggccgcctcacccggagtcgggatgggtcttgacaggatgcccgggcgacgctgctcacaccgagcccgaagtggagtcctggtttcggggacccttccgcactccgagctttgcacctcacccggcctcgtccgggaaagcacgacctggcgaggccgccctaaccccaggtcccggccccttagcgcgccagccttggtgagctgggcgaagccccccaacctggtcccagcggctctgagcgcgcggccacggggacccgccgggggctccgcgccacttgagaggaccgagcccccaatctccggcgcctcccgcgggctgaggccccgggccagtgccctcggcacgtgcctctgcgcctcgggctcctcccgggagcggagccttggggaccagggccgcggcctccctgcgcgtcgcggggactgggcgagtgtggccccgtcccgccaggcacctggggtggaagctgcgctccgccactcggccaggccccgggctttccttcctcaccgtcggcgcccccagactccagccgctcagaccccgacttaagaggcagcctcgaccccgcctctgccttctgacccatccctaaagatggccgggcacccctacaggacccccagaagccgacctctccctccacgtgcgccgccgcctcgcccctccccgcagtcctccaggtcttcttcctgtccccaaccgtcggggacccccaagctccgtcctccgcttcctgctctctttatcccgcccccgctccttctgggccaacgccgccagtgactattcccagggatccctcagagctgaggacgccgcggccgcatccccatttgggaccttgccccgactccgacctccggatctccagctccaccaaacctcgaagccaccatccgcccccaaactgccgctgcgccaggctttcggaggggagtcgtggcaacagccattaggatgcactaagcagggcacttcctgagcccaaggacaccgaggggcattcactgagtgaatggggatgtgctgctaataactaacactaattgaccacctgccgtgtgcccatcctcttcgaacatgcaacttccttgttccttatcttgttactgtctctttctctctgccagaatccaatcctcacaagggcagggactggggtctgttttgttaactgccatatcacaatgcctggcacgaaggaagattcttgaattaatgaatggagattaaattataatttaaaagcctggcatgaactgagcaccttctgcatgcttatcacccgctactgacatatagttcactttttttttttttttttttttgagacggagttttgctcttatctcccaggctggagtgcaagtggtgtgatctcagctcactgcaacctccgcctcccgggttcaagcgattcttctgcctcagcctcccgagtagctgggattacaggcgtccaccaccactcctggctaatttttttgtgtttttattagagacagggtttcgcaatgttgggcaggctggtctcgaactcctgacctcaggtgatccacccgactcggcctccaaagtgctgggattacaggcgtgagccattgtgccccgccccctttttaacctagtttgttgtctctcaccccgaccagaatataaccttcatgagggctacagtttgttgtctatttattgcccaactccatgtccttgccacacagtaggttcccaataaatgtatgttgaataattaataaagactacattctaatgataatggctaacagaccacgtgatttacatatttatttggtttattatattatctgcctctgccttttagaacataaaccttctgggggtgggaatgttgggtccctactgtctggcaggcactgtgctgggctagggttcaatggtgaccaaaaccggcaaaatcctgccctccctctgtcatggggaggaactgctaatgggcatggggattcttttctgggtgaggaaaatgttctaaaatttacttatggtgatagttgcacaacttcgtgaatatgctaaaacccgttaaattggacactagctggctgaacttgatgggatgtaaattacatctcaataaagctgtttgggaaatccagccttcacagttgttgattcgcgtgaggagggaaggagagatggggggacgtgggacagggagaaaacaacataaatcatatatatatagcatgcaaattggaaggtgatcagcacacaataggcattcaataaatgttgaaataatgacaccccactgtctccttgccctcaaatggtctcccctaacgtatcccctgttgtcttgcttcttctcttcccacttgcagagcctgctgcccacgtctcttccctgagctgcctgctggggtcatggagctgccaacaaagcctggcaccttcgacctgggcctggccacatggagcccttccttccagggggaaacccaccgggctcaggcacgccgcagggatgttggcaggcagctgcctgagtacaaggctgtggtggtgggcgccagtggcgtgggcaagagtgcgctgaccatccagctgaaccaccagtgcttcgtggaggaccacgaccccaccatccaggattcctactggaaggagttgaccctggacagtggggactgcattctgaatgtgctggacacagcagggcaggccatccatagggccctgcgtgaccagtgcctggctgtctgtgatggtgtgctgggcgtcttcgctctcgatgacccctcgtctctgatccagctgcagcagatatgggccacctggggccctcaccccgcccagccccttgtcctcgtgggcaacaagtgtgaccttgtgaccactgctggagatgctcatgccgctgctgcagccctcgcacacagctggggggcccacttcgtggagacctcggccaaaacacggcaaggcgtggaggaggccttttccctgctggtccatgagatccagagggtccaggaggccatggcgaaggagcccatggcaaggtcctgtagggagaagacccggcaccagaaggccacctgccactgtggctgctctgtggcctgaaggtcttggccaagaaatgtagacctttccccaggccagggtgattgttcatttgacatgagacccctgaggcaactagctttgagggacacatcaggtatactagggaaagatggacatctctcttgttttcacttggtgaggggctttttggtaacatgggagtgcctaatgttgcttttgttatgtcaagttgaaagattttgtgcaaaattaaataaatggtgttttgggtttcaaagctgcctccatgccgagtgttgtgtgggtgggagtgagactgggtagaatgttacttgagttgtgagaattctttcattcaagaaattcagggggagcccactgtgtgctaggctccgctttatatataagggaggtagaggcaaacaagacacttaaaaatccttgcccttatagatatggcatcaggctagatagtgataaaggctacgtgttaaaggcaggtgaaggaatagggtgacaggtccaggaaagccttcttgagagtaggtgacatctggacaaaaacctgaagatatccagaggcagagggactagccagtgcaaagaccatggccacaaatcagctgccaccacagcaaccctcagtatatccagggcctggagcaagagtacaggtaggcctctacactacataactaaatatgtaaacgttcagacattacgaatcaagctttacaaagtaaatgaaatacaccctatcctactttggcaaatacactttattagtgacctggatacccaggctccaatttctcagccttctcagagttccctgccagaatgtgcctgtctgccaaagagtgtgcctgtactggggcctcccgaccctcagtgccctctccctttctctccgctctctccttttctcttccccacatcaggaggtgttcatgtgtgcctgcgacatcccagccagcacctcaagctctactcacgtgccccacaaagccaccccttggccctcaggaggatggtcccttggaagatgatggtgcaggccctgaaagtggcctcaaagcctgggatccccatacccaagtgaggcctaaaagggggacacaagatccgcgattgtccatgtggatgtcttcccctccacccctaggagagacatagactgagcaggtga

SEQ ID NO: 94325 - DNA, 16928 bp, Homo sapiens
tggaattggtggggacatgtggcttagtctttgggaatttgtgggttatagagacagctgctttttagattactctttgaaaaacattttcttctctagcagtttactttttatttattctgagacagagtctctctgtcacccaggctggagtacagtggcgtgatcttggctcattgcaccctctctagcggtttggatgtgagattgcagtcttttgtgatctttcaaaatggaaatcctcatgttataaatgttttaagaactgtaaggtgactgagtgtatggcgtggtttttggacacaaaaaaatgcttgagcattgggttacctgatcttttatctcttaactgtgtgtaatatgtttctgccaaagtatgtatttttcccatgagtaagctgttttatttaataacatcctcagtttggtctgaatgtgctgagttgtttattttctccatgcatttgctgcatgtgacctagtttgagccgtctctttgtgtattgcttctcatgtgatattaacccactcaaagatgccatggggttatgttgcagatctcagctctttttttgttggattaaagatatttgtaggctagacgcggtggctcatgcctgtaattccagcactttcggagaccgacgtaggcggatcacctgaggttgggagttagagaccagcattgccaacatggtgaaaccctgtctttactaaaagtaccaaaatttgccgggcatggtggcgtacgcctgtagtcccagctactcaggaggctgaggcatgagagtcacttgaacccgggaggtggaggttgcagtgagctgagattgtaccattgcactccagcctgggtgacacagtgagactctgtctcaaaaaaaaaaaaaaaaaagatatttggagatacttgtataaaatgtcatttctaaaatatgacccccaaattcagtctcctattgatagaaccaaagccatttaagcagtcagtagaaaattttgaaaacctgaaacgtgataatgcacatttcttgacttttctttcctttcctttctcaggtacaagaatattccacagatgtcctttgatgatacagaaagggagccagatcagacctttagtctgaaccgggatcttacaggagaattagagtatgctacaaagtaagcactgggcctgtcttccattctctatggcttcttatagggcttgccatttatttttggccagtctcctgctctcttagcattggaaatgagttaaaacagtggaggagacttgatctttggcttggtcagtttttggcagagattcagtgcaagccacagacttgttaacttgcaagcaattggcagatctgaatgaactcctagggtggttttaggaaagatgtgtctcccattagtttaggttaacactaaatgtgctttagaatccctgctgggttatgcagcatttctcattcctgttccttgagggcaggagcagtgtttatccctactgccttggacaggatctggcaggtgctcagtaaatggtcattgaattaattgcctgtccaaaggagaaggaagaactcaggagctctgactttgcctggcttttacaagctggagctgaattgttgtttcacatggtggtgagatactcattgaactataattcataccttctttccctattcctgtcatcctctagaatttctcgtttttcaaatgtctatcatctctcaattcatatttcaaaaaacttcggagcagatacgacaaaggtcttttatattggcctgagaggagagtggactgaggtaagatggggttggaaaggttttcccctcatgtctacatatctgcacactgtggtgatgggagcttccagggaagggaaaagagcaagtgtcataattactcccagtttattatttttcttggttttatcagtataaacttttcgtctcatttgagaaactacaggtatttttaagggggttgaaactgttatttttatataaataatatatataatatatatatatatatctcagctcactgcgacctccgcctcccaggttcaagtgattctcctgcctcagccccccaagtagctgggattacaggtgcccactcccacgcctggctaatttttttgtatttttagtagagacagggtttcaccatgttggccaggctggtctcgaactcctgacctcaggtgatctgcccatctcagcctcccaaaatgttgggattacaggtgtgagccaccttgcccagcctgaaattgtcatttatattaattcacagttttctactttcaaatgctttcattgagtatttttgataatcttttctattcatgaaccagggataagataataccatagacaagttcctattctcatggtacccccattatagtagggagactgaatcttcaaagttacagggtgaatcaatgataatgatctttgcagctttctggagttaaaaagtatcaaaattgggagatattagatgatgacatctaagtattaaaataaggagatattaaatgatgactcctagaaatgaacctgaataaggactaccgcaatgtgtgtggtgtgggaaaggacagttcttttaatggctggctgacccagcctcaattttcttgcagcttcgccgacacgaggtgaccatctgcaattacgaagcatctgccaacccagcagaccatagggtccatcaggttaccccacagacacactttatttcctaagggctggccaaggctcccatagaggcgctgtgtcagtgaagatgtacgactacctgttgggaaggacaaagggatgaggctccagagagagttggctgccacagcctctgccaagctttgtctttggggcttgctgcagaaacctggcctacggaagatacgacaccactgggagggttgtgtaggtgccaggggaccatcgtggttctctagggcgctgtggaaattgggtcttgggctgggtggcatctggcagtcatggataacacttgcttttccagttaatgtggccatgtgattccaagtgtcatgttgctttgtggcaagattgttgtgtgacttgtttttttgtttttgtttttgtttttttaaaggaaactatttgtgggctataggaaactttctgatgcctccggattgtgttagtagtagccatcaggagggtctccaactaaaacacttgttcctgcttgctcctttcccctctcattgttcagcattcttgtcaagttgcccagcttggagttgtctgtcacgcacatgtgtcctgtggttatagctagaaggacaggagtctcctgctgatgcgtgatagcttaagcttggggagaaggtcttttccactgcctagctaagcagtctggggagagcatggggatcatttctatgtgtgtgggtaatctggtcagtaagattgagacttagttaagattccccttggaaattccttaatgtttattagcttctaactagtgttgtaagtccgatgccagaatttggagatttgagttcttcttttcatggcttttattcactgtgactaataagcttcctaataaatccttgccagacttaatgtttgtattttcttttgagttcttgatagccactgatgcaactttcatttcatggggaactgtactgaactttgaaattttttgttgttgttttggactaggtagattataggaagtgccacaattaaatcaagactggagccgggcgcggtggctcacgcctgtaatcccagcactttgggaggccgaggtgggcggatcacgaggtcaggagatcgagaccacggtgaaaccgtctctaccaaaaatacaaaaaattagccgggtgcggtggcgggagcctgtagtcccagctactcaggaggctgaggcaggagaatggcatgaacccgggaagcggagcttgcagtgacctgagattgcaccactgcactccagcctgggtgacagagtgagactccgtctcaaaaaaaaaaaaaaaaaaaatcaagactggatcagtttctccaggaatggtcaagcttaattttgtacagtaggccaaaaacactcctacacccatatatagtaaagaagaaggtggggttgaaaacctgtatttcacagaaattaactgggcatggtggcgtgcacctgtagtcccagccacttgggaggctgaggtgggaggatcactggagcccaggaggtcgaggctacagtaagccatgattgcgccactgcaccccagcctgaggcaacagagtgagaccttgtctcaaaacaacaacaacaaaaccctatatttcattttgcacaaaaggaagtgatttgtagaatgacatttacaaaaataagggagaacagattttggagctcatcagaagaaatgagggtgaggaaagtaattgagcagctcatgtggtctccaggtagaccaaagactttggacttaaattttgaaagtcagtttagcaattgaagagaatgtaagtatctaaaaaggggatttgatatggtcagtattctctcccttgcagaaaacaggaacaggtaataaagggaattagtgttgaatctgatccttttgggagaattcctctgaggcattggcccatgctgttgtttggaggatatagccactgtttctccagcctgtcctaggaaaggtctgctaccaccaaaccttgttggccctcaaaatttctaaaatgcagcctgaaataaaccagaatgcaaatgctgttcttgaaaagcatgaagggtcctattcactcagccacagcctctttatttcagttggatcattttttggagttaaaagaagggctatgtttaaatttggagtagggggaaaaataaagttaaaaatcttagagcagactagcccttcactaattccactaattaaagcattaatcacagctcctgggactgagcctctgaatttgaagcttcactctgaagaatttgttttaagtgtcatggtgtctcaggtgatcgaggttgcaggaggaactgttcattcttccataagtggggacattaccctccattttcttttgacattcagtcctgggtccttggcttgtggtggtcccataggctcaaaggtttcctgccccgaatcctggtattgtaggctccctgacctgttgagtacttaggaccaaagtgcctctgggcctgggggaaagtgctttgttgagcttccaactttgtactgttttctttttcttttctttcttttttttttttttttttttttgagacagagtctcgctttgttgcccaggctggagtgtagtggcactatcttggctcactgcaagctccgcctcccgggttcacgccattctcctgcctcagcctccccccgagtagctaggactacaggcgcccgccacagcgccaggctaattttttgtatttttagtagagacagggtttcaccgtgttagccaggatggtctcgatctcctgacctcgtgatccgcccgcctcagcctcccaaagtgctgggattacaggagtgagccaccgcgcctggctgtactgttttctttctgttcaaagaaaacactagtataggttaggctgggagagtgagtcctaagcggctgagggtcaagtgtgactcatttcctatttgcagatccccacacattctcagggacatgctccttcaactcagtttgcctgccttctgacttttctgtggtccctgatacctatttccacttcagcttgatggcagcgttttgtgcactgtctgcatgacattgcttgtgaagggcagcgctaacactgccagtgcctgtccagctctcctgatacggcctttgtatttttcctaggtccttttttgcgtgattaacacctcacgctgtgattttactgtataaaccatgttcacacaacctcatttaagcctaccaacaaagctgtgaaggaggcagggtggttattaccattttatatatcaggaagcagatccagagaggcagaatttaaatggaatcccgaggttgctgtttacatgccttccttgagcctcagtttccccatcttcaaggctggagaactagatgatctgtaaggtctcttcggttcagagtgtgtcattccattcatgatcctggaatagggcatgaaagccagtggcagamacccgaggccttaagaggtgtgtcccatgaggatgggaaggtggtaaagtttatgcaaacaatagtgtgagggatgcctctccttccggtcggccctcctccaggaggcgcatgggtggtggtagcaagtgggagtcttgggtgccctgtctcgaatctacaaggtgggagcgggtgagaacccagcgactgcgcggctgaatgacagggagtagccccgccgcctccaacatggcagcttctatccagcgaagccgggtccccgcttcckggttccgtactgtcggccaggctacttccggcagcgcgatggctgggttcccgggactcgaacggaagttccggcgggggcggccgagggggaagagtgtgtctgcgggagaaagaggagaatcgcccaagcggcctcggaagtcccagggagtggaggtacccagccggcggctgcggaggatgggcgtgtagggggaggtcggcctcgggagggtcccggagagcggggagggggaaccgtgatggggggratgggggtggggagtgaggtgcgaaggcgctgtccagtcttggggacttcgggagtggagcggggctaggcaagggggtgtctgagtataaagagacagacttcagggtcggaaatagaagagcccattgtggggcgggggcttccccagagtcaaaggtacaaagctttattgtgggcaggtgggagtcctgggtcagggtagaaaatttcactgggtagggtgacctttggtcagaacagaagttcccattgtggggagcgggagatcctgggtcagggtggaagttctcaaggtgtatagagagagacaggtcagggggaaggcacccctccgaggagggagcctgggcgggaggtgcaagtccccacggtggagaaggaagggaatcgcagctcagggcaggaggtgcattccccatgggaagaggaaccccgggtcacaggtgaacgatcccattgtggggagctgccctcaggggtcagagatggaaggtgaggccagttgggaggggtgggcaggcacttgaggcaggtagtggaagcttccggcgagtttggaggacgccgaggatggggaggggccagccagcctgacattcttttgtgtgtttgggagtcccagagcgtggtcaagccagggctcgtttgcagtcagtggcagcagcagcaggtagctccgtttaggggggcgtggagcaccagtttgggggtgggtggagttcttacgctttctggggacatgggcagccccctgggggtctgggaatggatgggccagaaactgctgtgaaggctggatgggggctgggtggggggaggttgagatgggggttggaggcggcactgagtaggggatggaagctcctttccctggcacttttctctccatttcccatagggcccggagttggggaggcagggacccagggatgattggagaggagggggaaggcactcacccctgaggagttagagggggaatgaagcaggcgtgccgctgcctcccctctgccccctgccctacagtccctatgccctgcctctgcctgtctccagcaagctcaggtcctgtggttgggccagaaccagagacacatgttctgggccactagggaggctgtctctgcctttcagccctggaactgaggcagacttcttctcctgtgccctgggacttcttgcttgactattctttgtgcccaggacagaacctgggtgctgtgtggggctgakggcctggtggcctcttgggccaggagtgtgtcctgtgcctggttttgctcttgacygccgccccgatgtatgcaggcccccgccgtggagccgtgtggtgtatgtgtggtaacaccatgtctgtgcccctgctcaccgatgctgccaccgtgtctggagctgagcgggaaacggccgcrgtaagggtcccctttcacccacggccagacactgtgggagcagctggaggaccggctggagggggtgtgggaaaatggaggtggcagtgatgagcagggagtatcctgaggccagcaggctcggggtagtaamctgtttggctgctacctgggttcccccaggtccttgggggtgggggaggggtgggcagaagttggaggacctagggkaagccttcctgtytccccatttcccatccttttccaggttatttttttacatggacttggagacacagggtaagtgactgaggaggggtgctccttaaggaggggtcctggcccagcagcggactggagaggccttctcttcctaccacatcggagccttttctccygtccctcctacaggcacagctgggctgacgccctctccaccatccggctccctcacgtcaagtacatctgtccccatgcgtgagtgtcaccccagcaagggaggggctgaggctggggatcatctgggggtggtcctgtcatcccaggcctgttctctcctgtcagttgcatcctggggcttgggctcagggcagtcagaagtggcattttcagcctgagctcctgtggagcccccaggagtggggtccagcaccagcccccagccctagggcctcctagacctgagctctcctagaacccacacctccctttgccccttccccaagtactcaccgactacctgggaccccgtcacaccaagcgctgggctctgcttctccattactggcgctttgccccaaccacagcctccagccccacgtggcaggttgcctggcaacaccttaaacacaggccctgcctgctgggaggggccaccaggggcggcgcggccccactccgggctctgagctctggcctcctcattcctcctgagcatgatgggccctctggctctctttccccaggcctaggatccctgtgaccctcaacatgaagatggtgatgccctcctggtgagtttgggagtgggggtgggcagggggacgaggacacttgggctgagggagccacagggggctggctggggttttctatagctgccagtgcctctactcccaaggtttgacctgatggggctgagtccagatgccccagaggacgaggctggcatcaagaaggcagcagagaacagtaagaccccagcccctcctccacatcctccttcccctgccccccaggaaagcgctgggcggttcctcagcctagctcccttattgggccccttggcagcttccctctacccactcatgccccctcccccagtcaaggccttgattgagcatgaaatgaagaacgggatccctgccaatcgaatcgtcctgggaggcttttcacaggtgaggggagaggggtgggggggatttagggggtaggggtggccggtgagtgagctgtgccmtcatgacccctctctctcctccctccagggcggggccctgtccctctacacggccctcacctgcccccaccctctggctggcatcgtggcgttgagctgctggctgcctctgcaccgggccttcccccaggtgaatgtccccactgacccccccgccctttgtgtctgcatcctcgtggcttggggactgctgcagcactagctttgccctgagtcctgtccggcctccaggcagctaatggcagtgccaaggacctggccatactccagtgccatggggagctggaccccatggtgcccgtacggtttggggccctgacggctgagaagctccggtctgttgtcacacctgccagggtccagttcaagacatacccgggtgtcatgcacagctcctgtcctcaggtcagtggggggaccatttcccactcccacttctctgcctccagccaggtgcctctcgtgatcccctcttaatcccctcaggagatggcagctgtgaaggaatttcttgagaagctgctgcctcctgtctaactagtcgctggccccagtgcagtaccccagctcatgggggactcagcaagcaagcgtggcaccatcttggatctgagccggtcgagcccctgtcccyaccyttcctgacctgtccttttcccacaggcctctgggggcaggtggcaaggcctggcygggccttccttcctggccttagccacctggctctgtctgcagcaggggcaggctgctttcttatccatttccctggaggcgggcccccctggcagcagtattggaggggctacaggcagctggagaaaggggcccagccgctgacccactcactcaggacctcactcactagccccgctttgggccccctcctgtgacctcagggtttggcccatggggcccycccaggcccctgccccaactgattctgcccagataatcgtgtctcctgcctccactcagctgcttctcagtcatgaatgtggccatggccccggggtccccttgctgctgtgggctccctgtccctgggcaggagtgctggtgaggaggtggagccttttgaggggggccttccctcagctgtttccccacactggggggctggrccctgcctccccgttaccctccttccctgcaggcctggagcctgtagggctggactgaggttcaggtctccccccagctgtctcacccccactttgtccccactctagagcagggaggcrgtgggggaggagttgtgtctcgtcttctgtctccatgtggtttttgggtgtttttcttsttgtgtcctggattccgataaaattaaagaaattgcttcctcaacgctcaggcctggctgattctattccaggggtggatagtgaccatctgtgagaacctgccccagtgtaagaaaacttgtttttatttttaaatactttggaaagctctttcagagcaatataaatgagtgcctgggaggaggaggttttgtgccagagccttgccccctcactcactcttgggggtcctgatgaactcttggaccctgtggaagataagagttagagacctcggcctcctggtcagtggagcccttggcctcatgcctggtgggctaagcgggcccagctggggtttgaggtaggggaggccttggcttggccccagcagctccagggccctgagttcctgccagaggctggagagcaggcagctgctgcttttcctggtccttggtaggggagggtcctcaggcttgcgtgccaaagcctgaaggattctgcttctgccagcgccagagatcctcacctgcaacacggcgaggtgtgtgctcagggcccacggtggaatgcagagcctcccccaccccacagcccgccctgggtgggcatgcccagatctgatttagcccctccctggcccctaactgcaggggtcaggccagcactcacacatcctgtccagccctaaggctgctgtccaccccagctcctcttgggccaggctggggttggcgtaacaggctgccacatcaccttcccgccgtgccaccaccttgtacgggatctgcaagacaggaggtagttggagcttagctgagccggccctggcccagctgctggccaggtctttaagaagcagaagtgcagagcagcggctggcccgcaggcaccgggtgctaggcaggctgaggagactgggcagtgccaggtaccctccagagaggtgagtgggaagggccaaagctgctctgttgctgagagctgggtggggtgaggtgggtgaggtgggtggggcgggggggcgtacccatgcctctgaggccttggtgaggatcctcaaggcatacccaacaacctgaatagcctgtgcccgtgcccaggttgtagatctggcccacggagaacagggtttatggagcgggctggactgaccacgcctctgggccgctctgcctggatctggtccctcccctccctcacttctcccttctcttcctacccggcagccacactgttctttcagcttccttaaggctgcaatgtggcccttggccagatccacgacatggatgtaatcccggacacctgcagagaagggagtgtgttggatggggagtctgttccccctgactctccttcctggctcccactcctaggtccccctggtcctaggctcacctgtgccatcctctgtgtcatagtcattgccaaagacattcagggcctcccgtcgcccgatcgccacctggaggtggagatcaggtcagttcgtcccagatcccaggcaccagctttaaccccagggccactcctctgtcccttcccttttgccttacctgggagacataaggcatgaggttgttgggtatgccctggggatcctcaccaatgcagccagaggcatgggcacctgtggggttgaaatagcgcagcagcactgcgttccaagtctgtgggatgtgggtcaggtggtgaggccagaggcacaggcagcgtgtcccagctgaacccagagccctcctcatgcctattctgtttttttgagatggagtctcactatggcccaggctggagtgtagtggcctgatttggctcacttcaacctctgccttccaggttcaagcaattcttgtgcctcagcctcccgaatagctgggaccacaggcacacaccaccatggccggctaatgtttgtatttttagtagagatgggggttttaccatgttgtccaggctggtcttgaactcctgacctcaggtgatctgcccacctgggcctcccaaagtgctgagattacaggtatgagccactgcgcccggccagttgtctatttattatctttagaaacaagcaggggatggggccctccactgcaactgcctgagccttagcttcctccttagtgggggtgttcggaatcccacccctgggctcagggtgggccctgaggagtccatcgatcagtggagccagggcactgtcaagggggccctcaccttgtctgcctggcacaggtcccggatcatttcctcgatgaagaacttggacttgccgtaagggttggtacaaccacccgtggggtgggcctcatcaaggggcaggtactgggggttcccgtacacagtggctgagctgctgaacaccaggttcttcaccccgtgggccttcatgatctggccgtggagagatggcatcagtgacctctgcctcacacattactcccaccctgttactcctccacaggagaatggggctgaggtgatgagcactctcatttacagatggggaaactgagactgggaggtaaagacatgagtccaggatgatacagcttgggctctgtgtttggcactgcctgccaggctggggtccagctggacaccctcctagtgtctgtgccctgtcccatgcctctcacctccagaagctggatggtcccggtcaggttaactctgtaataatccagaggcttctgcaccgactcgcccacggccttgagccccgcaaagtggatgaccgccataaagctgtactgcaggggtgacatggccagaggttgctctactggttttagtccttggcaatgccctcagcctgcctgcctgcactcacctttttttttttttttgacagtctcgctctgttgtccaggctggagtacagtggtgccatctcagctcaccgcaacctccacctcccaggctcaagccatcctcccatgccagcctcccgagtagctgggaccacaggtatgggctaccatgcccagctaatttttgtatttttctgtagagatggggtttcactgtgttgagcaggctggtcttgaacacctgggctcaagtgatctcctcacctcggccttccaaagtgctggaattacaggcgtgagccaccgtgcccagcctgcacccacctttttgaagagacgctgtagggctccctggtccaaaatgtccatctcctcaaactccacagagcggcctgtcagctcctggacccgccgcaggctctcaggcagggagccccctcctggtagggtacatgtaggccacatcatcacgacatggggtgctgtgttcccagggactagccagacacacattccccgcccggtggtggaggtggaacccagggttttgcttctgccatcccctcaagtagccccagccccactgccccgctcaccacggaaggcattatggaagttatcgatgaccacaggcaagtagccagcctccagcagctccagcaccgtgtggctgccaatgtagccagccccacctgttaccagcaccttctctgccatggcacctggcccaggatacagagtctcagaggtggctgaggctgcctgctcagagcttccttcccactggaatcctgccccctaagctcgctttggaaggaggcggcagtgtgccctaggtaccagactggctcagaagtcagccctggggcaagtctgggtaccatcactttctggccttaggctttggaaattaattagcctcttggcctcagtttctatctctgtaaaacagagctaataattgtataaacttcatgaggcagcgtgagggttcagtgaggtgatcttaagggcccgccacagcagagctggggagacctgacacacaggcaccttattttctagttccacttgccttggagttggaaaagatggaatctgaggatccacacttctttgtccaaggtgactgaggactggagagtcctgggcagaaggaaaatggcagcacgattgggactccagggtcgcaggaaggggttctgtctgctcagacccaggcttgtccaatgcctccgccttcgctaggtgtaaactggctcctgggcgcagtgactaatacctcctgctctaggcggcccccaccccctttccctcaagggtcagctgggaggaagcaggaaatagatcacatggcctcaagggtgaggtcctttgccaggcaggctgaggccagctcaggggcaaccacaccgtggttggtcctggagggggccccaccccaacccccgctcagcctctgcccatgccagggccagcccggtcactcctggctcagagttaggaatcccgcccaacttaggctactctgggtgggccgtgtagacgtggacttggccaggtgcgcacctccaccctgaacaaactctgcgggtagtacggggaggaagccccagacactgaggcctttcattcccagcgaccgggcccgctgccgccttcctccacgctgcctctatccccttctgggctcacgcagctccaacccacttgaccaagagccctctgcgtgccaggctccgtaccaggcacttttgcatgattttcctgaattcccccagcatctcggtgagacaggtgttatcactggcactttacagatacagatactagggccagagaggtgaaacagttgcccttcggtcccacagctggcgacagcgggctggaatctggatcgccaggctcgcagcccggccctctccccaggcggctcgcccttcccccaccgctgcccgctggactctgcccgccgcgccgaagccgcccccgcccccgccccgcgcctggcgcggaccccgaaagtggtcgcagagaggccctgggaagcacgaaagctggtctgaggccggctgcgcccccgacagcggagtgaccttgctcagccgtcgcccactcggttttcccagtctgtctgttggagggaaggggagctaggccgtgggcatacgagggcggctgggtctcaggctgggctttgggctgtagcgcggagcggggccgagctaggagtcctcaggccggcaatgaatgaaccccggccgccccagcccgggcagcggggaactgggacaaagggggcgggcctgccctggagggacgctgccaggaacacgacccgcccctcggaaactccctcgctccccgcggactccccggcccctcgcgagcccacccggcccttcattccgtctcccgaacctgctcgggttcccgcgccccacgcttgctgcagaggcaccgcctcctacgcccgagccgcgggccctttaagtgctgacggcccactccggccccgaccccgcccctccacgcccccaaggaaacatgtcactcgggttacggccactacggggagggcgggaggacaaaaggcctccgcgctgtgacgaagactgcgcagcgcgcgcccgcggaaggcggaagtgggcggtgccaccccgcgagaggcgccgccggcgccaggtcccagtagcgggtgggtccttgccggtgccccgggtccccgcgctagctcgtcccaacccctggaagagggctgcgcttccgagggggcagggggcagagggtagggggcccacgcctccgccccactctgacccgcaggttttcagacttgccggtgtgtgccaaaccatgaattcaaaatcttgaactacccgatcccacgggactaaggcaggagggggtcgcagggggcctggtgctggaagtccagtttgcaaataaaccaaggagctggaggaagctgtcaggccacactagcggttccagcgctcttggctctcagcccccacctgccgggaagggtcggtctgcactctgccttccacgacggcaggttagaaaatgattgtttgtttacaatgaaaagtagtagagctagagaataatatgcacaaaatgtgacatcctgcgtgatgaaaccagagcaaaggagccctaaatgcaggagcgcacaggtgtccgcgcagccgggaatcagccagcgcctgcccgcagagtccagggaaccgacaggtgagcg

SEQ ID NO: 94326 - DNA, 59206 bp, Homo sapiens
gccataggccagggtgggtggtgggaggtgccgttacagaaccaggtttgctgagagagctgggaataagaggatccagaaataaggggctaggagcctgcaccaaaccactggaagcaaggtcagtgcaatcactttaacaagcaccaaggctggaacacagtgaggtccacggcgagccatggagatgcttgatagaaaacggcacctggccrggtgtggtggctcatgcctataatcctagcactttgaaagtctgaggcaggtagatcacctgaggtcaggagttcaagaccaacctggccgacatggtgaaaccccatctctacttaaaaaaaaaaaaaaattagccaggccgtggtggctggctcctgtaatcccagctactcgggaggctgaggcaggagaattgcttgaacacaggaggtggaggttgcagtgagccatgatcatgccattgcactccagcctgggcaacaagagtaaaactccaaaaaaaagaaagaagaaagagagaaagagaggaaagaaagaaagaaagaaagagagagagagagagagagagagaaagaaagaaagaaagaaagaaagaaagaaaggaagagagagagagagaaagaaagaaagaaagagagagagaaagaaagaaaagaaaagaaggaaggaaggaaagaaggaaggaaggaagaaagaaaaagaaaggagggagggagggagggaaggaaggaaggaaggagatggaaggaaggagaaggaagaaaggaaggagaaagatagaaagaaagaaagcgaaagaaaggaaggaaggagatggaggaaggaagggaggaagaaaagagagagaggaaggaaggagaaagagagacgaaagaaagggagggagggaagggaagggaaggaaggaaggaatgagatggaaggaaggaaagagagaaaggaaggaaggagaaaggagagaaagaaagaaaaagaaggaaagaaagaaagaaagaaagaaaaagaaagaaagaaggaaggaaagaaagaaagaaagaggcaagatagatggatggctgacacaggtgagacttggcccatcctctctggacaaatcaaggcagatggggttaggaggttgagcgtagccacccaaagataaatcctgatcccttgcccagtgtccagacctgagccagttttcaagtccagatcccatccactgaaaggaaaagcgtgtttccaggaagaaggactctgcaacatcgtaacaaaggcctatgggaatcccctactccttccccaacaggactgatgctcattgactcaggtaaccagacactagggaaaaatacccaaatatttcaagaaatgtggctgaaagcagcaatagacgtttatgatcatcccggtgtctgcaggtgaagaatccagggtggcttcgctgtgtgttgtgccttgtgggcctccctgaggttgcagtcaggatgtcctctggaatggctgggcctgggctggagggcctgcttccaaggcactcacacccgggctggcaagacagtgccggctgttggtgggaggcctctgttcctctgtagatgggcctctccacagatggcttgagagtcctcatgacatggtggccggcttgctccagtattagagccccaagcgagggtgtaacatcacatcaggccaagggctccacttcacagcaaaagaggtgcaaccgcaggcacacccatggtgtctagtggtcctattatgtgctgtacaacccagaggctgctggctgatgggggaatggagtggccagttgaaggctcagccacagcaccagcttggaggtgccacctgtgaagcaagggcaccatcctccagggtgtatgtacatcccaagtcaatgaccagtacacgatgtccccagtgggtaaaatacctgggcctaagaaccaaagaatggaagcaggaatagcctaatttagcatcactctcagtgacctacttggagaatatgtgcttcctgtccacacaactacagattctgtaggttcagaggttctggtttccaaaggggaatgcttccaccaagcgacaccagtcacgccaggctactcatgtcaagacaccagtaggcaggggaagagtcacccatcgagcaggggcagttgacctgaaccatcagaggaggtagggttgctgtcacacaatggaagcagagaagactgtgtgccacccacatgggtgtccctcaggactctttcacctgatgtagtcagcaaataggcaagtcagcagctatggctcaagaagggaatggtcaccaggggctcatcctcgttggtgaggatctggggcaacccaccaggtaagctatctagtccagcatgggtctagctgagggtgaaagggatctgaatgaataatccaggagggggttgtgagtatcaccttcaagcctgagactagctgcagcaagagctcacgcaagagccttgaggaaagtacaaatgaaaccctacacagctgtgatacagtgggcaggagagaaaatgacatgaggtctcacatgttgttgtagtcagatggggggctggagctgaaacagcatggtgatcttgagctgctccctgtggtctgccccatgtgggctggttgggcttcctcacagcatggtggcctcagggtagttggactgctgacagggcaactcaggcctccaggcacgagtgctccagtgaacatggatgtcatggaagtcacacagtacaactttcactacattctctttgtaacaagtgtgtcacaagcccgcccatgggccaggcacagtggcttatgcatgtaatcccaacactttcggagaatcccttgaggctaggagtttgagaccagcctgggcaacatagagagatcttgtctacaaaaaagaaaagaaaaattagttgggcatggtggcatacacctataatttcagcactttgtgagatggtggtgggaggatgccttgagcccaggagttcaagatcagcctgggcaacataacgggatattatatctaaaaaaaaaagaaaaaaaaaagttttcattagccaggcatgatggcacatacctgtggtctcagctactcaggaggctgaaacagggggatcacgtgagcctaggagtttgaggctgaagtaagttaggagtccaccactgcactctggcctgggcaacagagcaagactctatctctaaaaaacacaaaaattaataaaataaaaaacaataaataaacaagattcaatgagaggagacatagaccctatctcctaataggaagaatgtcaagatcatattgtaaatcaaaaataaaattataagccccagctgagagaatggaccccctgtcggccaaggggaccccaaagaaacccaaaaaactagttcaggccatgatgggaagtgggaggtcacacatgcctcatcatagcctcctccctttaagtttcggcacagctgaccagcattaacattaacatagagatcctcctaagactgacagaacacttttgtagcaatcagatacccgattctaacatgactctggtatagcaacacacgacagagagcaggccctaaaggaaatcaaagtattttaccccaaaataaattttctttgacatattttgaaatggacttgcaaagtcatctcttgtgggggaaacttgcattctgtagagaatctccttacttactagctcttttccagagagtctgataccttttaaggtccccagagacatgcacatctattctctctgaagcctgctaactggaggcttcatctatgtaacaagaaccttagcttccacatccccattgtcttaactcaagcatttctttctgccgactccaactcttcaggtaaagcttaactcttttaaccaattgccaatcaggaaatctttgaatcctcctctgacctggaagcaccacccacccacttcaagatgtcccacctttctgggccaaaccaatgtatactttacatatattgattcatgtctttgcctgtaacttctgtccccataaaatgtataaagctatagcccaaccaccttgggcacctgttctcaggacctcctgaggctgtgtcacaggccatggtcactcctatttggcttagaataaacgttctgagatattttagagtgtggcttttctcgtcaaccaaattctacaaagagcttggggggtgggtaatgttgtggagcccatctttggcagatacagtctgccaaagattgtgacactgccttatcgataaactcagtggcttaacacaattaaagcttatttctccctcttgtcacagctctttgggttcctcatggttccatgtggttcttcagagcctccatyggtggctctaacctccctgaggtcctcggagtgccctccactggagcagtgggtgagtaagagagcagggctcacccacaggaggttgttaggggccagcctggaagaggagcacagtgcccgcccccacccatcccattgactagcacttagccacgtggccgcacctggttgcagaggctggagagtggagcccagctgtgagcctggccggtcatggggacatgtgttagtgagtactgtccacgtcaggctcagaccatctgacctgaggctatggggatgcaggggtccccagggggtggacaggacagaaggaggagggagacctgcttggagaacctgttctcagtttccatttgttacataatggacaagaggaccagcacttttgctcagagctgcagctctggttccgctaggaaatgccaggcaggggcacagccaagtggttctcagacagtaaaccccaagccacagacccttgctttcttgggcagggagtagtggacagggctgactccaggcaacagtcccaaacaggctgcaccaatgtgaccgcacctcccctgagtgcaggcaaggggtgctgtgctcacgctctcagcctgggtgcatccttactttgttcacagctcctctatcggacccatttcactgaggctcagcgaggttacttatgtcgccccaggtcaccatccagtaacccagaaagcttctcttggctcctccactaactgcgtgatcttggacaagtcagttactgtctctgaaagccagttctcctccttaaaatggagacagttgagccaggcatgctggtttatgcctgtaatcccagcactttgagaggcggaggcaggaggatcgcttgagctcaggagtttgggaccagcctgggcaacatagtgaggcccccatctctataaattttttttttaattagctgggtgtggcagtgtgcccctgtggtcccagctactcaggaggctgaggtgggaggatcacttgggcccgggaggtcaaggctgcagtgagccctgatcgcgccactgcactccggcctgggagacagagtgagatcctgtccaaaaaaaaaaaaaggagacagtcccataacaagccccccatggcgccgcccagatggggtttcgacgccagggagaggagggaaagggttatcagggaaggttcctggtggcagagctcacagggtccgtgctgagccgaattttgcacggtagcctcagagtcccggagccgagtccagagggcgggatgcaggtattgcgaagaggcacacgctccgagaggaaccaccagagcgtgggctttgggcgaggaggggtctcctctggttgggggagatctggcaggcttgggggagatggggctgaaaggatggacagggagggaaggccagaaagctggagacggggatggagagctaaaccgcaaagagcaggcgccctgccccgctgagggccccgcgcctccagctcctccttcccgagcttcccggggtcggcgtccagccggcaaccaatgggccccgcccccgcccgcagccaatgggccgcgtccccgcccgcgcggccgccccgcccctcgcggacccggaagtgggcctggcaccttcccggcctgccgcagggatggggcagctgtgctggctgccgctgctggcaccgctcctgttgctgcgaccgccaggggtccagtccgccggccccatccgggccttcgtggtgccccacagccacatggacgtgggctgggtctacactgtgcaggtaggtgccgaccacgccccgcgcgcccctgaggctgcagcttccctctccccgcgggatctgagtgtgggtttgcgtcccggggcccgatgccggcgcagaaggaggctcagtgggttcaggaccccacgctgccattgactggttgcgtcgctaacttcgggccagtcacttcctgcctctgaacccccatttccccttctggagggtggtgcagattggagggacccctgcattcccggctggggaggggcttgggggttgacagtggtaacccattttccagggaagcctggagcaggagagggtggggctggcttcagagcaggtggatgtcaggtgcccgctgggaaggggccgggctggtcccctgcggggctraatattggaggccagctcagcgtcctccgccccccaggacaggggtgaaggtggacctgtggtcacctcctggttctgctcaggaccttgggcgaggggctttggtccctaagcctcagtttccccatctgtaaagggtaggggaagcatgcccactacagccagtttccagaggagaaaaccgaggcccagagagggttgctgccttgcccaaggtcgctcgggaataaccctcatgcctcctgactccctgctcggtgctccttccattcatgtaagcactctgtgggcaccctgtgtgcagggccctcgggactcggatgggaacacactacagctgtggtccttggagctcccagccttggggaggcagacgcctagacgccagggacagcctggggagctcttcctctcagcaccagctttcctcatttcagccccagcaggcccctttggggtcactggaccacaccccgactgaggcctaagactttcctgtgctgcccctcaatggcacactcagggcccagccccccaaattgcacactcaaggcccagcttgctcacccctctgagaaactgtccctgacccctgggctgggagggcacctgtctctgcccatgtagggtgtctgtttccccgtccctctcccccaggagagcacgatcccatccagtggggagagcctggtatggagcgagtgcctaatagctgtgtggggggtgagcagcagggaaggaagggcagagcccccaaccccatgcagacacacctggcgaatggcaggggccccagggacacttggtcttgttggaccggggctggcatgatgctgtcccctccccaggaaagcatgcgggcgtacgccgccaatgtctacacctcagtggtggaagagctggcccgcggccagcagcgccggttcatcgctgtggagcaggagtttttccggctgtggtgggatggcgtcgcctcggaccagcagaaataccaggtaatgaggtcaccaggtgacacagttggcccagtrtcctggcaaagacccaggtggaaaactcaatggggcagttctagccagggccagggccaggctggcataaaccacagggccaaaaccccaccgggctattcacagccttgtttagatcaaggttcacggtgagttccatgcctgggagagattgctttcaatttaatcctgaatttctgtctattcttgaaaaaactgccagctctggcaacccagctgtgcacttccgtgccagctggcactaagtcagcagtgccccctgacaccaggcatcccaggtgtccccaagccctcaccctcttctctcatttgtgttatctgcctggcccccgggcccagggtctggtgacccttgatgagggtgcgatagtccctgtggtttgagggtaggcagcaggttgcttcatacagcatggagagtcagagtccccgctgcacagtgaggcagcctgggtcccatcctgctcccgcaccaggggacacgactagcccctgcgagccacagattccacttctattaaacgggggtgaccgccccattgcagaaaagtcatgccaagaatgaagccctggcgtgagcacccaggacgatactcgggggttcttagtttcctcccaggtatccacctgccttcagaatagttgctgaacataaagttcagggacgccaagtgacttgctcaagggagtgaagcggagaagggagagcagggcgtccaccaggccccgccagagtcacgggaaggagccggacatccaatggccacttgatgctgccagatagtggggttcttacctcaagttaaagagacattccaggttcagagagggcacgccactggcctgcagtcacacagcttgtaagcggcaggtgggattctgagccaggcatgcctgactcgaggcaggcctttccaggatatcctgtgagcgtcccatgcttcttcaggtggaccccaccaaacccagtggtctgtctcctagccctcaaagagaagcatggcctgcatggcccagtgaagacctggacaggaaacttgtggcagagctccctggaggcaggaattgttgcctgcttcattcactgctgaacccccagtgcctgaacagtgctggttgtgtagtaggtgctcacttaacatttgttgagtgaatgatctacatatagtgcaccttaagaaacaaaccaaaggcacagcctataaacagctgtgtgtacacatactgaggtgtgtagtgtctagggcaacaaaggtgttatgtgtgtagagacggggatgttaagcaaataggttaaaaatggtagtgatgagtgaaccttgggaaaggatatgggagctctttgttctattcctgaaacttttctaaagtttagaattagttaataaaataagatttaagaaaatcttatatatacaaatatatatctcaaataccacctgagggctgcatgatttctaggtggtgggaacacagtgtggaccaggacagacagtgccctgcttttatagagtaagcaagggtggggagttttatgcagggcgtgtgtggcgctgtaggtgtgttccccacagacccagccatgctcaggagccgtaactggcttttttctctctgcctgcccatgtcaaggtccgccagctcctggaggaaggacgcctggaatttgtcatcggaggccaggtcatgcatgacgaggctgtgacgcaccttgatgaccagatcctgcagctcacaggtttggccaccctaccctgcacccagggtccctcaggacctccagtggggctgggacrtggtatcagaacccccaggttctgagctctgtctgcccctcttagtggggtcggggaccttaaccagtgaaagcagtgatttgctagtgccatattcatgcctcaccaaggaagttgaatgtaggggttaagagcatggatgctagagtcagatggtctcaatatatcctggctctgccaattccctcctctgtgaccctggaaaggaatgtaacttcagtttcctcatagataaaatgagtttgatggtaatacctacctcaaagggttgttgtgagtattaaatgggataattcaaataaagcactttagtaggatgtgggttccctagtaaatgctcagtaagtgtttgctgccttccatcacaattaccaccttcagcaccataatgaccatgactactaccatcaccaccaccaccacgatgaccatcactaccactaccatcaccaccaccaccaccatcaccatcaccactaccaccatcaccaccatcaccaccaccatcaccatcaccaccaccaccaccatcaccatcaccagcaccaccaccatcaccatcaccactaccaccaccaccaccatcaccaccaccatcaccatcaccaccaccaccaccaccatcaccatgaccagcaccaccaccatcaccatcaccaccaccaccaccaccatcaccaccaccaccctttaccaccatgaccaccaccaccatcaccaccaccatgaccatcaccaccaccatcaccaccaccaccaccatcaccaccaccaccaccaccaccatcaccatcaccaccaccatgaccatcaccaccaccaccactacccttgaccatcaccaccaccaccatcaccatcaccaccaccattaccaccacccttgaccatcaccaccacccttcaccaccacaatgaccatcactaccactaccatcaccaccaccatcataactaccatcaccaccacccttcaccactgctatgaccaccactaccactaccattactaccactaccatcaccaccatcaccactaccaccatcatcttcaccactacaatgaccattactaccactaccatcaccaccaccccctaaacactatcaccatgatcaccacccatcactgtcgccaccaccatcaccacatccattactaccatcccctccacaatcatcatcaccaccaccatgaccatctccctcaccattgtgtccactgtcctcagcaccatcacccacagtgccgtggggcactctactcaccatttaccraatgcctttcacagtgacaccccagccaatcctaatggcgggctgayggtgaggcatggtgatgcccagtttcattttgcagatgtagaaactgagatccaaagaaatgcagtaactctctccagggtagatggccaggacttgagtccaggcctagggactgaagctccgagtccacagtcactccactacagcatgggccctgatttccccatttgtaaaacatccaggcagagagcaatgttgtcaaaggatgtttttggcactctcccttttctcrtctgtaatctggagtgttcccctgtctcagtttcttactgccttacrtctggactttgctcaaaccctagacttgcccttccatgagaaggaggcgtgatggacacagccctacagacagagctcctcctgtggccaggagctcagcccctgcttgtccccctgcatccccacaggcccagaggtaacaggggaggacagcraggctcagagggagcaccttgccctcagccgcctgctgtggctccctgactccagagcccctgctctttcactcccccatgtgaagtgtgggcaagggatctatcccaacagacttcccccacaccccttcacaagcccactgccagggaatgtgtgacactgtaggcgtgtcccccacctgcctcctgccccgtgccagcgaggaggctctggggcygtttctcacctgtgccatttcacgcagtgctccccctcattctccaccctcctcctcaagatgcagctgagaagcccctcccgcaggaaatctctgagtctctgcagttctgtgtcacctccccacttaaccgctgaacctcaagatgcccctggcagggacccccatctgactcatctcagcacccagcatagggtctggcccagaccactgctyactgggcaaggctgggcaaggggtgggygctgaactgccctgccctgagggtacccaccactggggtacctcgcctctggcctcagcccaccgtgcctaagtgctgataccccagcgctgaccctgcaggtctgacctggcaactggaagccycagggaagctgaggctgtgtcgctctggggcaggaagagcctccagagacacaagagacagcggctgttgtgaggctccatttccaaacctgtccaagctcatggggccctcagggtacagacatgtgggtttctttcatgataaccaccttgttctaggtacaagatgtacacgtatttttttttcagtcctcagggcaatctggtagatgggtaatcttacaaatgcttatttgtagagaagtttgaggctcaaatgctatccaaatgtgcccaccaccagctaagtgatgggacccagatccaaccctagcccggccgagtcaggaaggttacttgtggctgagcccctctcactggcggctgagccaagccctttcccatctgctatctcttagttgcctcagaacagcctggtagcaagtggtactgttcacagccccatttgacagatgaggaaactgaggtactgagagatgcgggatttatatatatgcagtaggtaacagaactggcgctcaagcccatgtgtgcctggcctgggctctttccttaacttgtagtccctagggcgggggmagagtgtgtgtatcagaccacccatctcagatgtcccaggcattctggctgtgaattatgtccacattgggctggttttctcagatatgttggggtaagaggggctggatcacccctcactgcttccgggccctttatcctccatctcaccttggtggagcccctgcctcgaggcaggccctggacagcaaaggaagacaggagcaggctggtgcagcctctagacctctgaccttcttcttcgggtatctagggtgccaaagcatctcctcaaccaagacccactcctggctgcccgccagggcctggggcrctgggcctgcccgtaagctcacctttccagcctttacctccccaactcctgctcccggcagtcacgccaacaccaccttaattttagatgtgacatttctagtgaggggaaaagcatttgttcccagcactgcagtgtcagggaaaggctgggtgtgggcagcggcccccgggggtaagagctttcatgcccctccctgaggggacactttcccagctgggatgtttagcggaggcccagcagagtggcaggtgccagagggaaagaacccctcacccctatcctgaggggagagagcccagctcccgcctcagaggtgctgagaggcaaagggtccaggtgagagtcaaggagacaccttgggccatcctggatgaccactgctgtcctggccattcaaacccaagctctcagccctgtcccccaaccccactcccttcccactgaatccgcgatccctctcctgtgtcacagactctcttccaccttctcttgtctctctgactccttccagcagtatttagttgttgttgttgccgttgctgctgttgttgttgttgttagacagagcctcactctgtcactcaggctggagtgcagtggcgcaatctcggctcactgcaatctctacctcgcaggttcaagcaattcttatgcctcagcatcctgagtagctgggagtacaggcgtgcaccaccatgcccagctaattttcatatttttagtaaagacagggatctcaccatgttggccaggctggtcttgaactcctgacctcaagtgatccgcccaccttggcctcccaaaatgctgggattacagacctgagccaccaagcccggcccccagcagtattgaaaacacacttaaattgtctctcttcaaaaaaaaattttttttaacatggggtccactgtgttgcccaggctggtcttgaactcctgacctcaacatcrtaaagcaagaccctccagctcaggctgtaatggcatttattcccaccaccccctcaccccccaccacctcccactacttcaccctcagcccctgcatcctggcctctgccctgcatgtgctagtgagcttgcttgtggcctggtcattatactggtgaggatactggttcagcagcttgaacagagaccaagtgactccaacaagaaggaaggtgtgtttctctcctgtggaagtctgcagtgcaggccactctggtgattgggtggctctgctccatggagtgacccagggatccacgttgcttccatcttgatgttcagccatcccccacagtgttgcctgcctgagttgcagtctagactggctcaccccactgagttgtccttccagcagctaggggatagggaatggtggagccagggcaggcagcttccttgtaaaaggcgacctagaacctgcccacatcactcctcacatttccattggccagaacttaatcatatggcctccctcaactgcagggactgctggggaatagagtctattttgctcccagtccattggccagagtggtgtcatgtgacctctaccagttgcaaaggaggctggggaatgtagtctctggctgggagtccatttgccctgctaaaaccaagaaggagtgtgtggttctgttactaaaaggaagaaggacagaatgtatatcggacgccaattaacagttttggtcatgaatcaccctgaagtctcaggaatgctttctgctggacggccagaaaacctaagtaaagctgttagtggtggaaggtatccaagttaccagcagctaatccgtacgggtctgcagcaaccccagttcttgcctcctcggaagaaagaattcgactgaggggcataaggcagaaaaagagactgaggcatgtttcagagcagaagtggaagtttatttaaaaaggctttaaaatgagaaagaaaggaaaatatgcttgaaagagtcccaagtgggcacgtgaaggtcaagtgctgtattgatccttgatcctaggactttataggctggtcccctttcccatgattcttcccttaggctgggctacccgcactcacagtgccctccttacccttgggaggtgagcacacgcactgtgtttaggaagttgcacacatgcccatctgacgctttcttcccttttccagtggagtgtccctggaaggtcaaactccgccattttgtctcttaatgcacctgctcgggaagtcacgtctccctggcacctgcattcaattaacatgttagtgcaacaggtgtggaccatcaggaaatgccctctccctagtgcyggctgccaatttctcacttctagagaggcaatgtgataattgccaaaccatcacccaacattcctagtgggtgggggaagagccctcccctgccccactcatgcttgtctaactacctgtaacaaagcgacttgagtcttaagaacatttacttaacaagatggggatagtttgggactggttctgcagtaccttgatatctgtgattctcatgtccttacccttgtggtcacgatatggctgccatagctccagccatcatgttaccagacaccacattcaaggcagtaaaaggaagagagggggctttctatacccatagtctattctgttggataaacttagacacactaaaatgttagcatttatttgaacaaacagtgattcctgaatcaggaagtactagactgtgagcagttcatggctccactaagggaatatgagagggaaacgtctataaggtgctcctgaaagcaagacaaagaaaacatttgcctacagtgaacagtccctagttagaggttggttggcagtttccgatgggtcaagcttaagttctcttttcctgtttccaccaagttagatttgggtttgctgacagaggaactcgaggcctggagccggctcagcctgatggcctcccagttcattacttaacaatgcccctccagctgccagacagagagaaccaatatctgacaggagggagtaagcgtgccacatttggcttagatcaactgtgattcgtcccttgaggctgggcatggtgcaccctgaacagagggaaggttctgcgagtgaaaaaggggtgctgacttggcagccttcagcctgcccccaccggctgccctgtctggtgcgaggccgtaccctccagagctcctggctcctctcagtgcggtgctgttgcccactccctccttcatcctgcagctggcactccccctgtgctccccccaccctctggctgctccttctccatcctctctgcttacatatgcacagcctccacccacactcctagtccacgctccccctgatcccctctcacctctgctgtgcacctgatgccagccccactcctcacctcccacagtcatcccctgccctgtcttgcttggccttgctcataggtctgactgctgctcggtcccagcatcccaggcctcatctgaggctcagccagggtccccaggactgcaagttcatcagtgaaaggcagtttgactctagatcagttatgagagttctctgaggcactgttcaccaatcttaaagtgcagattataacacccatctctcaaggtgttagaaagattatatttggggcaaggacttggggaatgttaatcaatgccttatacaagtctggggttttctttttccctgcagcactgaacccaatatctggttcactatggtgactcttaagtaataaatgaataaatgaatggttgggtgattctggcatggagtcctttgtattcatgatctatttccgtgtagcaaattgcccccaaacttctgagaacaaacatttcatatctacagctcctgtgggtgaagagctcaggagtgacttagccagggggttctggctcaggacctcttgaaaagttgccatctgggagtcaggtggggcagtgtcatctgaaggctggactggggctggagggtctactccaggctggctctcgcggctgtgagaggaagcctcagttcctcgccatgtgactggtcatggcacagcagctggcccccagagcagcgacccaggagagcaggcaagggcagccacagtagaagctgtgtgcccttcaccttctctcctcaagggtacacaggtacttctgcttcactgtgtttgttagaagtgagtcactgagtctggccaccctctaggccctaagcctcacctgttgaagacgcagcaataatttatggacatcttttcttgtggtttttttttttttgagacagagtctcactctgtcacccaggctgaagtgcagtggcaggatcatggctcactgcagcctcaacctcctgagctcaagtgatcctcccacctccacctcccaagtacctgggactacaggcatgtgccaccaccacgcctggctaattttttaaattttgtgtgcatgtgtagagatggggtctcactatattgcccaggctggtctcaaactcctgggctcaagcgatcctcccacctcagcctcccaaagtgccaggatgacaggcgtgagccacattgctggccttggacgtcttttgaaccaccgcacacttaggtttgaagttcacctttaaccttttattgttggtgatgtccaagacctccatagcatcatcaaaatcagtgctctatccaagttcacacaaaaatcctcacccctgcacgtgctgtaacatgcaggaaccttaaggacattacgcagagtgaaatacgccagtcacagaaggactgatgctgtgtgattccgctgatatctacaggcatcaaattcatgcagtcagggagtagaatgggggtgctaggggctgggggaggggcatagggagttagtgtttaatgaggccaagagcttcaacttgggaagaggagaacattctggaaagggatggtggtggtggttgtataacagtgtgaatgtagtaacactacttaactatacactcacaaattattaaggtggtaaattgtatgttatatgtacttcaccatgattaaaagttaataattaacaccctcacctctgcagttctgcatgaccctgcctggcccagtagctggcactgcaacccactggataggcagggtcccctggggtgaggatggggccgggaggcacaggcccgccctccaggcaccagcagggtgttgctgtctttgcagaaggacacgggtttctctatgaaacatttgggatccggccacagttctcctggcacgttgacccgtttggcgcctctgccacgacgcccaccctatttgcgctggcgggcttcaatgcccacctcggctcccggatcgactacgacctgaaggcagccatgcaggaggcccgggtgagtggtgtgccgcgtctgctgccgcccagcgaccgctcctcccttccttccttgaatcagagcacggtagaaagctgctgctctatgccgaagtgttcggaaattcttggcagctgcatagaccrcggggctgtcccctaacctttgctcttgtcgcctcctccaccaggagggcccccctccctgtaccccagcttctcacagagctgcaggcacagcttggctgcctcccgcttccagacccctatcyccatcagctgggcctgaggcggggctgactctttctttaggcccctcacagggactagagcagaatggcactcagtaagcaggggtgacaactagaggaatggcagggtgtgttcagctgggagaacagttaccagagacgctgtgattcttcaggtgtgagggcaactgttacaagacttaagtagcaacaacaaccatggtagacgctgccttcgattgtgcccttgggagtcccaggcctggtaccaggccctactcatccttcatttctttttcttttcttttgttttttgttttttgggttttttggggtcttttgggttgttgttttttttttttttttttttttgagacagggtcttgctctgtcacccaggctggaatgcagtagcacaatcttggcccactgtaaactctgcctcccgggttcaagcgattattgtgcctcagcctctcaagtagctgggattacaggtgagtgccaccacgcccagctaaattttttgtgtgttttttgtagagacggggtttcaccatgttggccaggctggtctcgaactcctgtcctcaagcgatccgcccacctcagcctcccaaagtgctggtattacaggcgggagccactggtgcccagcttcatcctgcatttcttttaaccctcacagcaaccttatgggacggtgtcatcatttgctagggctgccataacaaaggaccacagactggtgactcaagcaatagaaacatattgtcccatggttctggaggctggaagtccagggtcaaggtgtcagcagggccacgctccctctgaaggtgtgagggaaggggctgctccaggcctctctccttggcttgtggatgccccgcttctttcagtgcccccgtatcatcttccctgggtgcatgtttgtgtctcaattttccttttttctgaggacacccatcctattgtattagggcccaccctaatgacctcattttaacttgattacttctgtaaagaccccatttccagtgggcacagtggctcacgcctgtaatcccagccctttgggaggtgggcagatcacatgaagtcaagagttcgaaaccagcctggccaacatggcaaaaccccgtctctactaaaaatacaaaaattagccgggcgtggtagcaagtggctgaaatcccagctactcaggaggctgaggcaggacaatcgcttgaaccagggaggtgaaggtttcagtgagcygagatcgtgacactgcactcctgggtgacagagtgagactctgtaaaaaataaaaaataaaaaaataaactgcacacttggtgagaagtaatgagcttcctgcacctgggggcattcaagcagagttagaaggtgctaattctacagggtttggcagagaaaagcctgcatcgaggagtgggtggggtgaatgagcactccttccggagggcaaatcccacaaccagtcttagacggaaacggcaggggagagctcatccttgaaccactgagggagggccaaggtgagggcaggcgggagacacccagatggggctgagggaagtggagctggggcagccatgtggcccctccagcctcattcttctcctcggtttgcaggggctgcagttcgtgtggcgagggtccccatccctctcagagcggcaggaaatcttcacgcacatcatggaccagtacagctactgcaccccgtcccacatccctttctccaacaggtacgtgcccttccgcagtgcctttgggatctcagacagcagggtctgcccagcccctgcagctgttctgcagttttgtttttgtttattggttttaagacaagagcttctgctctgttgcccaggcyggagtgcagtagcgcaatcttggctcactgcaacctccgcctcctgggttcaagcgattcttctgccttagcctcctgagtagctaggattataggcacccaccaccacacccagctaatttttgtctttttagtagagagggagtttcaccatgttatctaggctggtctcaaactcctgacctgagatgatccacctgccttggcctcccaaagtgctaggattataggcatgagccgccgcgcccagccctattctgcagtttttgacaagagctccttaagcacatggtgtcccattcttcagcctccccagcagagtgggtggggttatcaaccccattttacagatgtggaaactgaggttcagagagggtaagtgaccagatcagggtcacccagctggtaagtaggggaggcaggatttgactccagttctgtgtgactctgaattgcttcttgttatgagtccctgtcccaaaagaggattgtttaaaggatgagatcttggctgggtgcggtgcctcatgcctgtaatcccagcactttgggaggctgaggcaggacaatcacttgagtccaggagttcaaaaccagcctgggcttcctagtgagaacctatctctacaaaaacttaaaaattagctgggtgcatgcagtcctagatgcttaggaggttgaggcagaagggtcgcctgaatccaggagttggaggctacagtgagctctgatggtaccactgcactccagcctgggcaacagagtgagaacctgtctctatttaaaataaaaaaaaaaataggccgggcacagtagctcatgcctgtaatcccagcgctttgggaagccaaggcaggtggatcacttcaggtcaggaatttgagaccagcctggccaacatggcaaaaccctgtctctactgaaaatacaaaaaaagaaaaaaaaaattagctgggtgttgtggcgcatccctgtaatcccaactacttgggaggctgaggcaggagaatcacttgaacccgggaggcacaggttgcagtaagccgatattgcaccacttgcactccagcctgggccacagagcaagactctgtctcaatcaatcaatcaatcaatcaatgatgaggtctttacatcagtgttcccaagaacctccttcctggccatgacaggtccccttctgctctcgcctcgcctgtccgtacctgccaggtgaggaagttgaatgtgctgacttccaggagccatccatcggcaccccatcccgtccacggtcctccagggcactgtccagtgtctctctaacaccctccaagctcacctgccctcaaccccagtgatctccctgcctctatcccgcctgggcctggagagcaagctgggttccaggctgcaggtgcagggataggggtgctgtggatgcagggggaaggcccccggacatgggtgtttccccacccgttcctgacgtggcctggctttgttgttggggctttggcacaaggcttcgtccccacccaccctttcccctcctcatccttgtccctatcagggatcacaatgaagaaggccggaggaggccaggcgcagtggctcacacctgtaatcccagcactttgggaggccgaggcaggtgggtcacttgaggttaggagtttgagaccagcctggccaacctggtaaaactctgtctgtagtcaaaatacaaaaattagccaggcatggcagcattgcctgtaatctcagctacctgggaggctgaggcaggagaatcacttgagcccacaagatggaggttgcagtaagccaagatcatgactgcactccagcctgggtgacagaatcagactctatctcaaaacaaaaaaaaaagaaggctggaggagtgggagagggaaggggcctggagacccttgggaataaatcgctcctcatccttgtcttgcggagctgcctcttgtccaatcacctcccgttcaccccgtggtgagggaggggtcctcaccctaaatggtagatggttgaatacacaccaccctacccagcacaggtgacgtccatagcagcttctgtttatcacatacaatcacagctcacacctyactcgccaaggccccgtgggagtgcactgtggagcggactgaacacgcaggggcagctgggtagcagcaagggggcgggtgccctccgactcctgcagaggacgtgagtggctcatttgaataatttcaccagctggcagggaggtggaaactgttgggtggaggaccaggtggggtgcagctggtctgactgatagtggaagagctagacaagaggacttttctgctggtgggggctatcaggtgacagcaggggactcctaggcccctgggggccttcaaggctcagatgtcaagaagcacatgggattttagcctcrctgtacaccttcttccccagaaggctttgggtgaagactcagtggggaccaggagtgtggagccatggaccaggaccccccgggggcagagaggataggcagtgaacccacattcacattcctggcttgctgttccaagcacccaccatgagccaggccctgttccaagcattctccctgtgatacctcacagaccctcgcagcagcccactgacggagatgctgtgagtgccccatcttacagaaggaaaaactgaggcacagcagcccgccccaggtcccacagctggcagacgtggtggagccagcgttggattcaggccaccagctctgcagcctccaygtggtggcagcagtcagccttggtctctgtgcagtcagacggccctgggttcaaatccgcactctgccctggccaggtgcttagcctctcttggaagaggaaagacaacaggcaaggcagagggggtgaagaacactggccgggattaattagcggtcactgccatttgtcagccctcctttgtgcccagcactgtttctagctcctttccataaatgactttcatttaatcctcacaacaacctgctccacattctaccagggagcttggtgaggctagaggtggcagtgctggtggctgatgactgtgatcccaatgctttgggaggctgaggtgggaggattgcttgagcccaggaattcgagaccagcctgggccacagagcaagacctcgtctctacataaaattcaaaaacaagtcgagcatggtggtagtcccagctcctggggaggctgaggcgatggcttgagcccgggagttcgaggctgcagtgagccgtgatcatatcactgcactccagcctgatcaacagagcaagaccctgtctgtaaaagaaacagaggtgggaatgctggaaggggctgcccaggttggagagctccagacaagggttccatggctgctaccccgaggctgcacagtgtgagcaaggaaggcacttaactgggggttctccacacccccagcctaaggcaaacagagaaagatgttaaatactgagcctgtctttatttaaaactctgacattttgttcctcatgggttttttgcattaattttcattttttaaagtactgcattaaaatatcatttatctcaactactaagaattgaggcacccccataaattttgtgccctaggccagggcctcacttgcctcaccaagcccccggcctctttggggtcctgagacccggggtctgatgggcgagaagttggcctgcgtgaatgagcaaacaaatctgtgacccaccgtcggtcatggagtgggagaattcagtctcagggtgaaatgatgtgccaaggtcccaaggctgggagaacrtggcacttgggtgtgasccctggctgtccacagagttcgtgtcttctgccctaaccttctgccctcgcacaggtcaggattttactggaatggcgtggctgtcttccccaagcctccccmagatggggtgtaccccaacatgagtgagcctgtcaccccagccaacatcaacctctatgccgaggccctggtggccaacgtgaagcagagggccgcctggttccggacaccgcacgtcctctggccctgggtaaggcagagtcccaggtgctgtgccctcaacacagcccaaggagcactatgcaagccctggtccctgcacccagggccaccctatccagacccagctaggcagccatgctcagcccagtggctccatcctccttccctgcagacccctgggcctctcccactctaccagcccctcccccacctggaaaagcaccctcacccacgctggcctctccagctcccactcagctctcttccctgcctgggccgggctggctcccggctcgggcactgcgtgccttagagtccattgagcttccgttgcctccgctgtaaaatggggatggtggcagcaggcttcataggcttggtgagaggtgaagcgttcccgggaagccagtgcccggcacgtcgtggccatcgtcacagctaacctttagtgagcacctgctgtgtgctgggcactgccccgtgggatatatttgtctcagccatctaatttgcaccactgggcctaggaagcaggctggtatccatttcacagttgaggaaaccaaggcccagagaggttaaggaattttcctgaggccacagagttccttagggtggctaggaaggggtggaatttgtgttcagacccagtcaggcgggccccagagcctgccttcttcatccgtgactgcccttgtgaaggcaagcttaagatcagtaactcagtcatggttattattgctgttattaatcattatattaattataataattaataatcattaattataatgatttggataagtagtaacactgatgggccttaagagatgcccagggccgggcgctgtggctcacacctataatcccagcactttgggaggccaaggcaggcagatcacctgaggtcaggagttcgggaccagcctggccaacatggtaaaaccctgtctctactaaaaatataaaaattagccaggtgtggtgaggcagaagaatcacttgaacccgggaggcggaggttgcatgagccgagatcaagccactgctatgggagctggtttggggcccctgttggccgccttggagactgggagggcagctggtggagggcagcgatcrgcccacccccactgggcgagcgccctgctcccacggcacaggatgttgctcccatgtccctgcagggatgtgacaagcagttcttcaatgcctcggtgcagtttgccaacatggacccgctgctggaccacatcaacagccatgctgccgagctcggtgtctcgrtgcagtatgccacgctgggcgactacttccgtgccctgcacgctctcaatgtcacctggcgtgtccgcgaccaccacgacttcctgccctattccacaggtacaggcttccagggrctggggtggtagtttggtggcagggagggtatagtccaygyaccctctgcccacttcagtggctgctcggcactgytctccaagccctggaggggttccaggcaggttctgtgtggggcgcaggggcagagactgaccctctctgctcactccacctggacgtcctggccrccacatgcaccacctgattcccacagggttcagcctctcaccattgcccaccacatgcagtttcctgcctctggcctttgcacaggtggtgcctcctgctgggagcggcctccatcaccttctcttcctgcatgagttccacataaacctcttctacgagccctttcctgatgctgaggctgactcgggcttcctttcactgcacagtcattactgggcacctcctgtgcatcatgcctgtgtcctcaggccagaactgggttggccaccagcagcacagcctgagagctaagagggctggctgtgagtaagcctctactcgctgcctgtgtgcaagtcatgaaaccaccctgtctccaaagggggacatttgtggtgcctcgtgcatagatagggttgctgtgaaaattcaatgagaagaagtgctctcagcctcctgccyagcacagaggcagggctcagcagatgtcctagmcctctgggtgctgctgtaacagtataccacagaatgggtcattgattaggaaacgaagtttctttggctcacagatgtagaggccgggaagtccaaggtggagggctggtgtctagagagggccttctttctgcatcacccatggctgaaggctgagkgcaaaagaacagccggacaagggggttgaacttgcttttctaacaatcccagtcccatgacaatgacattaatctgttcacgagggcagagccttcatggcctaatctcctcttaagcatcccacctcttaatacagtcacaatggcaattaaattttaacatgggttttggaggggcattcaaaccataacatttcccttccaaagagatgccacagatgaactccagctgcagggctcattctggcctgggcactgccttgactcacccatgacctggcttagtcctgcctctctgggccccagcctctgggtctgcatggtgaccagtggggctgcatagtccccggctcctgctgttgacaccacattggaggcaggtggggctgcacacacgggttgggggatgtccgtggatgtgggtgtggttatagtcaaggcaggaggagatatgttaatgtgggcatggctaatggtgaggtgggtggggtagtgactgtgggtgtggccacatctagcaggtagggatatacccgagtcaagttgggtgtggctctgtccaggtgggcgtggtgtccaggtgggygtggtatccaggtgggcgtggtatccrggcgggtgtgggtgggcgtggcgtccaggtgggcgtggtatccaggcgggcatggtatcgtgatgaccactgaggatgtggagcccctgccagactgaatggaatcgggcctcaccacccactctcaacatggctgcaaagctgtggaggaccccatctgacccacagggtgtggcctgtcccctgggccatgtgaccacccctcccagtctggttcaggaccagtgggggaagaacagggaatcaaggcaaatctgggcacatcccagacgccgaggagcaggaaagcaraagcaataggaagctcccttctgagacagacagccactccctgggagggttcagccctcctgcctcctgcatgggccctgggcatcctcatcctctctgtcttgcatcaggacactggctccctggggtctctgagcccttgctgcctcctaccatccatcctccctggacgcccagagaatccctgctgaaacgcatgcctgtcctggcctccccatgcccacgtcacacatgaaggcctctgtgcagtctaggcccttctcagtggggtcctgcccacctggctcctcctcttcccctctgggtctcccaggccctttgctcacacagctgttctgtgtttcctaggcaccctgggcttgcctccgatcaggatccttcagcaccccaccccacctgccccagtgcagcctgtctctcccaccctgcccaaggcccatccagggttttctgggcagttcctagtctggctatgggaggaggcctgagttgggagccgtaagccctgggctcgcygcctgcccggcctgcctccttgggtgaccctggcagaggctgcctctgcagccccagcttctcagctcttccagggctggagcttagcagacttctgggtcatgccgtctcaagctcaccatcttcccttgtctcccagaaccattccaggcctggacgggcttctacacgtccygcagctcactgaaggggctggcccggcgagccagcgccttgttgtatgccggggagtccatgttcacacgctacctgtggccggccccccgtgggcatctrgaccccacctgggccctgcagcagctccagcagcttcgctgggccgtctccgaggtaacaccacatttagccacagtggcaggattggaacctcccatgmtgcgcacctcccctcccttgtcctagccaatccttccagccctggggcactagaggccccactttacagaggggaaactgaggttccctttggttacaaggccagtgcatggtgaacccaggccaaggctgagaccacagcctgatccatccagctggtggcctcattaagctttgtagcagtttagcaaaagggataaaggacaaggtggagtggcatttgtgtccgacagccctgcctgcatccatatctcggctcagctgtgtgatgtcaggcacatgattcccacacccacccaagacctaattccctcctgtacaatgagaacaacgagcttgcccaggaggacggtggggcaattggatgtgctggtgtgcacagcctgcttggtgcagtggctgctgaatagccagttcatgagtttccgtctccacccatcccctactgtactgatgggaaaacagacccaagacagcctgtaacttgtcctcagtcacctatccaaaaaagggtcacaccagccatgacactgtaacagttccccaaaaggagctgctggcagaacatgtcattatgttgtgggagaaatgaggtgacttcagggtccwtcagagcagggggtccagagatgggggacaatgagttcccacaagggcaggaaaagttgggcgagctcctcagcttctcttggcctcagttcctccttctgtaaaatggcggggactgcccccttctccactggcacctggcaagccagaatgagagccagcgcctagtaggtgccttgtaggtgctttgcagagtcaggtcctgatcctgttcttcctcccctctgggggttgctgcaggtccagcaccatgatgccatcactgggactgagtcccccaaggtgagagacatgtacgcaacgcacctggcctcggggatgctgggcrtgcgcaagctgatggcctccatcgtcctagatgagctccagccccaggcacccatggcggccagctccggtgagcagggccctgcagggaggctgtggcccctttatgaagggagagcctgaggaggtcaggggaggggctcaacgaccccagcttcagactctgagtccacatcacccatatcgcccttccccatggtgagagctcggacaggtggcttcagtcctcccagcctctgtttgctcatccgtgcaatgaggaagggttgctgatgttacaagaagagccagaaatagcagctaacatgttttgagcatttactaagctcaaaatacccttcatgcagtattgaatttaatgcctcacaaaatctgtacaaaataggaatggttactgtcctcattttacagccgaggaaacggactcaagttatatgctagcccagggccactcgggtaggaaggagcagagcagggattgaacctgaacacggtgctgcccagccttggcagagagtacgccggtgtcctcaggggcccggtcccttcctggctcctggcactccctcccgaactccacttggctgacatcacagcagggcagccgtgggaccagcctctttgactgtgagttttcccacgtgtagagtgactgatcacatgccagtgtgcctgggactgaggggtttccaaactgggaagatcctggacaaatgaagacaggttggcggccctccgcccgcatgagacttttgtgtgcataggccgccaggtcccacccacagcctgcacctggtcatcttgcacttccttcttgttttttgttttttgagacagggtctcgctgtgtcacctaggctggagtgcagtggtgccagtcataggtcactgctgccttagactcctgggcttgagcgatcctcctgcctcagcctcccaagtagctgggactacaggcatgcactaccacacctggcttattgttttatttttattttttttggagagacagggtctcaccatgttgccaggatggtctcctaactcctgggctcaagtggtcctcccaccttggtctgtcaaaatgctgctatctggccaggcatggtggctcacacctgtaatcccagcactttgggaggccgaggcgggtggattacgaggtcaggagatcgagaccatcctggctaacacggtgaaaacctgtctctactaaaaataccaaaaaaatgagccgggtgtggtggcgggcgcctgtagtcccagctactcaggggctgaggcaggagaatggcgtgaacccaggaggcggagcttgcagtgagccgagatcgcaccactgcactccagcctgggcgacagagcgagactccgtctcaaaaaaaaaaaaaaaaaaaaagttctgggatcacaggcaagagccaccatgcctggctgccttgtacttcttggtgtcccagctgtggcctgcccactgccctagcatctaacatgcccttcccctcccatctctgtctgtgtgtaatcccatccaacctgcaggctctggaaggccccctggcctcaggaacaccagccaggtggaagagacagtggcagaacgggagctctcagctggggtctggcttcactgccaggtggggacttttgaggagctgtcattccaatgaacacacaggagaggcttccccaagctgtgaataggtagagaagaccaggaaagtgtccccrgcagagggaacagcccaggcagaggcagggaggctggaagtatgtgctgggttcagggatccaggagttctcaggtgtggccagacctcacacacatgggctggtaggatgcaacagaaagagaggccaggtcctcatcacagggrcctaaaatgccaggctaggcaatggacttgaccctctgggctccagagaattctctggtggctcacagtgcccagcactcaaagctttgsagccaggccttagaagctgggtcaccttgggcaagtggctgtacttctctggacctgtttcctcatcagtaaaatgggctgacagagatgtgtgaggagcgaatagaacctcagttctccagggcgacacggacaccttatgttccgagcccctccgcctgccctgccctggaagccagactgcagaatgtagcccacgctgtgtctgtgggaaacacctgttggcctgcccccttcctggctcccctgggagttctggagggctgcatctcacctrcctcagtttccctcatactgaggtgcakccagtgagcaccccattccagaaggtgagtcacatggcacaagcaaagcctcttctctgtgtgcagatgcaggacctgcaggacattttgcctcggtctacaacccgctggcctggacggtcaccaccatcgtcaccctgactgttggtttccctggagtccgcgtcacagatgaggcgggccacccagtgccctcgcaggtatggacacaaaatcctgctggaggggccttrgctgcttgctgaacctgctctgggccgggcacattgtctcttctgaccctgcaagggaggccttatcacctttgttttacagaagaggaaactgaggctcagagaagcaaagtggggtttttttcccaacaycacccaattctccacttttctgacaccaactgagtgtcctaaaatcaattcattcctgaattgagtacctggagtgagcacagaccccacgagttaggggcccaaaatctcacaagacccctaatttcagacaccagccacaaatggggttcctgggctaccacacttgtgtcctgctgactgaattctggggttcccatgatacacacacacacaagtttgataattcattagaacagctcacagaactcaggcaagtgccatacttaccatgacagttttgttagaaaaggtacaactggctgggtgtggtggctcacgcctgtaatccaaacactttcggaggctgaagcgggtggatcacccgaggtcaggagttcgagaccatcctggccaacatggggaaacctcgtctctaactaaaagtacaaaaattagccaggcgtggtagcatgcactggtataataattgggaggctgaggcaggagaatcgctttaacctggaaggcagaggttgcagtgagctgagattgcgccactgcactccagcctgggcaacaagagtgagactccatctcaaaaaaaaaaaaaaaagaaagggtacaactcagggacagctgcagggagcactggtgaggtggaagcagggagggcctagcatcccagccctctaacccgggctcgcttccttgggagcagccccatcctgaagccacctatgggccttgccagaaggcacctccacagcataagctcagataaggttggaaggggcttgttatgaactttagaagacactcctatcactcaggaagttccaatggttttaggagctctgtggcaagagctgcagacaaagaccaaatctatctatgtttactgtaccacacagagtccctgaggtcacacagctgcgaggtggcaaactcccaacctccaaaccttccttggtcaatcaaagccgtggttcgagtgaaagtgtgacagtctgcccttgtaggaagacatcacccagggacacacagccgttgaggggagttggatctacccagcggactgatactgggcttggggcatccaatgtggccagaagccgagggccatctgtgtcatcatccctgtcatcccctcatgcactcggaggcctgctgagactaagggactggtcaaagtcccccagtgaggaagaggtggagcaggctccatattcaagcaccaccagccgtgagctgagccttcccctgcacccaggccttgcactgtgcccagcactaatggggtcacgctatgggagataagggcctcatctgtcgcagcctgcttgggctgctatgacaaagtctcataggctacatggcttaaatgacatacatttatttctcacagttctggaggcaggaagtccaagatcaaggtgccagcatggccgggttctggtgagggcctcttcctgcttgccatcttcctgtgtgtcctcacatggcacaagaggccaagggaactctctgaggtcttttttacgagggcactaatcccattcttgagggcagcaccctccgacctaatcacctccccaaggccccactcctaagtgatgacttggaatccggacgtcagccatttgaggggacacagacattcagtccgtggcatcactcatgccaagtgggagttaggaggtggcattagcctttcaactgttgtgccctgcttacactttttaaaacaatttttactgtcagttttcctttttttttttttttttgagacaaagtctcaccctgtcatgcaggctggagtgcagtggcacaatcacagctcactgcagcctcaacatcccaagctcaagttgattctcccacctcagyctcctgagtagctgggaccacaggtgcacaccaccatacatggctaatttttttgtttgttttttggtagaggcagggtcttactatgttgcccaggctggtctcaaactcctggcctcaagcaatcctcccaccttggcctcccaaagagctggaattacaggcrtgagccaccacaccaggcctgttcacactcctgtttgctgggcccccttgtatgggctgatccctagaaaggcctcacatgtgggaagctttccgtcactcccctgcctttgggaatatttgtgatctaatatgaatttccaccctggcatgtgggaaagccttcaggaatcttaaaggggtgctttaatggaggtgccgatgttaggtatggggctggactgcttttgtccacaccacccagacaccccacatgggtcaggccaactccggttccagagggcgccagacacgccacccagctgacccttcttggggaggyggaggaggggctgacatcactcattcactcagcaaagctcccgaacgcccatcctgggcccagccctgggctgggtgctgggcccctggacctgagcgaggccaggccccatcccaggacacagacatggatggtgacagtgtggagtggtgactcgggagccaggggaggggccctcggctggaactgagaccgaggaggagtttgtccagcacagggagaggcgaagggagggtatgggtctgagcagacccccacacacaccccttccccactcagatgcagtatccgttaggagtagattccctcagcatacatttctggagctcctactgtctgtcagcccctgttctaggcgctggggatggtgtactaaccaaacagacaaaatcccactgcctggggcatctattccagtaggggagacaggtgataagtaaaataagaaaaatatggaatatgataggcgatgaccaccgtgagggggacagtcactacagcaagttgcaggggctggggacacattttaaataggtgggccaggccgcatcaatgtgggatcaggcagacagggaacaggtgtctgctgtatttgggataaaggctgggtcgggaggcgtgtacaccattattgggggggcctccccactggggcacaggaactgagggggcacagtgccctcctccagcctccctctccaaatcagacacctcggaggtgagcagaggccaggagggttaacctggaaaagtccgtccacgtggggatgagaagattgggggatggcccctcccaggagaaggtagtccaggtggagggcacagcgtggcacaggctcagaggcaggaaacggcaggagtgtcaggaaggaagggttggtgatgctggagccccaagggccagaggacagagtaaggtcaccgcagggaggaggctgggtcccagaggaggcttccttccccagttgcagcagacaagagtctcgaaaagcttgctttggttgctgcagtggatgggttggtaggcacaggagtggatgtggggacagcagtgcagatgctgggcagttacctagggaggggccacagcagctgtgaccaggcagaggccacagggaagggagatgaaaggcctcaagaaggcggtggggggccttggtggtgggtgggagtggctggaggatgggggatggggattcctgggggatggggaaggggagtgactgagggatgggatgactagggggtaggggtggagaaagccggacagcggggagcagaaggtgcagggtaggtgctggaagggccatcgttggatggggatgctgcagggagcagatttgggtgggatggggtagctggtgaggtcagctgttgacatccacgtggaggcgtcaaacaagaagctgtattcgtggatctcgggttccagaagaggtcagtggatttgggtttgcttttgggagtcatcactttggttgatgaaggatgattaaaggagctggggktgttcaggagctcccagttcaggaggtgggagtaagagaagctttggggaccccaagaaccagctatcttcaggtcgctgaagggttctcccaggactgatgtggtttgtgggggtccaaggggagaaagccagaactgggggcagggaggagaaatcggcaggatccgagagatggaaagacactgctgcctcagcaagtagtgagcaccccattccagaaagtgtgagagctgacagttaacaagtctcatcctgctggccttgcagatccagaactcaacagagaccccatctgcgtatgacctgcttattctgaccacaatcccaggcctcagttaccggcactacarcatcagacccactgcaggggcccaagagggcacccaggagccrgctgccactgtggcgagcacccttcaatttggccgcaggctgaggagacgcaccagccatgcgggcaggtacttggtgcctgtggcaaacgactgctacattgtgctgctcgaccaggataccaacctgatgcacagcatctgggagaggtaaggtgcagccattgctgtctctgaggcacaggcatgcctggagcctgggcatgtcaggcccctacctggattctccatttgctcacttgcctgggggaaggacagatggtggtgaaaccccttcctgctattgtgatctttaattttagaagtgtgagcctgggccagtgcaggaaaggctttcttatactttttcattccagggctattgatccatagaaaaaaatgagcactgagggactcactctgggaaaaaaaaattaccactttttttttaatttagagaaacataaaatctctattcagtaaatagtgttactgtctttaaagcaggacgggactttcaaaatcatctaatcccacccacccacctgtctacttacccatctattcacccaccyacttatctacccacccagttatccatccatccacccaattatccacccactcatccatccactcacccacttacccatccatccatacatctacctacccacccattcatcatccatccatctacccacccacctatgtacctacccattcatccatccatccactcacccaaccacccattcattcattcattcattcattcatgtattcattcagcagctatttgtggacatcagagtgggcagctgacctcccaagaaagacctcgtggctggtttatccttcctaggccacgtccggtggagtcttcatcaggcccagctgcctctgccagaatactcaccttgtctcctgatgtgaccttctaacggagaggggtacatggcagaaagtgaggggacaggaaaggggagaggggagacagaaaaagaggagggagagaagaagggagaggggcatttgtactgaggtgggtatcaggggagctcagctcaaggtcactgtcagcagctccctgcccacagagctccaggacttctctgggaatggggccccagtcaggtctgtcctcatctttccccagtggctcctgagggaaagtggggcaggtgcaggggtgacagcagccagcatgggtggctggcaaggggggagttgggcagaggagctgcagaaatgggagaaaccccagcatggtccaagcctgcyaggttaggccaggagaggcagaatgtgccctgtccgttcctcactcaggccccatgcccyctctgtacatgccccttagggcagcccacggaccccacatgcctaagccagggtcccacccggcatttccagcactggagctcaggctgtcctgtcccgtttgtggccctgtctgtctctcttgttttgaactccagtgaggacaaaggagttcttattgggctcccaaaaccccaccaggggtaagccttgcaaaaccagtgcctgtcacctgagcagaaaggaggagctgttggtattcagagtaggggccatcgggagacgacacctggggccaggccccaggcctcgaagggcataggggaggttgctccataggaaggagacagcctgtgcagaggcctggggtgggaagccaagggtgcagacaccaaccccagggcagtgtgggttgaagggagcgcttctgttccttatgtaacagcttgactgagatgcacttcacataacacacaattcacccatttaaagtgggcaattcagtggtttctggtgcattcacagagttgtgcagccatcaccacaatcaattttagaacgttttcattactccagaaagaaacttcatgctgttgagcaatcactcccccacgggccctggcaatcctagactatttctgtctatayggatttacctgttcatacaatatgtggtccttttgcaactcacttctttcacttcacatatttttccccctttttattgattgattgattgattgagagagtctcactctgtaatctaggctggagtgcagtggcacaatcatggctcactgcagcctcaacctcctctggggctcaagtgatcctcccacctcagcctcttgagtagctgggattacatgtgcataccaccacacccagctaatttttgtgttttgcagagatggtgtttcaccatgttgcccaggctggtctcaaactcctgagctcaagtgatccacctgcctcagcttcccaaagtgctgggattacaggcttgagccaccatgcccaacccacaacccacttagcatgttttcaaggttcatcagtatcgtagcacgtatcagtacttcgttccttttcatggcagaatactattccatcgcatgtatgtaccatattttgtttatccattctttagttgatggacatttgggttgtttccacgttttagccactatcaataatgctgctctgaacattcatgtacaagtttttgtgtggacatacattttcgtttctcctgggtacatagctaggagtagaattactcagtcacaagctaactctatgtttaactctttgaggaactgcccgaccgttttccaaagcggctgcaccattttctgttcctcccagcagcagatgagggttctgatttcttcacatcctcgcccacacttgttattttctgtcttttcaattatagccattctcgtgggcgagaagtggcatctcatgatggtttcgatttgcatttccctgctaactaatggtgttgagcatctcttcatgtacttactggtcactagcatatcttctgtggtgagatgtgtctttagatcctttacctatttttaaattggcttgtcttttattattgagttgtaagagttctttatatattctagctacaagtcccttgtcagatttatgatttgcaaatccctcctcccattccatggcttgtctttttactcttttgatggcccctgggggagctttttaaaaggatcgtgyggggaaggggtccagggccagaggcctcaattcttttctttctcctcctccaccagcactcagtagaaccctccacagcctgcctccctttccttccccaccctcaccacaatcccacagagaagtgggtgcagaggccatccacctcattgtccgcccacagccaggccagactcagatacaaatacatcacttgtgcacttggttaggccaaatattgcattttacaattaaaatacttgaccccctcctgctcttctcccatcctctgtcctaacacaaacatcctaatagaagggagggagcacagaatttaaagtcggggctgaatttgagttctggcttgcacacttcctagatgtgtgatcttgggtacatgatgtcacaacttccagcctcggatgcctcgggagtgggatgggttaacagtccctgcctttgggggttgggagaatttaaccaggtgaagtcagtgaaggctctggcccatgacatggggtctgtacacatgggtgtcctgctggacagctcagagtcagcatgacaaaagcccgttcctgcactggtttcgcttgcagaccacagcctgggtgagccagttccatctcttgggggtgccctctgctgacggctcacggttcctgtctgcaggctctgtccgtctyctcgtttgtgacccattctgggacagcatggagtctaaggccacaytggctgtgggtggggtctcagggcttctagatgagctgagtcacatggcctcgtgagtgctacgcaggccactcagatggcatctggagagagaggcttgccagccrgtgtctgtaagaccttgtgcaggatgagaatgacatcttctctctcctgcctctgcagacagagtaaccgaacggtgcgcgtgacccaggaattcctggagtaccacgtcaacrgggatgtgaaacagggccccatttccgataactacctgttcacaccgggcaaggccgcggtgcctgcgtgggaagctgtggaaatggagattgtggcgggacagcttgtgactgagatccggcagtacttctacaggtgcttcccctrgggtgacccccacagcccggcacacagtcagcgcacgcgtgcaggcagctcagtgaatgagggtctgtctttgctctgaaccccagcttccgggccgtggttgacacgtggtctgatgaagaaatgaattgctctggtgtctgcatgctggctgcgtttgcgtgtgctgtgtcacgttggttgggagctaagttcagagctgggagagagacccacagaccctggggcccacagagcacctgttcttccatgatcagagcagacgtaaggcaggcccggcatggcagccctgcggtgtcggggaaccaggctgctcccagccgctcggggtcctgggtggtgctattgtccacatggcccaagaaggctccctgcctttcggcgtaccctgccctgcccaccctgcccacatgaaggaagggaagcaaaaaggaagcatctagaaggttcctggagcttcacttactgatgctcccttctcctccaggaacaygacagcacagaatyacacgtatgcaatccrctcccggctcacccatgtgccgcagggccatgacggggagctgctctgccaccggatagagcaggagtaccaagccggccccctggagctgaaccgtgaggctgtcctgaggaccagcaccaacctaaacagccagcaggtcatctactcagacaacaacggctaccagatgcagcggaggccctacgtttcctatgtgaacaacagcatcgcccgggtatgtcctgcaatgcccacaaggcacgctcccaayggcgcctttcctggacccattaagcatcaaattgcagcagtagaggccagtagaggcctccagtgagaatgtttttttccttttttttaagatggagtctcactctgtcacccaggctggggcgcaatggagcgatcttggctcactgcaacctctgcctcccaggttcaagcgattctcctgcctcagcctcccgagtagctgggattacagccgcctgccaccatgcccagctaatttttatatttttagtagagatggggtttcacaatgatggccaggctggtcttgaacgcctgacctcagatgatccacccgcctcagcctcccaaagtgctgggattacaggtgtgagccaccgcgcccggcctccagagagaattcttttaaagcctgtgtatctgcccgttcagggcttgagcgtgcaggctgtgagtcagactggtgtctgaattctggtgctaccacagacaagaatagtatgtgccttggcttgtgcctcggtttcctctcctgtaaaatggctccttcatcaaagggtcattctgaggatccatgagatgatgcgtgrccagggcttggccagggcctgcacccatgtcagctgagctgtatgctaggaagccacagagctggtgtctgaaccccagtctgttggtctccaaagtcagggtcccagccccatgctgctgctgtgcctatggggagcaccagctggggtggmcagagggtgatgcctgacctaccttgccctttgccccaatcgcccacctggcgatgtttctgtctgcagaattactaccccatggttcagtcggccttcatggaggatggcaaaagcaggcttgtgttgctgtcggagcgggcacatggcatctccagccaagggaatgggcaggtggaggtaggaggcayggtstgtcctacagcagcccctcgcggccccctacaggcatgcccaggtgcaagccgggcctctcggacaatgccttcccgcaggtcatgctccaccggcggctgtggaacaacttcgactgggacctgggctacaacctcacgctgaacgacacctcagtcgtccacccagtgctctggcttctgctgggatcctggtccctcaccactgccctgcgccagaggagcgcactggcgctgcagcacaggcccgtggtgctgttcggagacctcgctggtaaaggggcaccctttcagagtaacatcatcactgcctcagcaccagccaggcsagggcgggccttgggaggggcctgtgccctcatgactctgggcagcttttgggcaggaagcgacctcagggacctctagcccaagcccctcatttaacagatgggcaaactgagggcaaacagtggctcacttaaggtcatacaactaggaggtacagagctgggactcacccatttcaccatatgcctctkccctgtatcttctccattttcttctctgatgtatcttttcctttcttaatatgacattatgtcaccatgtcactttaggtctggaggcttagcatttaaaagactggtttgttagctgggcatggtggcgcatgcctgtaatcctgtaatgccagctacacgggagactgaggcaggagaatcgcttgaacccgggaggcagaggttgcrgggagctgagattgcaccgttgcaccccagcctgggtggcaaagcgagactctgtctcaaaagtaaaaataaaagacaagttgggtctgaatctaggtgtgctgtcaccaggtgggggtctttctaatctatagtctaacctraaggacttattctgtacctccactgagcttctgtagatcagatcaacaaccatgtagttctgtgtctctataaagtagcagaacatgagaaacattaaacaatgattacatttaaagatggtcttttggagctgcaagacctagatacaatttgctgccattctcactaatccttaaactcttttctttttctactcacctatggaggttttgattagcatgtgcttttaaggttctccctgctttggttttagagccagaacccagggcagtagccagcaggcaggctgtcactcacccatgcaacaagcatatactgagcacttgcagtgtgcctgtgccatacactggagatgcagaagagcagcccggacccaggagagttttcctgggctgttggacaggggaggcatgctcgtatagagccaggattcagggtggagaaggagccatgccatagagggcctggtgtttcgtgggtgtagaggagtgtgagaccacagctgggaggaggtcagggatcaggtccagggggtgtcaattaaggttctttggaagtaacrgagcctgaaggggcagctatttgggcagagcctggagaagctcatggaatctaaggaggagctggatacaaggtccagacaggcatggggcagggcagctctaggcatatcaggagcagaggctcacagccatgtctcccaggacggccattgagccacctctggttcccttgcttcagattcccagaagaggaaatctgattggcctagcagggtcaggttctgctcccagaccagtcagtggttccttctgtgtagctggggcttttcctgcaaagggagatgaggccatgtctgagaaagccccatggctgttgtcagctccatcccacctggcctcactctggtctctgttggttgcaagtaacggaaacccaacttgaactagctgagcccccagggagagtgtatggtgaggcccacataaccaagggaagggcagggtgtaattgggcctcagggcctggagccctcgtgaggctgtccttgttcgtctctcacctgcacttctctctgtctgcagactttccttcacctcccacctgggatgtgactctgaacagctctggggctgctctcaaagagcasctctgtcttccccactcaaaaggacctaagacttggactttccagttccaagtgcaaaagtcctagggaaagattctgattggtcctactggggtcaggtggcccatgcctggaccaatcagcatggcctggggtattgtaagaagatggtagctccagctgaacatctagacctgaaaggagtaggggctgaggtgycttctgagcagagagaccagtagatgacaaaacaggggtggaactggcatcccagatcttgagtagaaaacagggttctggccggacatggtggctcacacttgtaatcccagcacttcgggagggcaagacgggaggatctcttaagcccaggagtttaagactagcctgtgagaccctgtctctacaaaaaaatttttaaaaattggccagggtggtggcccatagtcccagctacttgggaggctgaggtgggaggatagtttgagctcaggagtttgagactgcagtgagctgtgattgcaccactgcactctggcctgagtgacacagcaagtccctatctacaaggaaggaaggaaggaagggagggaggggaatggaatggaagggaggggaggggaggggagggaaaagaagagagggatggaaggaaggaaagaagggaggaaggaaggagggaaggaaggaaggaagtgagggagggaggggaagggaagggaacggaagggaggggacgggagggaaaagaaaagaagagagggagggaaggaaggaaagaaggaagaaaggaagagggaggaggaaggaaggaaggaaggaaaaaagagggagggaggaagaaggaaggaaaaaaacgaaggaagaaaggagagagagaggagagggctgtgcctgaacttgccttgttatcttgaataagctttgtgccctctgagctctttcctcgtctctactttgagatggttaggctgaggagagtcagggtcctcccagctcttaagctctatggtctgagcaaaggcagggaagtggaggcctggggcattgggagcacaaacactttgggctggtgcggggtaggctacccacaaggatgcatgggaagtggctggcaggggcaggggcatgtaatgtgcagagctctgagtgccaggaggaggagttgagccccaaaccctctcctcactctgtccatctgccttgcagggamtgcgccgaagctcccaggaccccagcagcaagaggccgtgacgctgcccccgaatcttcacctgcagatcctgagcatccctggctggcgctacagctccaaccacayggagcactctcagaatctccggaaaggtgaggcaggtgccctggcgtctcagacctgctcctccctccctgagtcaaacaggccaccgggcccamcaccagacaggggctcaccttagagctatcatggctctgcaaggtcacctggtttcttatctggcacatggggagagtgaggcccagggagagtcagtgatcagtcacttggcaagctggaggcgaggtgggcctggcccccagccctgtgaccccagcgcattctgaatggatccctctcagcctgccacccccagctgagactaaggaactagttaaagtccccctgacccccaggttgcctgccagtcctacttcttccagggaaacctcctggagcccccaaacacccaaattcccactcatcctccaagttcaggcagcctaactcttgggagtttccactcactcattcaacagcacgtctcgtgccaggctccggggaatgagcaatgaccaaggtgggcaaggtcctggctttctgagcgcttggtctagagcagaagcaatcaagtcaccaggcagtaatgacaaggacaagaggaatccccctgcacagcatgatggggggctccccgaggaggcgacwcctgctgggaactgacttgtcctgttgccagagccccagctgcacctcctctgccccctctacaccgtgagcagtggaaaggcagggtcagactgtgcctcagccatcctcaggtccccaaggcctggcacacctgcagaattaagaatacgaggaaaagggtggggcgcagtggctcacacctggaatcccagcacttaggggatccgaggcaggcggattgcttgagcccaggagttcaagaccagcctgggyagcataggaagaycctgtgtctataaaaataaaaatagaaaagttctctggtcatggtggcgtgtgcctgagcctgctttcccaggcacctgcagccgccttgtgaaatgggatccctcaccattcctgctgtgtgggacacaggaggccttccctgactttggagctggaactcctcaccaccacaccaggagatgtagaagcactttcacaaacctcttggcttttgtgatcttgggcagtcattcccctgtgccattctgaaaaccwgctaccccatagccccatgrtagcttcttaaaaatgggccaggcaaggtggctcacatctgtaatgccagcactttgggaggccgaggtagcaggatcacttcaggccaggagttcgagaccagcctgggcaacatagctagactctgtctctacaaaaaaaaattaaaaaattaggcgggtgtggtgatgcttgcctgtggtcccagctactcaggaggctgaggtgaaaggatcacttgaggccaggagttcaaggctgcagtgagctgtaatcatgctacagcactccagcctgggcaacagagcaagaccctgtctctaaaaaaattttttttttctttgagacagagtctcaatctgttgcccaggctggagtgcagtggtgtgatcttggctcactgcaacctccaccacccaggttcaagcaattctcctacctcagcctcccgagtagctgggattacaggtgcccaccaccatgcccagctaatttttgtatttttaatagagacagggtttcactgtgctgaccaggctggtctcaaactcctgacagcaggcaatccgccctccttggcctcccaaagtgctgcgattacaggtgtgagccaccacaccctgccaaaattttttttttaatactgatgcctcaattctaatcccagacagattgatttagtcagctttgaggcatagctgcagagctgaggttctaccagccagggtttaggaagcacctgtgttaaccaggtcctctctccaggaccttgaactcagtgctttcctctgagcctcggtcttcccatctgtaaaacgggagcaatggcaatgagcctttctgagtgggaagatcagggatgggacaggagatcacatacatcatgtggcaaatgacagcattatatcagtcagggtggctggcgtatgctgcagtaacaaagagccccgaatgcccacggtcttaacagtatatattcatttctcccccatgctgtgcatccagtggggttagcaggaaggtttttcttgctgtggccaccacgccccccgctgatggagtttgtattgcagcacgtgcttcctcactcaccatggcaagaaaaagcttctgccgggaagtactgcgtcacttcagctcactttgcattggccacagaggccacgcagcctcccctgacttcaaagggggcagggtaggagagactggagtatttgaggacatgccccaatatgcccacaacagtggacgaggatggaaacattgcagctggtgtcatggtgggcagccttacagtcggccagacctgggtgggaatcctccctctgccgcgcaccagctgtatgccttgggcacgtgactgcccctctctgagccttggtttccttgtcgagtgggggccatgtcagctgtctcacatggagtctattagtctgttctcatgctgctcataaagacatacccgagactgggtagtttatgaagaaaaaaggtttaatggactcacagttccacctggatagggaggcctcacaatcatggcagaaggcaaatgaggagcaaagtcaygtcttacatggtggcaggcaagagagcgtgtgcaggggaactgccctttacaaaatcatcaggtctcatgagacttattcactatcacaagaacagcacaggaaagactcacccccatgattcaattacctcccaccaggtccctcccacaacatgtggacattatgggagctacaattcacgatgagatttggttggggacacagccaaaccatatcgaggaggttacrgataggaaatggagctgagtgtgtaaagcagcgggtatagaccagggrcattggggttggttgatgagggtcttcactgccaccttccttctgtccccaaaggccatcgaggggaagcccaggctgacctccgccgtgtcctgctgcggctctaccacctrtatgaagtgggcgaggacccagtcctgtctcagccagtracagtgaatctggaggtgaacttccccacccccatccagaccataagccagggaagcaaaccctagatgaagccccaagaaactgccttggcaaagagatccacgagggcttcctcccaaatggacgctggtatgggccccaccccgcccttcttcatggtcttctgggtttgycaggtattacaactggcctggttttttagggttttttgtgtatatgtgagacaggatctcactctgttgcccagtctggggtgcagtggcacaatctcagctcactgcaacctctgcctccctggctcaagtgatcctcccacctcaacctcccaagtaactgggatcacaggggcgcgccaccacgmtggctaagtttttttttttttttttttgagacsgagtttcgctctcgtcccccaggctggagtgcaatggtgcgctctcagctggctgcaacctccatctcccaggttcaagtgattctcctgcctcagcctcccgagtagctgggattacaggcatgtgccaccacgcccggctaatttttttgtacttttagtagagacagggtttctccatgttggtcaggctggtcacgaacccctgacttcaggtgatccacctgcctcggcctcgcaaagtgctgggattacaggcgtgagccaccaagcctggcctagtttttttatttttagtagagacacggtcttgctgtgttgctcaggctggtctcgaacgtctggcctcaagcaatctgcctgtcttagcctcctgaagtgctgggattacaggcgtgagtggcctgtattttctttcttatttattctgtggtaaaacttttaaaacacagacaacatctgtgtaatccaaaaacaaaacagattccccatagagttgctttgaaaggtgacttagagtcagacaatccagggtccacacccaggcccctctacgggggcatctccggcaccccatgcctctgggcctcagtttccccccatgtaaaatggggagaggtgagagttctttgcccagaaggttgctgagaggccctggcactaaggggcctcgtgcagtgtcagggcccccaggcctcgtccccttccaggttcccctcttggctgatgttgccctctcagctctactatcaggcgaggcttccgccacctggcctgcccacgctccctccccagaaggcatgacctgagccgcctcatttctttcccagtttgcattctttctatttcatttcctgctcatggagaatttctgtgaatctctgtgtttctgccttgggcctccttcgacatctgagtcttcaggggaatccagagaagccccagtaccttttcgccatgatgtcttactgggccacccacctcctctttcatgatcctcgccasggaggatcctttcctcacggtccctggcctgcctgagagcaggtctaggccatggcgggtaccagtgcccagcacagggccagcctgccctgggaagcaaggaggccrgcgtgggacctggaagttggtcatctgatgctcccccgtttcacagatggaagcaccaaggccctgagacaaggagacggttgggatggacaccatgactccctgcccaacgtggacggtggtggggtggaaagaccattgagttaggaacgcagtgagtttggctgcaagtcacaaaacacctaacagatgtgcttagaacagaggacagagtgttttctcaccgaacaggcatgtccgatggaccccaagcgctgtcaccgtgggcccgatcactgtcatcttcccgccatcgccggcagactggcttttgtcttttgccgtctgcttgtttgcggtcacaagatggcacaggcctccctcatgagcaaatttcaaggcagggtagggctcagcagtagtggccagaaaggccttgccctagcgtggctctctccctccgtcagcacacagaagcttctccaagagccacccccagccctcctgctccacagacttttccagacccctaagggcctcctgcctcccctaggtgtaagggaggctgggacaaggcctattgggaaagggggatggggtaactgtggctggcttcctccctggactgggcacggggccacctgagcaatgtggggagaggagaactccgcggtggggtgggcagctcaaaatgccacacctcccgggctgctcctccagctcggccacctggtaaagcatgcacctcccgcttcagtgtcctcatctgtaaagtacacggccagtcctgtcctcgcagatgtgctgtgagaagcagatgagggagctgtgtcaggcaccaggggaggacctgggctcctgaggacaccgagttcgtggtgtgtctgccctgctgctgtcttggttctctgctcagctctggaacttggtgcagctcactctccctctgctcctctccctgcaggctgtgctgcaggcgctggggtccgtggtggcagtggaggagcgctcgctcacagggacctgggatttgagcatgctgcaccgctggagctggaggacggggcctggccgccacagaggtttggggacccccgcttcagctccctacccaggactcccagccaggctcagcagctggtcagacccggtgcacatccaaccatctgcctgtcccggcctgtgcgaccttgcgaggctgctttcctactctgaacccgcagccctcccaaatctacyacagtcggttaagaaaggctttgggttagtctctgcctgccagggctccacacaggcgtgtgtgtgcacttgtacgtgtgcacacgcagaccacacgccctgcctgtgccctgggtgacagctaggggcccaggggcttctgcccaccttggccctgctgacctcagcccatcagccggtccctgcctcatacgacatgtgccaccgtgagmtcctgcactacaggcagcttccaggctccastccctgtccgcaccatgccctctgcctgggacgcacaggtcccattcactctggccagcacctgctcaagctccccaggatgcctccccagagtcaccaaccaggccaagtgcctcctccactctcctggccccagcggtttcttctgtcctgtgcagctcgttgtccactacacacagcatggtggcgggtgcatggtgcacgctcagttggtggtgggaggaaggaagggacggagggagggagggagggaagatgatgttggttggaaagaaggaaggaagatggatgagtgatagataagtggacggctccctcccaagatcgaagcccaaccccagggcatgccttcaggggagcctggtgaggcaagggcagactcaccagatggtctcagaaagctcttgggctttgagggcaacacccatgaggaattgaggccactagggccaggaccaacctatgaattgccctcrgggtgggcagaaacgccaagaggcccacaggagtcctggcagaaggggatgccataggccgttgccacggtgggagccacagcagactgtagccaggtgcagtgtggtgagaaggaggctgggagccacagcagattgtagacaggtgcaggagggtgagagggaggctgggagccacagcagactgtagacaggtgcagggggtgagagggaggctgggaggaggcatcccaggccacactggacagatcacctctgttcccctaggtgacaccacctctccctcgaggccaccaggaggccccatcatcaccgtccacccaaaggaaatccggacgttctttattcactttcaacagcagtgagccctgggcagatgccccgtccccagggcttcccccaggaactccatgtaacagaacagacccaggacagggaaaagcagtgcggagggatgggactggggagtcagctgctcatctgcaggctaatggcaggaaatggtcatatttggggtttttccctaatttttttaaacaaaaattacattacaagatccaggttcttcccccccacactcaatcaagccagccctctcctcttctgtcacgtaaaggatatttggcacactcatgcgtcattcattcacaaaacacaaacccaggactttctgcctaaggcagarcacaagactcacagcagcaccgaagcgcatctgccgtccgggccctgccaggcttgccaggctgccagtggtaactgtggacctactgcgtgccacgtgttttcatagactcatcccatgctggcaacagccctgcaaggggcttggctctgccacagggcaggagaggaagttgtagcgcctagcgagagttccagccccagacgcccacctgtgcctcagggcaccgcctgccgagcagagaaggcacagcagccgtcagagtccatgagaggtgaaaccacacagcagggatgtccaatatcagaactattaatatcaataaaagtataaccttcccaggtctatgcccaagagaattgaaaacatccatccacacaatacctgtgctcccgcgttcatagcagcattactcaaaagtcaaacggtagcaacaacccaaatgtccatccacagatgaattaagacatgaagtgtgttctgtccatacaatggaatattatttggccataaaaaggaaggaaattctgacgcatgccacagcctgagtgaatcctacaaatattacgctaagtgaaagaagccaatcacgagtttatgtgaaatgtccagaataggcaaatctgtgtatcagagacaaagcacattggtggttgccaggtactggaggaagagagaagaggcatracagctaacagggacgggctttctttggaagatgatgaaattgtggaatgatggttgcacaactttgtgaatatactagaaaccaatgaattaaaaactttggaagatgaattttatggtctgtgaattatatctcaattttaaaactttttttttttttttcccgagacagagtctcactctgtcgcccaggctggagtgcagtgtcaagatctcagctcactgcgacctgcacctcctgggttcaagcaattctccagcctctgcctcccgagtagctgctactagagatgcaccactgcgtcagctaatttttgtatttttagtagagacggggattcaccatgttggccaggctgatctggaactcctgacctcaggtgatctgcctgccccggcctcccaaagtgccaggattacaggcgtgagccaatgtgcccggcctaaaccgttttaaagagtaaactgtaagatgtaggaaattatttggtactctagggctgaaggaaagtacccagaaaggaccagcttggaaggagtcagacctctggacaacgtgcagtttggccaccagacagcaaagacagtctctggtttggccaggcaggagctgggctggagttgctgaccaagcaataggccacccctgtgaggtggggtcaggtgagcagccaccagaggcatggatgtgcagtgggaggttgaggcacaaggagtgaggcaggagccctttagagcatgtgggctgcatggggcttggtttctgtgtcaagaagactatggaggctgggcagtggttcatgccttaatcccagcactttgggaggccaaagcaaccggatcactggtggtcagtagttcaagaccaggctggccaacatggtgaaaccccatctctactaaaaatacaaagttaaccgggtgtggtggtgtgcgcctgtagtcccagctactcgggaggctgaggcaggagaatcaatcacttgaacctgggaggcggaggagacctccgcctctgcactccagcctgggtgacaagagtgagactccgtctcaaaacaaaaaaaaaaggaagactacggaggccaggcgtggtggttcatgcctgaaattccaacacgctgggagccctaggcagaaggatcgcttgagcccaggtgttccagaccagcctcggcaatatagtgagaccccatctctacaaaaactattctttagacgagcgtggtggtgtgcaccagtggtcccagctactctgggggctgaggtgggaggctcacttgagcccaggaggtcgaggcttcagtgagccatgatcatgccactaactccaaccggggtaatagagcaagaccctgtctcagaaaaaaataaagaagactatggaaatgttatccccagcgcagccaggctgtagaaaaatcatgtgcactgaaagtaccatcacccatgctgaccatccccgtccagaacagaaacagcaagagagccacttccccctgcggtccctccagcacccagcaccctcaactgggaagagtgagaagaatatagatgacaggggaaaacccacccacaatagacagaatattggctaaaatctaacatccatttgttgctttgttgttatttcatttcattttacttttttagacacagggtctcgctctgtcacccaggtgggagtgcagtggcactatcatagctcactggaacctcttaactcctgggctcaagtagtcctcccatcccaccctcctgagtagctgggactacaagcatgagtcactacacccaactaatttttaaaatgtttgtggagacgcagtctcactatgttgcccaagctggtcttgaactcctgagctcaagcgatcctcccacctaggcctcccaaagtgctgggattacaggctcaagccactgtgaatggcctgttttttgttgttgttgtttgttttttttttttttttttttttttttttacaaaccaccaccaccaaactcccaataaactacgttgctcactgacaatccccaacaggtttattgcggaacttgacaggatgattctgaagtgcactggggctaggtacagtggttcgtgcctgtaatcccagcactttgggaggccgaggtgggtggatcactagaggccaggagttcgagaccaggctggccaacatagtgaaaccccctctctaaaaaaatacaaaaattagccaggcttagtggcagacgactgtaatcccagcactttgggaggccgaggcgggctgatcacctaaggtcaggagttcgagaccagcctgaccaacatggagaaaccccgtctctactaaacatacaaaattagccgggcatggtggtgggcacctgtaatcccagctacccgggaggctgaggcaggagaatctcttgaacccagaaggcggagattgcggtgagccgagatcgtgccactgcgctccagcctgggcgacaagagcgaaactctgtctcaaaaaaaaaaaaacacacacacacacacacacacaagtgcacatcttcgtccgtttgggctgctgtcatagaatcccgtacactttgggaggccaaggtgggcggatcacaaggtcaggagatcgagaccacagtgaaaccccgtctctactaaaaatacaaaaaattagccgggcgtggtggcgggcggcctgtagtcccagctactcgggaggctgaggcagaagaatggcgggaacccgggaggcggagcttgcagtgaaccgagattgtgccactgcactccagcctgggtgacagagcgagactccgtctcaaaaaaaaaaaagaataccatacactgagtggcttatcaacaacaggaatttatttctcccaattctggatgctgggagtccaaggtgccagcagattcggtgtctggggaggggctgtttcctggtctatagatggtgccgtcttgctccgtcctcacatggcagaaggggcaaggcagctctctgggctcggtttctaggagggtgctaatataacagtactgagtctaccttaaagaaaaattgtgtttgcttgagtataattacagctttgcttacgcttacacactattcattaaaaacagcctcagggaaagaggaccttcagcagagataagagagaagtgcactgaccagcaatcctggaagcggctagccgcaggtttccacccaccagatgagaatagttgggctgaggtcgaggcaggaggatcacgtaagtccaaaagtttgagaccagcctgggcaaaatagggagaccccgtctctataaatagtaacaaaatttaagtaggtgtggcacacgcctgtagtcccagctactcaggaggctgaggtggaaggatcccctgagccagtgaagtcaaggctgcaatgagccatgcctgggcaacagagtgagactgtccaaaaaaaaagcaaaactaagactaatctggctggcctggtgcagccagcactttgggaggctgagggggagagatcatttgagcccaggagttggagaccagcctgggcaacttggtaaaacccaatctctaaaaaaaattttaaaattagccaggtgtgatggtgcgtgcctttagtcccagctactgtagagggtgaggtgggaggatcacctgaacctggggaggtcaaggctacagtaagccgtgatcatgctactgcactccagcctgggcaacagaatgaaaccctgttccaaaaaaaaaaaaaaaaaaaaaaaaaaacaaaataactgcacttgcaaaaggtcacatgacatccccgcaagacagcaatcgtaactacctgcctgagactgcgcacatagctgctgttccacaagaatgctttgatcatcattcgcacttccccagatttcccttaaaaacgtgcatctggagacacaacttggagaggtgatctttgaacacaagagttcagtgcccctgcccccacctcccaagctgctggcttctcgaataaagctacctttccttttaccaaaacttgtctctcgaatgtcggcgagtgagtggcctgaacccgagttcagttacactaatccccataacctaatcacctcccaacatccccacctcctaataccatcaactgggggattagggttcggtatatgaatttagggggacaaaaacattcagaccagagcaaacaaagacctcagaagctggaccgcgcacacggaagctgatagaagagagatggggccgggcgcggtggctcacgcctgtaatcccagcactttgggaggtcgaagcgggtggatcatctgaggtcgggagttcgggactagcctgaccaacacggagaaaccccgtctctactaaaaatacaaaattagccaggtgtggtggtgcatgcctgtaatcctagctactcaggaaggctgaggcaggagaatcgcttgaacccgggaggcggaggttgcgatgagccaagatcgcgccactgcactctagcctgggcaacaagagcgaaactcggtctcaaaaaaaaaaaagagcgagatggggtgccacatggtgaggaagaatgttgcatggcagaggtgctgtgacaactccccctcactcggaacaaaaagaaacttcaccctccctcgcatcgtatgcagacagcccccagctgaaaccccagcggtcaatacaggcgtgaaaagatggtcagcctccttagcattcaggtctgtgcaaatgaaaaccacaataagacactgtttcacatctgccgtgttttctatttaaaagattaaaaatatgggcaattttttagtggacaatcatggaaactctctcagacttctaatgtgagagtaaacagaaggagcaaacttaagaaactagttccatgttatcttctaaagttaaagatactcatgctctagacccagcaattctgttctaggtatgtaagctagaaaatgatgtttggccaggcgtggtggctcacgcctgtaatcctagcactttgggaggccaaggtgggcagatcacttgagggaggtcaggagtttaagaccagcctgggccaacatggtgaaaccccatctctactaaaaaaaaaaaaaaaaaaaaaaaaaaggccgggcgccgtggctcatgcctgtaattccagcactttgggaggccaaggtgggcagatcacaaggtcaggagatcgagaccatcctggctaacacggtgaaaccccgtctctactaaaaatacaaaaaattagccgggcgtggtgttgggcgcctgtagtcccagctactcgggaggctgaggcaggagaatggtgtgaacccgggaggcggaacttgcagtgagccgagatcgcgccactgcactccagcctgggcgaaagagcaagactctgtctcaaaaaataaacaaataaataaataaataataaaataaaaaattagttgggtgtaatggtgcatgcctgtagccccagttactcgggaggctgaggcaagagaactgcttgaacctgggaggcagaggttgcagtgagcagagagaacgcaccatggcactccagcttgggtgacagagtgagactccatctcaaaaaaaaaaaaaagaaaagaatcatgttcgtgtgcacaaaaatatgtaagactgttcagtggcattgttcatgatagctgtaaatgaaaaccattcataggccccttaccagtgcttggatagaggctggtttatttgtacaagagaatactacagaacagcaggtctcaaagtgcggtccccacaccagtagtgccagcatcacctggggagttgttagaaacacaaagtctcaggccttatcccagatcaaataaatcagaaactgtagggatgggccctggaacatgtgttttaacaaatttcctgggtttttctgatgcacactcaattttaacactcactgccatagagcaatcaaaatgagtgaactatccttacctgcatcaatacaggtgaatctcagatagagagacagaggtgatagatgatagatagatagatgatagatagatgttagatagatgatagatagactatattgagcagaagcagcaatatacaaa

SEQ ID NO: 94327 - DNA, 293046 bp, Homo sapiens
  misc_feature (1)...(293046): n = A,T,C or G
gattctcctgcctcagcctcccgagtagttgggattacaggcacccaccaccacgcccagccgatttttgtattattagtagagacatggtttcaccatgttggccaggctggtctcgaactcttggcctcaggtgatctgcctgcctcggcctcccaaagtgctgagatgacaggcgtgaacctttaaataggaagagtatgctggatttccttggtgggccctatctgatcacatgggagcccttgaaagaacagaactttctctggctggagggaggagagaaggtgagggacatggcacacaaagtcagtgagattctaatggtgaactggactctaagtggcccctgctggtttcaagatgaagcagagctggcttacagatggagcagacactttcaaggaccagagagaggactctaagagctcagggttgtgctccccacaccccttctatgacaatcagtgaggaaaggatgacttcagtcccatgacaacaagagactgaattttctaaaaatgggaataagcttgcaaaccaattctttccagggcctcctgcgaagagcccagggggtagacatcgtcattttgaccttttgtgactgtattagtccattttcacgctgctgataaagacatacctgagactgggtaatttataaagaaaaaaaggttaaagccaaggcgggtggattacctgaggccaggagtctgagaccagcatggccaacatggtgaaaacctgtctctactaaaaatacaaaaattagccaggcgtggtggtgggcacctgtaatcccagctactccggaggctgaggcaggagaattgcttgaacctgggaggtagaggctgcagtgagctgagatcatgctattgcactccagccttggcaacaagagcgaaaactccatctcagaaaaaaaaaagacctttaatggactcacagctccatgtgactggggaggcctcacgatcatggcagaaggtgaaaagcacgttttatatggctgcagacaagacagagagagccaagcgaaagggatttccccttataaaaccatcagattgctgggcacggtggctcacgcctgtaatcctagcactttgggaggccaaggtgggtggatcagctgaggtcaggagttcgagaccagcctggccaacatggtgaaaccccatctctactaaaaatacaaaaaattagccaggcatggtggcacaagcctgtaatcccagctactcgcaaggctgatgcaggagaatctcttgaaccggggggcggaggttgcagtgagccgagatcctgccattgcactccagcctgggcaacaagagtgaaactctgtctcaaaacaaaacaaaacaaaacaaaaataacaaataaaaaaaaaccccatcagatctcatgagacttattcactgccatgagaacagtgtgcgagaaaccgcccccatgactcagttatctcccactgggtccctcccacaacacatgagaattatgggagctacaattcaagatgagatttgggaggggacacagcgaaaccatatcagtgaccttgagcaagtgacccggttgagcccgtttttgggacatcttacctgcagacttgagataataactttgtgttgtttaaagctgctacattcgtggccatttattacagcagtggctaaaaacattcacatggaaatcaaagtcaatatatgacagatgatgaaatgagcctctgagaagataagtgggttgtggggaaggtaggggtgtctcccaaaccattgctggaagcaccaggtgatgcattctgcttttagccccccaattcatggctctagacgtcactatccttttgctcacaaacatccttttagataactaccagaagtccccaaagggaggagcatgtcgggctacaataagcccactcccctgctgctcctggtggaatccttggtccttctgaatttggcagtggggtcacggtttcacaccccatgcaacggcagctctcctgggaaaactttaaggtggggacaggggtgactgtggattttcccaatgcttctggctgggtgccctggccacacctaggcatacctggtcacacctgaggatacctgggcacgcctcaggatatctggacacatggccaaacgagaaagcttcagttttctcatctgtaggacagaaggttgcaaaggctggaataaccttttttttttttttgagatggagtttccctcttgttgcccaggctagagtgcaatggagcaatctcggctcactgcaacctccgcctcctgggttcaagcaattctcctgcctcagcctcctgagtagctgggattacaggcatgcgccattatttccagctaattttgtatttttagtagagacagagtttctccatgttggccaggctggtctcgaactcccgacctcaggtgatctgcccgccttggccccccaaagtgctgggattacaggcgtgagtcactgtgcctggagaagccctcttttttaatttaatttttttatataaaaataataaagacaggttttgttatgttgcccaggcaggtctcgaacgcctgggctcaagcaatccacccttctcagcctcccaaagtgctgggattgtgcgcgtgaggcgctgcacctggcccacaaggagccttcttaatccaacctggttactgaatcacacctgagcatacctggcgacacctgagcatacttgggcacatgtgaagatacctggcacacttggccaaatgggacagccccatcccttggtcttcctggcctcagtttcctcatctgtaggacagagggttgcaaaggccacaaagacccttcttaacccagcttggtcacctggccacacctgaggtcgccgggtaggtctctgtattccaatcatcttagatctgcaccagagcccacccagtggctgggtgcaacctgcacactgggggtgccccttagtgcctgttgaggttctgtggggagtgaggcctggagggttcaattcctatgggagtggggatgcatcccaatgggggccaaagttccagataggttgtggccctgcaaggtgccagggtcccagtgagatgtggagtgtggggttctggctcccagcagggatagagttcctggctagggtcaggtgacttgctggtggagattctcactcctggacctcggcaggggctggggggtgcccatcggcacgtgtatgagggtgcagacctagagtgaaggtggaggtctgggtcctggggatgatagggttggtgatttagggtcccagtgttgcaggagaggggtcccgatctagcccccaagagtgggttcttggatattgctcaagaagtaattcaaggtaagtcataagagtacagggaagttttagtttattagaaactattccattacatgctgggtgtggtggcycatacctgtaatcccagcactttgggcggccgaggtgggcagattacctgaggtcaggagtttgagaccagccaggccaacatggtgaaatcccatctctattaaaaatacgaaaattatttgggtgtgctggtgcatgcctgtaatcccagctaccagggaggctgagagaggagactctcttgaatctgggaggtggaggttgcagtgagctgaggttgcgccactgcactccagcctaggccacagagccagactctgtctcaaaaaaaaaaaaaaagaaaaagaaagaaagaaaaaaaaagaaactgttttgtcatagaggtgtaacaccttgtgtttgttttaaagcttccttctataggggtctgtcttatctatgtaaaagctaggttatgtctgacggcgtgacatttattccttagttgatttagagagagccatcctttgcattttcgcgcccaagcacgtcmawgcatgactgtaattatctttaacagcatatgtggttacgcgatatggcgacatccagacattccgctgtcgtctgtgtttgtccttggaggcattattaagtcatttcttcagccgtaaacatcttatgaccatgggccgtgaccggcaaggaatgtgtcttcctggtttttaagatggagttgatgattaaaatggtgtcaccccagctctcccaggctcctgtctcccaaacacagcgggtgttaggatctgtgtggagtcccggatgccaggtctggggtcccctgggggaccaggtgtgggactgggagggttgtggtggggtgaaggtctgagtgtctgggtggggggttccatgaagaattccagtaggagtctgctggggggtccatgtgggatttcagccttggccctggtaagggtctgggtgggggttctgtgctggtctggggttccctgagggagcccaggtaactctgtggttgtctggggttcccaaccaaggtctgagtaggggtctgctgtcccagtagggatcagggtggggagggggctcgtggtccctgaagtagtctggagttctctgcaggggccgggaagggggtctgtgatccctgcagggttgttgggggcagggaagtggaggggtaggtttggtgggtggtgtctgtggcctggcagsaattggggtggggtctgtggtctcagtaggaactggggtgtggggtccgtgcttggggcaggttctgtggtgtcagcaggaactggggtgtggggtccgtgcttggggcaggttctgtggtgtcagtacgaattagggtgtggggtccatggtccttacagctgttcagagtcctctgtgggagtcctggtccataatcctggcatggctctgggtggttgtctggggttccctatggggtccaagtccttgtggtccctgctgaggtctgcgtggggttacatgattctggctaagatggggagggtggttcccgtggtggtcctggtcccctgcagggtctgggtaggggatctgtgatcccatggtgggggtcctggctggggcttgaatggggttccatggtcttggctggagtgtggggtcttggagaggcagtccagctggggtctgtagtcctggggggcgtcctggcaggggtctgtggtcttgtggggtgctggctggggcctgtggtccggggggtggttgtgatggaggtggaggtcctagaagggggccccagtaggggtctgtgatcctggagaggggtcctggtggtgggggtcccagtggaggtctgtggtcctggggggccctgggaggatctgtggtactggggagtcctggtggaggtctgtagtcctggtggggttcttggtggggtgtctgggcgtgccccagtgggggggcctgtggtcttgggggtcccagcaggggtctggggtcctggggggtgttcttgggaggagtctatggatctgacttgggtgctggctggggtctgtagtcctgggggcgtcctggctggggctgttggtcttgtggtggtggggatccctgctggggtctgcagtcctgccgggagggggaagggtccctgctggggtctgtggtcctggaggaggtgtggagggtccctgctggggtctgtggtcctgggggggattcctggctggggtctgtggtcctggctgggggtgtgtgtggggggtccctgctggggtctgtggtcctgaagggggggtcctgactggggtcagtggtcctgggggcgtcctggctggggtctgtggtcctggggsggggggtcctggctgaagtctatggtccttgcaggggggggttcctggctggagtctgtggtcctggggggggtgtcctggctggggtcggttgtccgctcggggtccccagtcctgcaggcggtgcgggatcccagagggcccgggcggggtctggggttgggggttccccgcaggccggggcggttcggggcgggcagggggcggtccggggcgcgcgcgtttccgccgtccgtccgggcgggcgggcgcagagtcccgcgggcggcgcggaagcggcggcggcgcggccggggcagccatgtcgccattgtctgcggcgcgggcggccctgcgggtctacgcggtaggcgccgcggtgatcctggcgcagctgctgcggcgctgccgcgggggcttcctggagccaggtcagcggggcggggcaggggtcagggctccggggacccgggtgggcgcgggctggctcgggggcgggggcgcgggggctccgcgtgaccttggcgaggcggtggcgctcccggaagtggggctgggcgggggtcgaggtgtggccggaggtgtatttctgtttatttttgggtggtgctcatattgtcgagatggctggaatgttcccgcatggtatttgtgcccctgcatatctccttaacccagcttttcttccttctctttaaccctccctaaccccatttttttaattacctcccatacatttgacgcgtgtataaatcctaatcccatgactctgcgtgcccgatgtacccgaattcctgttactttcttattaatgtgtatgtaactccccccgattcccgttgttaacatgccccctccaatatatccccctccccccccccccccnnnnnnnnnnnnnnnnnnnnaggggggatgggttgcataggagcggtgcttggctatctatggatggggggagggtgctgcgccaaacttaaagagggagaggaaaagatatagtggagattgagagtgacgcgggagctagatcatcatcccaatgagataaatgggtcggcgtgcgcgcctgggccctccccgccccgcgctttccgtccccgccggctcttctgcgcgcctggcccggcccgacccggcccgacccttccctccccgcgcgtgtggcctccccgcctgtcccgggtcgggctccaaccaagcagcccccgtgcagccgcccccccgcgcaccctgacacctccgggccatggccggggacccgggggctcgcacgccccgcgcccaagacatcaggcggctctgcctgccgcctgcggtcggccagtgaccgcgcgcccccgccaggccccggaggggaggagcgggcgtcccagggacctcgacccctacccaccccagggtaagtgaggatgggcccttctccggaggacgtctccagagggggcccagaggcggcttctcgggcactggggagccacggaggtctggtggggagggcaggcccgttaagtggcaactttgtttccttggcctttgtaaacatctctgagtcacagatctccaactttgcaggactcgttcactgtctgaactcatcagtgatgaccgccactgtgttttgtgtatgcagataacttctgttcctagatttgcaggttcagaatttattattattattattttttgtaataggaagtagagatgaagtcttgctctgttgccgaggctactctcgaactcctgggctcaagcagtcctcctgcctcagcctcccaaagtgctggcattacaggcaccagctactgcatccgactaatgttttaaagttttgtagacggggtcttgctatgttgctcaggctggtctcgaactcctgggctcaagcgatcttccttcctttgcctcccaaactgttgggattacaggtgtgagccaccacacctgtctaatgttttaatttttttgtgtagcaatagggtcttgctacgttgcccaggctggtctgaaactcatgggccgaagcaatcctcctacctgggtcccccaaagtgctgggtttacaggcgtgagccaccacgcctggctaatgttttaaattttttgtagagatggcatctcaccatgttgcccaggctggtcttgaacccctggcctgcagcaatcctccagtctgggcctcccaaactgctgggattacagacagagcgccactgtgcccagcccatattctcaatttaaacctagaaacctgtaaacaattatttgtgaactggaataaagggaatgttaattccatgttaggttaaatgatactttgtttcaaaaataacagttttccaaaacagagcgttcagagggtcagtgtggtgggggtgggggtgtacgttgccctgaatgtcttaaatgtccagcctaagaagagagctgttatttctgcctctgtagacagtttcatggcatgtcaggaggcctctggaagacactactgcacgcctctgggagactgggagtcagccaggcgaagcgcttgggtgccttattgtgaaatgacttttgacttccactctgcacccactgaaggaatcccaggggtcccagcgccaccctttgagaagcgtgcctggagtggatgttttaaaatgagcctctctctcccgcctctagccagagaaaaagagctttgagttttctgtgagctaagcttttctttttctgccaaactggccttcagtatttttttttaaacccacttagcataattacaaatgcatagaagaaggagagtaaagggaactgtagtcaggctttcggagggcaggagagcatgtttgtttgaagtaagtaatcagttgcaaggtgaacggtttacagctgctgaacaattgtgtggagtctcgcaraagattatgtttatccgggcagttttgcttacagaaaggtccccttaaacctccttaagggcctgtgtgggccctggcagaagaggccggggttcctgcagcagctcaccaaaatgctggcctttgaaaaacttgctctttgtgcattagaaaaagggctggaatcttttttttttttttttttcccatttactgattaaacaacaacagaaggttgttaaagaggacgagcttctggtgaagtcacgtgtctgccaagggaatctgtacccgggtgtgtatcgaaacagaatggccttctctaaagattaacttaagtggcttgccctcatcgagccccttcctatgtatggattaaaaataattttcgataccagtggaggaatgctgttgtccttggtctgctggtggccagcttcctaaacggcattttttatttgcttctctctggtaggccttcgctgttggtgaggaaacattgaactttgtccagggcatttgagctaagctgtttgaataaccaagagggccaatttccccactgcagattggaagcaagggcagttttttcttagaacttccaaatggagcgtgttcttcttaggtatcgtacaaaggaaatgcctgggttacaccttccacatgagttgacttacatggtatgagaaggaagaaattgtggctggaatccactcctaaatggtgtcttcttacagttcatcatggaaaaacaagataattacaaattaatcatagatgttggtcatgcctttacagagggggtttagaagcaaattgagaattcccataagagggtctgtctctgtgttcttaagactatatccatgcggcccattcagtaagttgtatctgttggttggattttaaaatagatgatttaatcagtgcatttaatatcctaatatggcatcaaaacttgaacattgatatggcctgaaatctgttgaaaatgatcatattgagtaaagaaagtctctacccaccggtattaataacagggtgatctgtttagaaattacattttctctgatacatcaatgagttttgcaaaggagagaaaattgatggtacctgtagtcaagtccagttccaatactgccacagaatttttcttaaaagttctattgtaaataataggccacagaatattccttcactttctgggatgcaaaatggattcgtaaatgctgtaccacaggagtgagtatttacaaaaaatatgccaactggcccacttacaaagctatttatagaagtcctacttttcaaactattttttttttaacctgtaaagggaaagttaattcttgttggttttatgagtagtgaacagtggctattagaaatcaggtagaagtaaaaacagcagttttccaacttcttcttctttttcttgagaccaagtttcgcttttgtttcccaggctggagtgcaatggcgtgatctcagctcaccacaacctctgcctcccgggttcaagcgattctcctgcctcagcctcccgagtagctgggattacaggcatgwrccaccrtgcctggctmattttgtatttttagtgagatggggtttctccatgttggtcaggctggtctcaaactcctgacctcaggtgatagtccaccttggcatcccaaattgctgggattacaggggtgagcccctgcccccggcctccaattccttgatcatagaatctctttcaaaaaaaatgaggaccccagacagtttttgtttttgtggattataacagtcaataagtcatcctgttagacattaaaacagaaatttaaaacatatttaacaatctatttaaaagtaatggtaacaggccaattacatgttacatacaaaaatgtatgtaatatatttattgtttttatattttatttttattaaatatatatatttttagaataatttatacttttctataaatataaaatacaaataagttatatttatataatttagatgtaaataaaaacaattgatatttttatataaatatataaatgtgtacacttatggggcacagtgtgatgctttgctgtatgtttgcattgtggaataattaaactaatatctatcacccgctatttttcctttgcggtgggaacatttaaaatctcttttagctatttttgttttttatttccataggttattggggaacaggtggtgtttgattccatgagtaagttttttagtggtgatttgtgagattctggtgcacccatcacccaagcagtatacactgcacgcaagacatttaaaatctctattggcgggccgggtgcggtggctcatgcctataatcccagcactttgggaggctgaggcgggtggattgcctgagctcaggagtttgagaccagtctgggcaatacagtggaaccccatctctactaaaatacaaaaaattagctgggtgtggcagtgtgcgcctgtagtcccagctacttgggaggctgaggcaggagaatggtgtgaacctgggaggtggaggttgcagtcagccaagattgcgccactgcactcaagcctgggcaacagggcgagactccgtctcaaaaaaaccaaaaaaacaaaaaaacaaaaacaaaaataaaaacctcttttagctattttgaaatatgtaatacactattaactatcgccaccacgctgtgcagtaggtcactgaaacggattcctcctgtcgaacagaaacttggtaccctttggccatgtgctgtatgttttttaaaagaaaaatgattgtcatttccaaaataacaaaaacctagggagaagagtggctgagttttagggttttgtcagtctcatccataaagggacggatggcggctggctccttcctctgcttcttcacactggtctcttgcgacgtgtcgttctggtaagagtcatgtgaggcacatccactggcctctcatggatgtgcaattggaaaygtgaaatcgccggccccctgagagcgttttggggagtgtcccccccaaacccccctccccccgcactggggatgctgcaccagtcttgaagaatgaggcagtgagaggctggtttacagcaacctttattcgtggccttgtgtgctcggaagcgctgcaagggaggaggaaggaggaaggagggtactcactgcagaaggtcagctctgctgtggctgttacgtgggttcaggtggaacccacctactgtgtggacggttctttacctgggaatcccatggaattctgacagcaggagacgtgggagggagcttcttgtttctccttccaggagtcacttggttaggggtttgggaattttggctcttagtacaaaacttcactccaggtactagacctgtttcagccaaatgatgatcatcataatagaatagaaacctttgttcacctaaataataacaataatattaataataatagaatataaacctttgttcatggtactggggcgtctttcagcccaataataataacaacaataggaataatgataataatgataaaatataaacctttgcttcacgtcctggaacgtctttcagccaaataataataataatattaatgataatagaatataaacctttgttcagggtactgtgacttctttcagcccagtaataataataataatagtaataatgataataatgatagaatataaacctttgcttcatctcctggaacgtctttcagccaaataataacaataataataataatgacaatagaatataaacctttgttcagggtactgtgacctctttcagcccagtaataataataacagtagtaataatgataataatgatagaatataaacctttgctccaggtcctgggagctctttcagccaaataagaataataatagaatataaacctttgttcacagtaccaggacctctttcagaccaacaataatgacagtaataataattataatgataatagaatataaacttttcttctaggtactgggacctctttcaaccaaataataatagtggaatataaaacttggctctaggtaccagaaccttttttcagccaaatagtaataataagaatagtattaatagaaaacagacctttggtccaggtactgggacacctgtgagccaaataataataataatgataataatagaacataaacctttgactgaagtgccagaacctttttcagctaaataataataataaaatataaacttttgttccaggtacccggacttctttcagcctaataataatcatagaatataaacctttactacaggtcctggcacctttctcagccaaatagtaataaaatagaatataaacttttgttctgttactgggacctctttcagcctaataacaaaagtaataataatagaataaaaacctttgctccaggttctagaacctctttcagcctaataataataataatgatagaatgaaaatttttgttccaggtgtcgagacctcttccagcctaataataataataatgtaataatataagcctttgctacaggtaccaggacctgtttcagccaaataataataacagcaatgataatagaatataaaccttggccccaggcactgggacttctttcagtcaaacaatcacaataataataataataatagaatatggatgtttgctccagctttcaggacctctttcagacagataataataaccgagtacaaacttttcttccaggtatcgggacctcttccagcctaaaaacaatagtaataatagcatatatatctttttttttgttttcttctttctttgagacggagttttgcgcttgttgcccaggctacagtgcaatggcgccatctcggctcactgcaacctctgcttcccgggttcaaacgattctcgtgcctcagcctcccgagtagctgggactacaggcatgtgccactaccacgcccggctaattttgtatttttagtagaggaggggtttcaccatgttgtccagggtggtctcaaactcctgacctcaggtgatccacccaccttggcctcccaaagtgytgagagtacaggcgtgagccgctgtgcctggtgccagcataaaaatctttgctacaggtactgagacctttttcagcctaataataataacaaccgtaacaataataattagaatataaacctttgttactggtactgggacctcttccagcctaatcttcataataataaaaataataataataatggaattgaaacctttccttcaggttccagaaccgctttcagccacataataataataataatgataataataataataaatagaatttaaacttttgtttgaggactgggacctctttcagcccaatagcacaaataataataatggaatgtaaaccttttcctcccaattaccaaaacctgtttcagccaaataataatatgatgatgatgatgatggaggatctgatacagctgtgtcctgtcactcaggtcggacttaggaggcctcttgagattcttttccccctccgttgactgtgtaatccaggggccccaccctaactcggctgcagaagatgcagtttgggggttcctcgttttgtggaagtcccggtcatgttattcattctctcagcaccttagaacaaaccagggtgctggcattggccacaggacccccctccttgcaccccagtcttgggaagtggcactgctgggctctggcaatgcccagctcacctggcacgtggcggcgtctccctaaaaagcactgggcgggcaccgttgacggaaagccagcaacgcaggccgcgactgcccgtgaagacggggggcctttctaagacctccactcattatttcgggcaaaattaaccttcagaataccttgctttaataaagtaccagaaaccggagggcttaaaaccatagcttattctctcccagttctggaggccaraagtctgtaatcaaagtgtctcagggctgcgctccctccggaggcttacgcggagggtgcttcctgcctctcccagctcctgggggctcctggcgtccctgggcttcaggccagccacatcatcactctagtctctgcctctgtctccatgtggccttctctgtgtctgtgtctcctcttctgtcttttataaggacatctgtcactgcatttagggctcactcaaatcccggatgatctcatctccagatccttaactcatgagatctacaaaatttctaataaccaagtaagatctcattccacatcctgggctttaggctgtggacagatctttctgcgggccactgttcaatccaccatgattttatccagttcattgtggaggctctagaggaggatccttcctgcctctcccagctcctgggggctccaggcgttctgggtttgtggccgcatcactccagtctcggcctctgtctccatgtggtcttctcctgtgtgtccgtgtctcctcatctgtcttctattaaggacactggtcactgcatttaggaccacctcaattgagaataatctcatctaaagatccttaccttcattattaatacatctgcaaagaccctttttccaaacaaggtcccatacacaagtaccaggtggatacagattttctttggtaggggaggackcttttcaacccactatagtcatcattgaaatatgcctccttgcactgactgtatcccaacactctgaacgtgcctgggtggtgcattttgatatttaccctcctgagcactgtactggacacttggagacacaattacaccttttaacaaagcccagctgtcattttgggcaacccagtcacagaggtggcctcctgagtggcagctggaagggcctgtatgtgtgagcattcaacctcaacaggaaccctggggactggcttctgggtcatctaagcctccacaccgactgcctgatgtttgcacaggtgtgtgatatttgcccagttgggcctttctgcccacaggtgtgactggacacaatgggcattttgagaagttccagggattgagaaatccatgcttcttcagacgtgcttacagatcacggatgcacctgtgacgttccacatggcttcattttaaaccataaagtttgagaagagtgtgcagtgcctcttagccataggaaagctggctttagtcagatggaggtcctgtttggcttctttaatgcagtgaatgaagctcaggtggcattcagagagtcctgctgtgatggttggcagtggggggtctgcctggccacttgtggattcttctatgtaggcttcatccccagaaaagatctacgcggctttcccacgtggcaggtgcttgggaaactcttaggacaggaacaacaagcccctgcgatgacagaggcattgtcaggctgggcgcggtgactcacgcctgtcatcccagcactttgggaggccaaggcgggtggatcacctgaagtcaggagttygagaccagcctgaccaacatggtgaaaccctgtctctactaaaaatacaaaaattagccaggcgtgatggcaggtgcctgtgatcccagctactgaggaagctgaggcaggaagatcgcttgaacccgggaggcggaggttgcagtgagctgagatcacgccattgcactgcagcctgggtgacagagcgaaactctgtctcaaaaaaaaaamaaaaaaaaaactaaaggcacttgtcaggtacagccctgcaaaaatgccgtgctcactcgcaaacctgtatgttgacacgtgcggcatcgctgcagtcggattaacgtggaagaaagagygtattcctgcgctaggttccctcctccactctgcaaaagtgacccgcaaggaaggtccagccgtccggccccagtgccctttggttgaaagcggagctgccccggcaccctgtctgtctccccggcagggctcccgtgcgtgcctgggtcccttctcatgctgtgtttgtcttggcccttctcagcaggtccccacgcatgagcagccgtccagcaggcaggctccggtggagaagcaatggagaataaaagcctggagagctcccagacagacctgaagctggtggcccacccccgcgccaagagcaaggtgtggaagtatttcggcttcgacaccaaygccgagggatgcatcctgcagtggaagaaaatctactgccgcatctgcatggcccagatcgcctactccggaaacacctccaacctgtcctaccacctggagaagaaccaccccgaggaattctgcgagttcgtcaagagcaacacggagcagatgcgtgaagccttcgccaccgccttctccaagctgaagcccgagtcgtcccagcagcccgggcaggaygcgctggccgtcaaggccggccacggctacgacagcaagaagcagcaggagctgacggccgccgtgctgggcctcatctgcgaggggctgtacccagcctccatcgtggacgagcccaccttcaaggtgctgctgaagacggcygacccccggtatgagctgcccagccggaagtacatctctaccaaggccatccctgagaagtacggggccgtccgggaggtgatcctgaaggagctggcygaggccacctggtgtggcatctccaccgacatgtggaggagtgagaatcagaaccgcgcctacgtcacgctggccgcccacttcctgggcctgggcgcccccaactgcctgtccatgggctcccgctgcctgaagaccttcgaggtgcccgaagagaacacggcggagaccatcacgcgagtgctctatgaggtcttcatcgagtggggcatcagcgccaaggtcttcggggccaccaccaactatggcaaggacatcgtgaaggcgtgctccctgctggacgtcgcagtgcacatgccctgcctgggccacaccttcaatgccggcatccagcaggccttccagctmccgaagctgggggcgctgctgtcgcgctgccgcaaactggtggagtacttccagcagtctgccgtggccatgtacatgctctatgagaagcagaagcagcagaacgtggcccactgcatgctggtgagcaaccgcgtctcctggtgggggagcacgctggccatgctgcagcgcctcaaggagcagcagttcgtcatcgccggggtcttggtggaggacagcaacaaccaccacctcatgctggaggccagcgagtgggccaccatcgaggggctggtggagctcctgcagcccttcaagcaggtggccgagatgctgtcggcctccaggtaccccaccatcagcatggtgaagccgctgctgcacatgctcctgaacaccacgctcaacatcaaggagaccgactccaaggagctcagcatggccaaggaggtcatcgccaaggagctttccaagacctaccaggagacgcccgagatcgacatgtttctcaacgtggccaccttcctggacccccgctacaagaggctgcccttcctctccgccttcgagcggcagcaggtggagaatcgcgtggtggaagaggccaagggcctgctggacaaggtcaaagacggcggctaccggccggctgaggayaagatcttcccggtgcccgaggagcctcccgtcaagaagctcatgcggacatccacgccgccgcccgccagcgtcatcaacaacatgctggccgagatcttctgccagacaggcggcgtggaggaccaggaagagtggcatgcccaggtggtggaggagctgagcaacttcaagtcccagaaggtgcttggcctcaacgaagaccccctcaagtggtggtcagaccgcctggccctcttccccctgctgcccaaggtgctgcagaagtactggtgcgtgacggccacgcgcgtcgcccctgagcgtctcttcggatccgccgccaacgtggtcagcgccaagaggaaccggctggctcccgcgcacgtggacgagcaggtgtttctgtatgagaacgcccggagtggggcagaggcggaacccgaggaccaggacgagggggagtggggcctggaccaggagcaggtgttctccttgggggatggcgtcagcggcggtttctttggcattagggacagcagcttcctgtagcgaggaagcgtgttgtcttacaagtcatccccgcagcagcccattggatgctttgctgtaaatacttacccggtcagcttggttttgaacctcagagaccatccactgtctttgacacctagaaggtggaaaaaggaaagagattygagaagtgagagagggtcgggggcggtggctcctgtctataatcgcagcactttgggaggccgaggtgggcagatcarctgaggtcaggagatcgagaccagcctggccaacatggcgaaaccccgtctctactaaaaatacaaaaattagccaggactgatggcatgtgcctgtaatcccagcttctggaggctgaggccagagaatcgcttgaacctgggaggtggaggttgcagtaagctgagatcgctgcactccagcctgggcgacaagagcgagactctctcaaaaagaaaaaagaagacacaagagaggtggctttgagtgggtttcctttcctcccctattcccggggccckgacgacttctgcttgggaactgccaacgcttctgcttgggaattgcgtgcagcagagcctagaggagctgttccttccttcacagatacttaagacctccaccatgtctgattcgagttctccctgggagggtttagaagaaacgcaggaacattctgggtggcgtcgaaggagcctttcccgatcatcatgtgtgacttctgcgaggtccagatcactgaattcatgtttacattctcgtgcaagcagggacctcttgcttctgagaaatggggaagagaccttttagccaaaatgcccttcttaaaaagagagacctttttttttaatgttcggttaaaaatgtgacagatgagtasaaaaatgcagacacttaacaaaaagcaaacagaaaaaaaagtgtggaatgtgttgtattttcgacaggttgctgccagagagcctgcttcctgctgcctgccgaaatttcactttgcggagttggtccttaaaactgggcggtggccgggcgtggtggctcacgctgaggtcaggagttcgagaccagcctggccaaccaacatggtgaaacctcgtgtctactaaaaatacaagaaactagccagatgcggtggcacccgcctgtaatcccagctactcgggaggctgaggcggaagattcgcttgagcccaggaggtggaggttgcagtgagccaagactacgccactgcactccagcctggaggccagagtgagactccgtctcaaaacaaaacaaaagtgggtggctcackggtccggaggttatgtcttcggtgtctcagccctaaaagtccagttcccccgtgcggccagcttttccacataaggtgtttttgatttgattaccggaaaggactcttgattcttctcttttaaactgaataccataggggaaatgaattttaaaatattgcccccggaggggttttccgtggctggattcctgcgagttgctttcagtcattcagggaaacagaaagacgttttccaacatgtagaactgctttttaactggaggaaaaatacttcaggaggcttagcatattgcttggattctacgtgcagcgggttctctgcctccgtgaagacaagctgggctggggaggacggtgtctaggagggatgaccccactcagctccaggcagtgttctgccgagaccccaagaactcggggtgtcagagggcaaaggaactacctgcctttcacggctgctgacttctcagggctgcaagcagcacagaatgttatccttacgtcctgagccggtttaagtctgtggaaaaggaagcacgggagaaatccacgtaacctttgctttctttttaagggaagcggttccgccgtgaacttggaaccctcagctccgggtgttctcggcagaagggcagctggaaggsacacagtggggcaggctttggggttgctccctgttctgccccgaggccggggacgcasggcagcccacgcctccgtgggctccattctgtagcattgccagcgttctcttcacgtctctaacaatccttygcttttcctcactcacgtggaaatgtgaactgtcccggctctgtcttcatttttatttttaagccatcgttcccctcctgaacggttgccccttatttaatgctgtaaagttggactgttgttcaataaaccagagcaatgcattagctcctcattcatttgtctgccgcgtgtccgtctggactgcagtttgtctgaaccccttgatcctgggagtggagggaggtttatcattattattatttttatttttgttgtggtccttgttgaaagcaactttttccagggcacccacggtcagttctgtgctcctctttcttgtctgtaaatcctcaagttatgatgtactttcgggtgttttggcatcaaaatttctgagtgaataaagccggcagctggtgaaagtgttccccgggagcagagatttttgccggttccttcacttagtggatagttgtataaacggaggccccatggacgaggcagcctggatggatccggatggcatcagcgccttccctctccccccagcctccttatcacccctctcttcctgtcttcctcacctcctctcacatggtctcttccttccctcctccttccgtccaaccctccctctcttcttcagccaacaaatccttcctttcttccttctttccttccttccttccctcccatccttgtctcttcttctctcccttccttccctcccttcccttctttctttctctcccttccttccttctctcccttccttccttctctcccttccttccttctctcccttctctcccttttctcccttccttccttctctcccttccttccctcccttctctcccttttctcccttccttctctccgttccctccctcccctccctctctgcctccctttcctcccctccctccttcccccatccctccctccctccttccctctcctccctccctccttccttccctctgtccctccctgtctccctcccttcctccttccttcctttcctccctccctctgtccctccctcccttttctccctccctcccttcctctttcgttttccttccatccctttttccttcctccctccctcttttcctccctcctgagaaaacaatggcccccaagaaacacaggaaggccgggatgtgcacctctgcccagacttgccctttccaagtgctgttggttgactgcctgtccttgggcatcattaaaatgccgaaatttctctttcttgcacgttttgggttgaaaggggttcattttcagtcctcataactaagcatttgcatcgtgatgttcatttaagtgggacatgtttacacgtttttcccattaggagtaattctagtccttgagggtttcttacagagacatttccctaaccccgacggttctcatcccagcctgtgtggcactccttccgcacagtggtgggatttttcggttcggttttgttttcacgcttgcatctggctgcacagccctaactctgagctggttgkttttgtttcccccccactttgcagaattgcctgcttcgaactgttttcccagcaggcctctgaagggtgaggaaaacagcttggggaaagtgagaaaaaggtttcggatgttttagtaaagaggcagctggtgggaaggagccggttgggctgtttctggggygccgaaatctcggtggtgacgttcatttgctcgtgagtgcagaggaggcccagagaccgggttcctggcgcagccagctcstgcttttgttccgaccatcttcctgcgccttctgcgagtctcagatgtgcttgggcagcagttctactgttttcccctctgtgatctcaggcccgccgccccgtcctttcccagtgatttctgctccgtsaaatcgtggggctcacctgagagttttataaaatgaactcgccatgcccctgcctggtgaacagagaatgcaaactctcacaggaccgtctgcagcaaaacggcagtgttttgctcatttcttcagacgacgaaaacagcagggtttggctcgtttcttccagattttctcaaactgcatgagttcctttctgagcaacttctgggaagctttcgggtttcagggctttgcagccaggctccttcctagctgcggctgcctgtccttttgtgttgcagtcagatgcgggaggtccttggcatgagtaccctgatggtgtcaactttaaggggtcagagaggaaatatttttggctccgcggaccatgcattctctgtctctcaacaacttagttttgccgttgtgtctaaaagcatccattgctgggtgyggtggctcacatctgtcatcccagcactttgggaggccgaggcgggtggatcgcctgaggtcaggagttcaagaccagcctggccaacatggtgaaaccccatctctactaaaaatacaaacattagctgggcatggtggtgggcacctgtaatcccaggtactgaggctgaggcaggagaatcgcgtgaaccagggaggcggaggttgtagtgagctaagatcgtgccactgcgctccatcctgggcgacaagagcgagactccgtgtattccactcccacttcgtgggcactaaattttatataaatgttgtgtcaagaaatattattgctctgttgacttctttttttcccccaaccattaagaaattcagaaaaaaaatgtacgaatgtaaacactgttcttggtgagtgggccttccaaaaataaccgctggactttgttgaaactacttttttttttttttttttttgccactttttcccttttttttctcgaggcaccaattggaatccacttatttgtcctggtttgagaaacagctcagatcgcacactctgggctctgtgtttctttaggtaacacacgtgaggtttttgtcactggaattcagtaatctgtgttaatattatcacaaaaraaccggggggcatttgtgtcttctcagaattgctgattaaaacagctgcatggccaggtgcagtggctctcatgcctgtgatcccagcactttgggaggccgaggcaggcggatcgcttgagcccaggagtttgagaccagcctgggcaacatggccaaacctcatccctactaaaaatacaaaaaattagccaggcatggaggcgcatgtctgtagtcagtcccagctactcaggaggcgaaggtgggaggatcacttgagcttgggagttggaggctgcagtgagctgtgaacataccactgcactccagcctggaaaataaagcaagagatgctgcctctaaaaataataataataataataaaaattagccaaacatggtggcacgcatgtgtgatcacagctacttgggagactgaggtgggaggatcgctggagcccrgaaagtcgaggctgcagtgagctgagattgcatcactgtcgtgcagcctgggcaaaagagtgagaccctgtctctaaataaataaataaatgagttcaygattaagcagaagttgtgcttgttctgccaggatttcagttgggttctttgtgccctaatttacgtgagctagtaggttgtgcgttatcttagagggcttgcatgaaagaaagagggtagcctttcttttccctgttttggtagcattgctgaggtggcttttggctgacgggtggacccgtgggtgcagatgttttgatgcagaaggaacgattgccttttcacattcaggctccaactggcttttagcttgtgcgttcttaccctggggtgttcgaggtcaccggactcctattttatttgtgtttaactggaaaggcaggaactctgagaacgtatcaaataggcagttactgcaggatttctagaatttaaattgcttccaaaactgtatccacaagctaagaattatgtttaggttttaaaaggtgttggtttgcttcttacatgtttaaattcttgagggaaagaaatgcaaagaataataaagtttcatgatacaaaaatggtatgagaccgggcacaatggctcacacctgtcatcccagcactttgggaggctgaggcaggaggatgatttttgagcctgagtttgagatcagcctgggcaaacagcgagatcctgtgcctacaaaaataaaataaaaataggctgggtgtggtggctcatgcttgtaatacctgcactttgggaggctaagtcagtaggatcacttgaactcaggggtttgagaccagcctggtcaacatactgagaccttgtctctagtaacaataaaaaaattagctggacataaggtgtgcatttgtagtcccagttacacaggaggctgaggtgggaggatcacttgagccagggagttggaggctgcagtgaaatgtgatcgcaccactgcactccagcctgtgcaacaaggagagagatgctgtctctaaaaaaaaaaaaaaagccagacgtggtggcacacgtgtgtggtcacagctacttgggaggctgaggctgaaggatcgcttgagcccaaggaggctgaggctgccataaactacgatcatgccactgcactccaggctgggcaatagcctgggcgactgtctcaaccaaaataaatttaaaaagataggaaatttcaatgtgaaaatcagtgtcccccagaacgttccatttcttcccagctgggctatttttggagttccatggggagccggctcagtgcasyttgcatgtactcrggaggatgagccctgccatggtgtgtgttaggggacagcctgatctcaccaaccctcctgagcaggcccrgccctccgagtaataactgggaacactcgccgctttgtgagasgacctcgtgtgctcactggaaggtcatctcttctggtccaygctgcagtgtggataccattttttttttttaagacagtttcactcttgttgcccaggctggagtgcaatggcacgatctcggctcacagaaacctccgcctcctgggttcaagccattctcctgtctcagcctcctgagtagctgggattacaggtgtctgccaccacagccagctaatttttatatttttcgtagagacggggtttcagtacattggtaaagctggtctggaactcctgacctcaggtgatccacccgcctcagcctcccaaagtgctgggatgacaggcgtgagccaccgcgaccagcccagtgtggatacaccttgagcacataactggaatcctttccttggaaacttggagccccttgtgtcatggtcatataaactgttgaattaagaggagacaccattaaatatgtcacagctgtcctcgaaactgggacttgttttgctttctgcctggaaatgcgagctatctttatagaattattttatagaaaataattgtatacatatataggaggtacaacgtgatgttttaatccgagtacacattgtgcaatgattaaatcaagctggttaccatattattaacctaattaacatatcaataatcaagctaattaacacattaacattcaagctaattaacatattaacaagctaattaacatattcacataatcctaactctgacctatatcacctcacctacttttttttgtggtgagaatgtgtaaaatctacttttagtcattttgaaaaacgcaatgtattattattaatgataatcactgtgtggtgtggtagaactttgaatttatttcttctatctaactggaaaaatttaattttaatgtaatttattttttttgagacagtctcaccctatcacccaggctggagtgcagcatcatgttcatagctcatggcagcctccaactcctggctcaggtgaccctcccaccacagcctcccaggtagctgggactacaggtgcacaccaccacacctggttaattttttaagttttttgcagagatggggtcttgctatgttgctcaggctggtcttgaattcctgggctgaagcgatcctcctgcctcagcctcccaagtagctgggactgcaggtgcatgcyaccatacccagctaatttttttttttttttttaaagatgcggtttcattatgttgcccaggcttgtctcaaactcttggcctccagtgatcctccttcctcagccttccatagcaytgtgattccagacatgagccaccgctcctggcctccaactgaaattttatgttctttgacaaacacttcatgaagcattcttccctggcaaccaccattgcactctctgcgtttatgcgttcagcttttttagattctacatacgagatgatacagtatttgtctctctgtgcctggttcatttcacttcacattgtatcttccagtcccatccatgttgctgcaaatggcaggatttcctttttcatggctgcatactattccattgtgtgtctatgccacatttgcttgatacgctcatctgttgattgacacatgggttgattctatatcttggaaactgttagtagtgttggcagtgcacagggggtgcaggtatcccattgatgggctgatttcctttcctttgggcacacaccaagcggtgggatgactggatcctgcacaacattctttcctttggtgtttcgcaggcccgtttctggactttagtgaacgtcttcccagtgtccatggcgtccgtcccttggccacatgcttagggaacatcttcagtgtgtacatggcgacagtcccatagccacattcttagggaatgtcttcagtgtgtacacggtggcagtccctttgctgcatgcttagggaacgtctacagtgtggtccattggccacattcttagagaacgtcttcagtgtgtacactgtggcggtcccttggccacattcttagggaatgtcttcagtgtgtacatggcggcagtcccttagccacatgcttagcgaacatcttcagtgtgcacagggcagtggtcccttgggccacatgcttagggaacgtcttaagtgccgtcccttggccgttttcttagggaatgtcttcagtgtgcacatgtggcggtcccctggtcgcattcttacggaatgtcttcagtgcgtacacggtggtcccgtagccacatgcttagggaatgtcttcagtgtgcacagggccatattcttacggaatgtcgtcagtgtgcacatggtggtggtcccttggccacattcttagggaatgtcttcagtgtgtacgtggcggaggtcccttagccacaagcttagggatcatcttcagtgtgcacagtgcgggagtcccttgggccacatgcttagggaatgtcttcagtgtgtacatggtggtggtcccttagccacatgcttagggatcatcttcagtgtgcacagggtgggagtcccttgggccacatgcttagggaacgtcttcagtgtgtacagggcagcagtcctttggctgcattgttagcgaacatcttcagtatgtacatggctgtggtcccttagccacaagcttagggaacatcttcagtgtgcacacggtggtggtcccttgggctacatgcttagggaatgacttcagtgtgtacatggtggccatcccttggccccatgcctagggaatgtcttcagtgccttgccttggctgcattcttagggaacgtcttcagtgcgtacatggcggtggtcccttagccacatacttagggaacgtcttcagtgtgtacaccgtggtggtcccttggccacattcttagggagcgtcttcacttcttacatggtggtggtccccgggccacattctaagggaacgtcgtcagtgcctacacaatggtggtcccttggccgcacgcttggggaacgtcttcagtcacagccctggttggtcccttggccacattcttagggaatatcttcagtgcatacacggtggcagtcccctggtgtcattcttagggaacgtcttcagtgcggtccctcaaccacatgcttagggaatgtcttcagtgctgtttcttagccatattcttagggaacctcttcaatgtgtacacactggtggtcccttggccgcatgcttagagaacatctttagtgcagtcccttggccacattcttagggaacgtcttcagtgtgatcccttggccacattcttagaaaacgtcttcagtttgtacaaggtgacagtccattggccagaatgtgtccctgccacattcttctgagtgtctgtgtctgtgttctttccaccctgtaagctgcttttgcttcttcactgggtgtctgtgactctcatgtggaatccctttcctctgtcaccgcccatcccaggcacagtgagagacgcagccagcctgctcctctctgcacctcgccatcccagacatcctccagccaccgtgctgaccgcattcattccttctcctgccctgtccgcatccttcttcccctacacgtttgataccaagaaatggtctgaatcacagccaaggcttcatttgctttctggaactgcagctccccagccccacccagatcagagattcagaacctgaatcttcggatttctggagatgcccccatcctatcagagacttctagtgtgtttctttatatycgtgtagacttgggaggatgacaggagagaaaccttagaaggtggtctgtgcatttcccgggcccggggtggaaggggcttgtgtcctggctgcctctgtgcacctttcattcttttttttttttttgagacggagtcttgctctgtcaccctgtcacccaggctggagtgcagtggagggatctcggctcactgtaacccctgcctcccaggttcgagcaattctcctgcctcagtctcctgagtagctgggaatacaggcatgtgccaccacgctcggctaattttatatttttagtagagatgggtgttcttcatgttggtcatgttggtctcgaactcctgacctcaggtgatccatccgcctcggcctcccaaagtgttgagatgacaggtgtgagcccccgcgcctggccgcacctttctttcttgatccacctggttttaaactcacagataaactgtttccacctgtgacaaatgagtcatccaccttccatgtggtctggactttgtccctgttacaatattcctgtctcttgtttctggttttttgcatcccacatgttgtccctgtaacagtcctgtctgttgtttctggggtcacccgtgtggcgagctgactgtgccacgttcctgaggctggtgaggatgctgtgggcaccttaatcacggctgtgaacaaactggctagagctaggtgccatggagctttgcagtggacactaagtcgtggtacccattctttgatcagtgacggagccaggtgtcttattaggtcttggggatttgtggaagcccagagcagggaaacagcttctacattgaaaggaatccttctcacactcatgttggcatcgtgaagtccctgatttcctaagacactaccctaatattttaaaagacttacaaaaaatttagtaaaatattcctaatagcagcacatgtggtgtttttttgtttgtttgtttgttttcgagatggagttttgctactgttgccaaggctggagtgcagtggtatgatctcggctcactgcagcctccgtctcccaggttcaagggattctcctgcctcagcctctcaagtagctgggattacaggcatgcactaccacacccggctaattttgtatttttagtagagacgggtttttccatgttggccaggctggtcttgaactcccgacctcaggtaatccgcctgctttggcctcccaaaatgctgggattacaggtgtgagtctccacacctggtcaatcccattctttttcaagaatgcatagtattctgtggtgtatgtacaccaccttttctttatccagtctacgtggcgttgttttgaggaatggatgaaatgatttgcataaaaacagtgaatgctttctattggaatggtgtttgcctcctgggaaactgtggagtcattgcaattgcaatttcctagtagatttgattaattaagagcattgggaatttttggggtgcctgatgcactattacagatatttttttcacagtgtagatatctcagcatgaatatgtctgttttcttttcttttctttcttttttttttttttgagatggagtttctctcttgttgccaaggctggagtgcaatggctcaatcttggctcactgcagccaacatctcctgggcttaagcagttctcctgcgttagcctctggagtagctgggattacaggcatctgccaccatgcctggctaatttttttttgtgtgtgtgtttttagtagagacagggtttcaccatgttggcctggccggtctcaaactcctggcctcaagtgatccacctgccttggactccgaaagtgctgggatgacaggcctgagccatggcggccagctgtctgttttctttccataagaggtgctggtctcaccgtggctctgtgctgtgatgaaatggcattgtccaagttttactcctcacagcctgattttgtatgttaaagacgtcttccttggtgtgaatcaagtgggctgggcagagttaagggagccatttatttagaaggcgattagatcgaattatgtcttggtaattactgcagttacaccaccccattctttccgtggctctcctagctgggtttgtggctagtcatggaggtgccctgaagagcctcattttcccacagctgtaggaagtgtgtggtacacccacaatgtcttagcttttgtattagggaaggtcttcagtgcattcccttggccacattcttagggaacatcttcagtgtgtacatggcggcggtcccttaaccacattcttagggaacgtgttcagtgtgtacacggtggcagtcccttggctgtatgcttagggaacgtcttcagtgagtgtgatcccttggccacatgcctagggaacatcttcattgtgtacctggcggcggtcccttagccacatgcttagggaatgtcttcagtgtgtacacggtggcagtctgttggccccatggttagggaacatcttcagtgtgcacagggcggcggtcccttgtgccacatgcttagggactgtcttcagtgtgtacatggtggcggtcccttggtcgcattcttagggaacctcttcagtgtgtacatgtcggcattcccttagccgcatgcttagggaacgtcttcattgtgttcttggtggcagtcccttagccacatgcttagggaacgtcttcagttgtatacagtggggtcccttggtcattatgcctaggggaacgtcttcagtgccagctgcattcttagggaatgtcttcagtgtgcacatggcggaggtcccttagccacatacttagggagtgtcttcactgcacacagcagtggtcccttggttgcattcttagggaacatcttcagtgtgcacatggtagcagtccctcacccacattcctagggaatgtcttcagtgtatacatggtggcagttctttggctgcatgcttagggaacatcttcagtgcattcccttggccacatgcctagggaacatctttagtgctgtcccttccctgcatttttagggaacgtcttcagtgtgtacatggtggcggtcccttggccgcattcttagggaacgtcttaagtgtgtacatggcggcggtcccttagccacaagcttagggaacgtcttcagtgtgtatatggtggcagtctcttggccacatgcttagggaacgtcttcagtgccatcttttagctgcattcttagggaacgtcttcagtgtgtacatggcagaggtcccttagccacacacttagggaacatcttcagtgtgtgcacagcagtggtcccttggcctcattgttagggaacgtctttggtgtgtagatggccgccgtcccttagccacaagcttagggatcgtcttcagtatgcacagcgtggcagtcccttgggccacatgcttaaggaatggcttcagtgtgtacaccgttgtggtcccttggccacattcttagggagcgtcttcagtgccgtcttttggctgcattcttagggaatgtcttcagtgcgtacatgggggcggtcccttagccacatacttagggaacgtcttcagtgtgtacatggcagtggtcccttggccccattcttagggaacatcttcagtgtgtacatggtggcagtcccttaatcacatgcttagggattgtcttgattgtgtacatggcgatggtcccttggccacatgctttgggaacctcttcagtgcatacggagtggcagtcccttgtccacattcttagaaaacgtcttcagttcgtacacggtggcgatcccttggccacattcttctgagtgtctgtgtctgtgtcctttccaccctgtaagctgcttttgtttcttcattgggtgtctctgactctcatgtggaatccctttcctctgtcaccgcccatcccaggcacagtgagagacgcagccagcctgctcctctctgcacctcgccatcccagacatcctccagccaccgtgctgaccgcattcattccttctcctgccctgtccgcatccttcttcccctacacgcttgataccaagaaatggtctgaatcacagccaaggcttcattatctttctggcactgcagctccccagccccacccagatcagagattcagaacctgaatctttggatttctggagatgcccccatcctatcagagacttctagtgtgtttctctatattcgtgtagacttgggaggatgacaggagagaaaccttagaaggtggtctgtgcatttccggggcccggggtggaaggggcttgtgtcctggctgcctctgtgcacctttcattcttttttttttttttgagacggagtcttgctctgtcaccctgtcacccaggctggagtgcagtggagggatctcggctcactgtaacccctgcctcccaggttcgagcaattctcctgcctcagtctcctgagtagctgggaatacaggcatgtgccaccacgcccggctaattttatatttttagtagagatgggttttcttcatgttggtcatgctggtctcgaactcctgacttcaggtgatccatccgcctcggcctcccaaaatgttaggatgacaggcgtgagcccccgcgcctggcggcgcctttcattcttgatccacctggtttcaaactcgcagataaactgtttccacctgtgacaaatgagtcatccaccttccgtgtggtctggactttgtccctgttacaatattcctgtctcttgtttctggtttttggcgtcccacgtgttgtccctgtaacagtcctgtctcttgtttctggggtcacccctgtggcgagctgactgtgccacgttcctgaggctggtgaggatgctgtgggcaccttaatcacggctgtgaacaaactggctagagctaggtgccatggagctttgcagtggacagtaagttgtggtacccattctttgatcagtgacggagccaggtgccttattaagtctcggggatttctggaagcacagagcaggcaagcaccttctacactgaaaggaatccttctcacactcaygttggcaacgtgaagtcctgcctttggaaatccstgatttcctaagacactrccctaacattttaaaggacttaaaaaaaattcagtaaaatattcccaatagcagcacatgtagtgttttatttatttatttatttttgagatgatttgcactcttgtcgcccaggctggagtgcaatggtatgatctgggttcactgcaacctccgtctcccgggttccraggattctcccatctcagcctgtaaggtagctgagattataggcatgcgccaccatgctcggctgattttgtatttttagtagtgacagggtttcaccatattggtcagggtggtctcgaactcctggcctcaagtgatccacccatcttggcctcccaaagtgctgggattatgaatcactgctcctggcctactttttaaactttcaggttcaggggcacgtgtgcaggttcattacacgggtaaattgcatgtcctgggggtttagtgtacagattaattcatcaaccaggtagtaagcctactaccatctgataggtagttttttgatcctctcatttgtcccaccctccaccctccagcaggcccctgcagctgttcccttctttatatccaccagtgcccaatgtttagctgtcacttatcagtgggaacaggtggtatttggttttctgttcctgtgtaagtttgctaaggataatggcctccacctccgtgcatgttcctgcaaaggacatcatcccattttttttttttttttgagacagtttcctttttgttgcccaggctggagtgcaatggtgtgatctcggctcaccgctaccaccagctcccgggttcaagcagttgtcctgcctcagccttctgagtaactgagattacagacacatgccaccacgcccggctaattttgtatttttagtagagacggggtttctccatgttgcccaggctggttttgaactcctgacctcagttaatctgccctccacggcctcccaaagtgctgagattataggtgtgagccaccacacccaaccaatcccattctttttcatgggtatgtagtattccatagtgtatatgcaccaccctttgtttatccagtttacatggcgttgttttgagaaatggatgaagcgatgtgcatgaaaacactgaatgcttcctactggaggggtgttcacctttccgggaaactgtggagtgattgcaattgcaatttcctagtagatttgattggttaatagcattgggaatctttggggtgcctgatgccctattgcagatcttttttcacagtgtagaaatctcaacgtaaatgtctttttttttttttgagatggagttttgctcttgttgcccaggctgcagtgcaatggctcaatctcggctcactgcagccaacatctcccgggtttgagcaattctgcctcagtctcctgagtagctgggattgcaggtgcctgccaccacacccggctaatttttgaatttttagtagagaaggggtttcagcctattgttcaggctgctctcgaactcgtgacctcaggtgatccacccacctcggcctcccaaagcgctgggatgacaggcgtgaccgcgcccagcccagtgtggatacaccttgagcacataactggaatcctttccttggcaacttggagccccttgggtcatggtcatataaasggtgttgaattaagaggaaacactgttaaatatgtcacagctgtccttgaaactgggacttgttttgttttctgcctggaaatgcgagtcatttttctggaaaattcatttttcgttaaaaaaagtaattgtatacacgtatatgaggtacaacgtgatgttttaatccacgtacacatcatgcaatgattaaatcaagctagttaccatattaacaatcacattaactaacatattaataatcaggctaattaacatattaacattgaagctaattaacatattaacaatcaagctaatttacatattcacataattctaactctaacctatatcacctcacctacttttttttgtagtgagaatatgtaaaatctacttttagtcattttgaaagacgtgatgtattattaactatcatcactgtgtggtgtgatagaacttggaattcatttgttttatctaactgaaaaaaattaattttaatgtaatttatatgttttttgagacagtctcatcctatagccaggctggagtacagcatcatgttcatagctctcggcagcctccaastcatggctcaggtgaccctcccacctcagcctcccaggtagctgggactacaggtgcacaccaccacacctggttaatttttaaattttttgtagagatggggtcttgctatgttgctcaggctggtcttgaattcctgggctaaagcgatcctcctgcctcagcctccyaagtagctgggactacaggtgcatgccaccatatccagttaattttttcagttttttttttatttgtttagagatagggtttcattacgttacccaggcttgtctcaaactcctggcctccagtgatcctccttcctcagccttccatagcacagtgattccagacatgagccacagcgctcctggcctccaactgaaatgttatgttctttgacaaacacttcagcattcttccctggcaaccaccattgcactctctgcgtttatgcgttcagcttttttagattctacatacgagatgatacagtatttgtctctctgtgcctggttcatttcacttcacattgtatcttccagtcccatccatgttgcgcaaatggcaggatttcctttttcatggctgcatactattccactgtgtgtctatgccacatttgcttgatgtactcatctgttgattgacacatgggttgattgtatatcttggaacctgagtagtgctgcagggcacaggggatgcaggtatcccattgatgggctgatttcctttcctttgggtacacacccagtggtgggatgtctggatcctgcacaccattctttcctctgatgttttgcaggcctatggctggaccttyggaacgtcttcactatgtacaaggtggcggtcccttggccacattcttagggaacgttttcagtgtgtacatggtgtcggtcccttggctatatgcttagggaacatcttcagtgggtacatggtggcggtcccttagtcatattcttagtgaatgtcttccgtgtgtacacggtggcagtcccttggctgcatccttaggcaacgtcatcagtgcagtcccttggccacatgcttagggaacgtcttcagtgcatacacggtggcggtcccttggccacattcttagggaatgtcttcagtgtgtacatggtcgcagtctgttagccacatgcttagggagcgtcttcagtgtgtatagggtggcggtcccttggccacatgcctagggagtgtcttcagtgccgtcgcttggctgcattctttgggaacgtcttcaatgtatacatggcggcggtcccttggctgcatttttagggaacgtcttcagtgtgtacatggcggcggtcccttatccacattcttagggaatgtcttcagcgtgtacacggtggcagtcccttggccgcatgcttaggggacttcttcagtgcggtcccttggccacatgcctagggaacgagtcttcagtgccgtcccttggctgcattcttagggaacgtcttcggtgtgtacatggtggtggtcccttgggcgcattgttagggaacgtcttcagtgtgtacatggcagtggtcccttagccacatgcttcggaatgccttcagtgtgtacatggcggaggcccctcagccacgtgcctagggaatgtcttcagtgctgtcttttagcggcattcttagggaacgtcttcagtgtgtacatggtggtggtccctgagccacatacttagggaacgtcttcagtgtgcaacggcagcggtcacttggccttattgctagggaacttcttcagtgtgtacatggcggtggtcccttagccacaagcttagggaacgtcttcagtgtgtacatggcagcagtcctttggaccacatgcttagggaatgtcttcagtgtgtacacggtggtggtcccttggccccatccctagggaaagtcttcagtgccgtcctttggctgcattctttgggagcgtcttcagtgtgtacatggtggaggtcccttggccacattcttagggaatgtcttcagtgtgtacatggcggcggtcccttggccgcatacttagggaacgtcttcagtgtgtacatggcagtagtcccgtggccgcattcttagggaacctcttcagtgcatacacagtggcggtcccttggccacattcttctgagtgtccgtgtctgtgtacttttcatcctgtaaactgcttttgtttcttcattgggtgtctctgactcttatgtggtatccgtttcctctgtcagcgaccatcccaggcacagtgagagacgcagccagcctgctcctctctgcaagtggccatctcagacattctccagccagcgtcctgaccgcattcattccttcccctgcccggtccacatccttcttcccctacacccttgctaccaagaaatggtctgaatcacatcacaggcttcctttgctttctggaactgcagctccccagcccacccagatcagaggttcagaacctgaatcttcggatttctggagatgcccccatcgcatcagagacttctagtgtgattctttatattcgtgtagacttgggaggatgacaggagagaaaccttagaaggtggcctgtgcagttccagggcccagggtggaaggggcttccatccctggctgcatttgtgcacctttcattcttggtccaacattttttttttttttttttgagacggagttttactgtgtcgcccaggctggagtgcagtggtgtgatctcagctccctgcaacctccccgcctcctgggttcaagcgattctcctgagtggctgggagtacgggcatgcaccaccatgcctggctaattttatatttttagtagagatgaggtttctccatgttggtcaggctggtctcaaacccctgacctcaggtgatccatccaccttggcctcccaaagtgctgggattacaggtrtgagccaccacgtccggctgcactttttattcttgatccacctggtttgcaactcacagataaactgtttccacctatgacacatgagtcttccaccttccatgtcctctggactttgtccctgttataatattcctgtctcttgttctggtttttggcatctcacacattgtccctgtttcagtccggtctcctgtttctggtgtttggtgtgccgcacgttgtccctgttacagtcctgtctcttgtttctggggtcacccgtgtggwgagctgactgtgccgcgttcctgaggctggtgaggatgctgtgggcaccttaatcacggctgtgaacaaactgactagagctaactgccacgragctttgcagtggacgctaagctgttgtactcattgtttgatcagtgacggagccagatgtcttattaggtctcggggatttgtggaagcctagagcaggcatgcaccttctacgtagaaaggaatccttctcacactcaagttggcgtcgtgaagtcctgcctttggaaatccctgatttcctaagacactaccctaacattttaaagggcttaaaaaatttcaataaaatgttcccagtagctgttacatgtagtcatgtagcgtttttttttttttttttgagatggacttttgctcttgtctcycaggctggagtgcaatggcgcgatctcggctcactgcaatctctgtctcccgcattcaagggattctcccacctcagcctgtcaggtagctaggattataggtgtgcgctaccatgccctgctacttttgtatttttagtagtgacagggtttcagcatgttgatcagggtagtctggaactccttgcctcaggtgatccacccgccttggcctcccaaagggctgggattatgaatcaccgcccccagcctacttttttcactttgatttcaggttgagggggacgtgcgcaggtaaattgcatgtcttgggggcttagtgaacagattatttcatcatgcaggtaataagtccagtaccacctgataggtagtttttcgrtcctctcatttctcccaccctccaccctccagcatgcccctgcagctgttcccttctttgtatccatgagtacccaatgtttagctgccgtttatgagtgagaacaggtgatatttggttttcttttcctacgtgagtttgctaaggataatggcctccacctccatgcatgttcctgcaaagggcatcatcccatgttttctttttttctttttcttttgagactgggtttccttcttgttgcccaggctggagtgcagtggtgtgatctcagctcaccacaacctcctgttcctgggttcaagtgattctcctgcctcaggctactgagtcgttgagattacaggcgcataccaccacgctgggctaattttgtatttttagtagagacggggcttctccatgttggccagtctggtcttgagctaccgacctcaggtaatctgcctgcctcggcctcccaaagtgctgggattacaggcatgcgccgccacgcccaaccaatcccattctttttcatgggtccatagtattccatagtgtatatgctccaccctttctttatccagtctacatggcgtcctgttgaggaatggatgtaacaggcgtcgtgttcaggaatggatgtaacaatgtgcataaaagcagtgaatgttttctattggaatggcgtttgcctttctgggaaactgtggagtcattcgaattgcaatttcctggtagatttgattagctaagagcattgggaatttttggggtgcgtgatgccctgttgcagatattttttcacagtgtagaaatctcagcatgaatatgtctgttttcttttctctttttttttttttttttgcgatggagttttgctcttgttgcccaggctagagtgcaatggctgaatctgggctcactgcagccatcatctcctgggttcaagcaattctcctgcctcagcctctggagtagctgggattgtaagtgcctgcccctacaccctgatttttctttttttttgtatttttagtagagacggggtttcacctgttgggcaggctggtttcgaactcctggcctcaagtgatccacctgcctcagcctcccaaagtgctcggatgacaggtgtcagccacggtgcctggccgtctgttttcttttcataagaggtgctggactcacagtggctctgtgcwgtgatgaaatgacattgccaaagttttactcctcacagcttgattttgtatgctaaacaggtcttctttggcgtgattgaggagggatggggagacttaagggagccatgtatttagaaagcgattagatcctgttatgtcttggtaattactgcagttacaacacgccattctttccgtggctcacctagctgggttcgtggctagtcatggaggcgccctgaagagcctcattttcccacagctgtaggaagtgtgtggtacacccacaatgtcttagcttttgtattagggaacgtcttcagtttgttcccttggccacatgctttgggaatgtcttcagtgtgtacacggtggctgtccctgggccgcatgcttagggaacgtcttcagtgaggtcccttggccatatgcctagggaacgtcttcggtgccatcctgtgactgcattcttagggaacgtcttcagtgtgtacatggcgggggtcccttagccccattcttagggaatgtcttaagtatttacacagtggcagtctgttggcctatggttagggaacatcttcattgtgcacatggtatcagtcccttgcgccacatgcttagggaattcttcagtgtgtacatggtggccgttccttggctgcattgttacagaacgtcttcagtgtgtacatgtcagcggtcccttagccgtaagcttagggaacgtcttcagtgtgtataaggtggcggtcccttggccacatgcctagggaacgtcttcagtgccctcccttggctgcattcttagggaacgtcttcagtgtgtacatggctgccttcccttagccacatacttagggaacatcttcagtgtgcacacggcagctgtcccctggacgcattcttagggagcgtcttcagtgcgaacatggcgggggtcccttacccacattcttagggaacatcttcagtgtgtatatggcagcagtcccttagccacacacttagggaacctcttcagtgtgtacatggcagcggtcccttaacccaagcttagggatcgtcttcaatgtgcaaagggcaatggtcccttgggccacgtgcttagggaatgtcttaagtgtgtacacggtggcggtcccttagccacatgcctaggaaaacgtctgccatctctttgctgcattcttagggagcgtcttcagtgcgtacatggcggccgtcccttagccacgtacttagggaacatcttcagtgtgtacatggcggtggtcccttagccacatacttagggaacgtctccagtgtgtacaggtggccgtctcttagccatattcttagcgaatgtcttcagtgtgtacacagcagtggtcctttggccacatgctttcygaacgtcttcagtgcatacagtggcagtcccttggacccattcttagaaaacgtcttcagttcgtactcggtggcgatcccttggccacattcttctgcgtgtctgtgtctgtgtccttttcaccctgtaagctgcttttttttcttcattgggtgtctctgactctcatgtggaatccctttcctctgtcaccgcctgtcccaggcacagtgagagacgcagccagcctgctcctctctgcacgtcaccatcccagacattctccagccagcgtcctgaccgcattcattccttctctttcccttgtccacatccttcttcccctacacgcttgataccaagaaatggtctgaatcacagccaaggcttcctttgctttctggaattgcagctccccacccccacccagatcagaggttgagaacctgaatcttcggatttctggagatgcccccatcgcatcagagacctctagtgtgtttctttatatccgtgtagacttgggaggatgacaggagagcaaccttagaaggtggcctgtgcagttccagrgcccagggtggaaggggcttccattcatcactgccttcgtgcacctttcattcttgatccaactgttgttgttgttgttttgagacggagtcttgctgtgtcgcccaggccggagtgcagtggtgtgatctcaggtcactgcaacctccgcctcccatgttcaagcgattctcctgccacagccttcctgagtagggagctgctaaaataaaataccttcagttgggtaatttataaactagagacatttatcactcacagttctgaaggctggaggttcaagatcatggcagattcagtgtgtggtggggatgcactccctggttcatagacgacgcattttctctgcctgctcacatggtggaaagggcgagggagctctctggggctccttttataaggacagtgatcctattcatgaggcttgatccccatgaagtcatcacctcccaagtctcccacctcctgacaccattgtcttaggggtgaggatttcaatgcaggaatttgggggaggaacacaaactttcagattgtagcaaataccattctttaaaaaaatgcagtaatagttaagctttttttttttaatttgataaattttccaagaaggaggagacacagaaaccctccgtgttttgaaggttaatattagtgctgtaaaatacacgtgggacttgggcttataaaaaattcctggtcatggcaaaatataggtggtttgcagtacctggggaagcccacctttcctgtttctgacatgtaacttttgtggaaattgcctgaaagttgtttctagttacccttcagtcctgtgtccaacccagcatgtccgatactatctaacattgttttttttttgagatggagttttgctcttgttgcccaggctgcagtacagtggcacgatcttggctcgctgcaacctccacctcccaggttcaagcgattctcctgtctcagcctcctgagtagctgggattactaaattttatataaatgttgtgtcaagaaatattattgctcttttgcctttttttcccttaaccgttgagaaattcagaaaaaaacatttatgaacgtcaacactgtttttgacaagtaaacattgttcttggcaagtgggccttccaaaaataagggctggcgtttgtggaaactgctctactgttctttttttttcttgctacttttttctttttttttttttttgaggcactaattggaatccacttattcgtcctgggtggagaaagagttcagatctaacactgggggctctgtgtttccttaggtaatacatatgaagtttttgtcactgtaattcagtaatctgtgttaatattatcacaaaagagcagagtggcatttgtgtcttctcagaattgcttattaaaacagctgcatggccagccgcggtggctctcatgcctgtgatcccagcactttgggaggccgaggccggtggatcgcttgagcccaggagtttgagaccagcctgggtaacatggccaaacctcatctctactaaaaatacaaaaagtgagagcgtgcctgtagtcccagctactgaggaggcagaggtgggaggatcacttgagcgtgggagttggaggctgcagtgagctgtgatcacagcctgggaaaccaagcgagagatgctgtgtctaaaattataaaaataaaaattagccaaacatggtgccacgcgtgtgtggtcacagctacctgggtggctgaggtgggaggatcrctggagcccacaaagtcgaggctgcagtgagctgagattgcatcactgtcgtgcagcctgggcaccagagtgagagacaccctgtctctaaataaataaataagttcatgattaagcagaagttgtgcttgttctgccrggatttcagttgggttctttgtgccctaatttacgtgagctagtaggttgtgcgttatcttagagggcttgcatgaaagaaagagggtagcctttcttttccctgttttggtagcaytgctgaggtggcttttggctgacgggtggacccgtgggtgcagatgttttgatgcagaaggaacgattgccttttcacattcaggctccaactggcttttagcttgtgcgttcttaccctggggtgttcgaggtcaccggactcctattttatttgtgtttaactggaaaggcaggaactctgagaacgtatcaaatagccagtttactgcaggctttctagaatttaaatcgcttccaaaactggatccacaagctaggaattatgtttaagttttaaaaggtgttggtttgcttcttacatgtctaaattcttgggggaaaaactgcaaagaataataaagtttcatgattcaaaaatggtatgaggccgggcacaatggctcacacctgtcatcccagcactttgggaggctgaggcaggaggatgatttttgagaccaggagtttgagatcagcctgggcaaacagcgagatcctgtgcctacaaaaataaaataaaaataggctgggtgtggtggctcatgcttgtaatacctgcactttgggaggctaagtcagtaggatcacttgaactcaggggtttgagaccagcctggtcaacatamtgagaccttgtctctagtaacaataaaaaaattagctggacataaggtgtgcatttgtagtcccagttacacaggaggctgaggtgggaggatcacttgagcctgggagttggaggctgctgtgaaacgtgatcgcaccactgcactccagcctgtgcaacaaggagagagatgctgtctctaaaaaaaaaaaaaaaagccagacgtggtggcacacgtgtgtggtcacagctacttgggaggctgaggctgaaggatcgcttgagcccaaggaggctgaggctgccataagctacgatcatgccactgcactccaggctgggcaatagcctgggcgactgtctcaaccaaaataaatttaaaaagataggaaatttcaatgtgaaaatcagtgtcccccagaacgttccatttcttcccagctgggctatttttggagttccatggggagccggctcagtgcaccttgcatgtactcaggaggatgagccctgccatggtgtgtgttaggggacagcctgatctcaccaaccctcctgagcaggcccggccctccgagtaataactgggaacactcgccgctttgtgagaggacctcgtgtgctcactggaaggtcatctcttctggtccacgctgcagtgtggatactttttttgtttgtttgtttgtttgagaaggattattgctctttttgcccaggctggagtgcaatggcatgatctcggctcactgcaacctccacctcctgggttcaagccattcttctgtctcaacctcctgagtagctgggattacagtcgcccgccaccacacccggctaatttttgtatttttagtagagacagggtttcagcatattggccttgctgttctcaaactcctgacctcaggtgatccacctgcctcagcctcccaaagtgctgggatgacaggcgtgagccaccgcgcccggcccagtgtagatacaccttgagcacataactggaatcctttccttgacaacttggagccccttggaacatagtcatataaactgtattgaattaagaggagacaccgttaaatatgtcatagctgtcctcaaaactgggtcttgttttgctttctgcctggaaatgggagtcacttttatagaaaatttattgttcgttaacaaaaaataattgtgtgtgtgtgtatatatatattgtatgtgtgtgtatatatatatatatatatatatatatatatacacacagacacacattctctctctctctctctctatggtacaatatgatgttttaatccaagtacacattgtgcagtgattaaaccaagctagttaccatattagcaatgaagctaattaacattaataattaagtgaattaacatattaaccattgacctaattaacatattaacaatcaagctaattaacatattaacaagctaatttacatattcagataaccctaactctaacctatatcacctcacttcgtttttttggtgatgagaatatgtaaaatctagttttagtcattttgaaagatgcaatgtattattattaactataatcactgtgtggtatgatagaactttgaatttatttcttttatgtaactgaaaaaatttaattttaatgtaatttatgtttttgagacagtctcaccctctatcacccaggctggagtgcagcgtcatgttcatagctcatggcagcctccaactcctggcacaggtgaccctcccacctgagcctcccaggtagctgggactacaggtgcacaccaccacacctggttaatttttaaagttttgtagagatggggtcttgctatgttgctcaggctggtcttgaattcctgggcagaagtgatccttctgcctcagcctcccaagtagctgggactgcaggtgcatgccaccatatctagctaattttttcatttttttttatttttaragatggggtttcattatgttgcccaggcttctctcaaactcctggccttctgtgatcctccttcctcagccttccatagcattgtgattccagacatgagccaccgctcctggcctccaactgaaatkttatgttctttgmcaaacacttcatgaagcattcttccctggcaaccaccattgcactctctgcgtttatgcgttcagcttttttagattctacctatgagatgatacgatatttgtctctctgtgcctggttcatttcacttcacattgtatctttcagtcccacccatgttgctgcaaatggtaggatttcctttttcatggctgcataccattccattgtgtgtctatgccacattcgcttgatgcacttatctgttgattgaacatgggttgattctatatcttggaaactattagtagtgctgcagtgcacagggggtgcaggtatgccattgatgggcagatttcctttcctttgggtacacaccgagcggtgggatgactggatcctgcacaacattctttgctctgatgttttgcaggccaatggctggaccttagggaacgtcttcactttgtacaaggtgggggtcccttggccacattcttagggaacgtctgcagtgtgtacacgatgttggtctcttgaccacatgcttaggaaacatcttcagtgtgtagctggcagcagtcccttagccacattcttcccgaatgtcttcagtgtgtacacggtggcagtccctagtcctaattcttcgggaatgtctttagtgtgtacatggcggcagtcccttggccgcattcttagggaacgtcttcagtgtgcacactgcggtggtcccttagccacaagcttagggaatgtcttcagtttgtacttggtggcggtcccttggctacatgcttacggaacatattccctgccgtctcttggctgctttcttagggaacgtcttcagtgtgtacatggtggtggtcccttagccacaagcttagggaacgtcttcagtgtgcacaccgtggctgtcccttgggccacatgcttagggaacgtcttcagtgtgtacatggtggcagtcccttggccacattcttagggaacgtcttcagtgtgtacagggcggcagtcctttaaccacatgcttaggggaaccatcttcagcatgtccacggtggcggttcttttgcggcattcttaggggatgtcttcagtgtgtacatggcggctgtcccttagccacaggcttagggaacgtcttcagtgtttacatggtggcggtcccttggccacatgcctagggaatgtcttgagtgctgtcccttggctgcatcttagggaatgtcttcagtgtgtaaatggtagcagtcccttagccacatgcttagggaacgtcttcagtgtgcacacagcagaggtcccttgcgccacatacttagggaacgtcttcagtgtgtacatggtggtggtcccttggccacatccttagggaacatcttcagtttctacacagtggccatcccgctgccacattcttagggaacgtcttcagtgcctacatggtggtggtcccttggccacattcttagggatcatcttcagtgtggacccttggccacattcttagaaaacgtcttcagttcatacatggggacgatcccttggccactttcttctgagtgtctgtgtcatttgctccctgtaagctgcttttatttcttcattgggtgtctctatcatgtggaatcccactcatctgtcaccacccatcccaggcacagtgagagacacagccagcctgctcctctctgcacgtggccatctcagacattctccagccactgtcctgaccccattcattccttctcctgcacggtccacatccttctttccctacacccttgctaccaagaaatggtctgaatcacagccaaagtttcatttgctttctggaacagcagctccccagccgcactcagatcagagattcagaacctgaatcttcggatttctggagatgcccccatcccatcagagacttctagtgtgtttctttatattcgtgtagacttgggaggatgacaggagagaaaccttagaaggtggcctgtgcagttccagggcccagggtggaaggggcttgcatccctggctgcctttgtgcacctttcattcttcatccagctgttttttttttttttttttgaagaggagtcttgctgtgtcccccaggctggagtgcagtgctgtgatgtcagctcactgcaacctccgcctcctgtgttcaagccattctcctgccacagcctcccgagtagctgggattacaggcacctgccaccacacatggctaatctttgtatttttagtagagatggggtttcatcatgttggccaggctggtcttgaactcctgacctcaggtgatccacctgcctcagcctcccaaagttctgggataacaggcatgagccactgcgcccggccgcacccttcattcttgattcacctggttacaaactcgcagataaactgtttctacctgtgacaaatgagtcatccatcttccatgtggtgtcgactttgtccctgttataatattcctgtctcttgttctggtttttggcgtcccgcacattgtccctgttacagtcgtgtctcttgtttctggggtcacccctgtggtgagttgactgtgccctgttcctgaggctggtgaggatgctgtggacaccttaatcacggctgtgaacaaactggctaaagctaggcaccatggagctttgcagtggatgctaagtcgtggtacccattctttgatcagtgacggagccaggtgtcttattaagtctcggggatttgtggaagcccagagcaggcatgcaccttctacattgaaaggaatccttttgacactcaacgttggtgtcgtgaagtcctgcctctggaaatccctgatttcctaagacactaatctaacattttaaaagagttaaaaaaaaatcagtaaaatgttccccatagaagcatacagtgttttgtgtgtgctttttattgttttttttttttttttttttgagacgaagttttgttcttgtcgccaaggctggagtgcagtagcacaatctcggctcactgcaacctccgtctccagggttcacgggattctcccgcatcagcctgtcacgtagctgggattataggtgtgtgccaccatgcccgactaattttgtatttttagtagtgacagggtttcatcatgttggtcagggtggtctcgaactcctggcctcaagtgatccacccgccttgccctcccaaagtgctgggattaggaatcactgctcccggcctacttgtttttacttttatttcaggttgaggggcacatgcgcaggttcgttacacgggtaaattgcatgtcctgggggtttagtgtagagattatttcatcaaccaggtaataagcctactaccacctgataggtaatttttcaatcctctcgtttgtcccaccctccaccttccagcaggccccggagtctgatcccttctttatatccacgggtacccaatgcttacctaccacttatcagtgagaacaggaggtattttgtcttctgttgctgtgtaagtttgctaaggataatggcctccacctccatgcaggttcctgcaaaggacatcatcccgtttttttttttttgagatggggtttccctcttgttgcccaggctggagttcaattgtgtgatcttgactcaccgcaacctctggctcccgggttccagtgattctcctgccttagccttctgagtagctgagattacaggtgcatgccaccacgcccagctaattttgtgtttttagtagagacagggtttctccatgttggacaggctggtcttgaactccggacctcaggtaatccacccgcctcggcctcccaaatttctgagattacaggcgtgagccaccacgcccaaccaatcccattctttttcatgggtgcatagtattccatagtgtatatgctcccacctttctttatccagtctacatgacgtcgttttgaggtatggatgaaatgatttgcataaaaacagtgaatgctttctattagaatggtgttggcctttctgggaaaccgtggagtcattccaattgcaatttcctagtagatttgattggttaatagaattgggaatttttggggtgcctgatgcacactattggagatcttttttcacagtgtagaaatctcaacatgaatatgtctttttttttttttgagacggagtttctctcttgttgcccaggccggagtgcaatagctcaatctcggctcactgcagccaacatctcccgggttgaagcaattctcctgcctcagcctcctgagtagctgggattacaggtgcctgccaccacacctggctaatttttgtatttttagtagacacagcgtttcagcatattggtcaggctggtctggaactcctgacctcaggtgatccacccgcctcagcctcccaaagtgctgggatgacaggcgtgagtcacagcgcccggcccagtgtggatacaccttgagcacataactggaatcctttccttggaaacttggaaccccttgtgtcatggtcatataaactgtgttgaattaagaggagacactgttaaatatatcacagctgtcctygaaactgggacttgttttgctttctgcctggaaatgcaagtcatttttatagaaaatttatttttcgttaacaaaaaataattgtatacatatatatggtacaatgtaatgttttaatccaagtacacattgtgcaatgattaaatcaagctagttaccatattaacaataaagttaattaacatattaaaataaagctaataacgtattaaccaagctaattaacatattaacaatcaagctaattaacatattcacataatcctaactctgacctatatcacctcacctagttttttttgtggggagaatatgtcaaatctacttttagtcattgtgaaagacgygatgtattattaactatcatcactgtggtgtgatagatcttggaatttatttgttttatctaactgaaaaaaattaattttaatgtaatttatgtattttttgagacagtctcaccctatagccaggctggagtacagcatcatgttcatagctctcggcagcctccaagtcatggctcaggtgaccctcccacctcagcctcccaggtagctgggagtacaggtgcacaccaccacacctggttaatttttaaattttttgtagagatggtgtcttgctatgttgctcaggctggtcttgaattcctgggctgaagcgatcctcctgcctcagcctcccatgtagctgggagtacaggtgcatgccaccatacccagctaattttttgttttttttttttagagatggggtttcattctgttgcccaggcttatctcaaactcctggcctcaagtgatcctccttcctcagccttccatagcattgtgattccagacatgagccaccgcttttggccagcaactgaaattttgtgttctttgacaaacacttcagcattctttgctggcaacaaccattgtaccctctgcatttatgtgttcagcttttttatattctacatatgcgatgatatggtatttgtctctctgtgcctgtttcatttcacttcaccttgtatcttccagtcccatccatgttgctgcaaatgacaggatttcctttttcatggctccatactattccagtgtgtgtctatgccacatttgtttgatgcactcatctgttgattgacacatgggtttattccgtctcttggaaactgagtagtgctgcagtgcacagtggggcaggtatcccattgatgggtacacacccagtggtgggatgactagatcctgtacaccattctttcctctgatgtttcgcaggcccatgactggacctttggaacgtcttcactgtgtacaaggtggtggtcccttggccacattcttagggaacgtcttcaatgtgtacatgacggccgtcccttggccacatgctcagggaacatattcagtgtgtacttggcagtggtcccttagccacattattagggaatgtcttccgcgcgtacacagtggcagtccgttggccgcatgcgtagggaacgtcatcagtgcggtccattggccacatgcttagggaacatcttcagtgtgtacatggtggtctcttggccacattcttcgggaacgtcttcactgtgtacatggcggaggtcccttgggcgcatggttagggaacgtcttcagtgtgtacatggcggaggtcccttatccacattcgtagggaatgtcttcaatgtgtacacggtggcagtcccttggctacatgcttagggaacatcttcagtgcggtcccttgaccacatgcctagggaacgtcttcagtgccgtcccttggctgcattcttagggaacgtcttcagtgtgtacatggtggtggtcccttagccacctgcttagggaacgtcttcaatgtgcacatggcagcagtcccttggccacattttttgggaacatcttcagtgtgtacatggcggcggtcccttagccacattcttagggaatgtcttcagtgtgtacacggcggcagtcccttggccgtatgcttagtgaacgtcttcagtgagtacatggcggcgatcccttagtcacctgcttagtgaacatcttcagtgtgtatatggcggcagtcccttaaccacatacttagggaacgtcttcagtgtgtacatggcagtggtgccttagccacatacttagggaatgtcttcaatgtgtacatggcagtggtttcttagccacatgcctagggaacgtcttcagtgttgtcttttagttgcattcttagggagcgtcttcagtgtgtacacggcagcagtcccttggccgcattcttagggaaccttttcagttcatacacagtggcggtcccttggcaacattcttctgagtgtcagtgtctgtctgtgtccttttcaccctgtaagctgcttttgtttcttcactgggtgcctctgactctcatgtggaatcccatttctctgtcaccgcctgtcccaggcacagtgagagacgcagccagcctgctcctctctgcacgtggccgtctcagacattctccagccaccgtcctgaccgaattcattccttcccctgccccgtccacattcttcttcccctacacgcttgctaccaagaaatggtctgaatcacagccaaggcttcatttgctttctggaactgcagctcccagccccacccagatcagaggttcagaacctgaatcttcggatttctggagatgcccccatcctatcagaggcttctagtgtgtttctttatattcstgtagacttgggaggatgacaggagagaaacctttgaaggtggcctgtgcagttccagggcccagggtggaaggggcttgcatccctggctgcctttgtgcacctttcattcttgatgcaacttttttttttttttttttaaagatggagtcttgctgtattgcccaggctggagtgcagtgctgtgatctcagctcactgcaccctccgcctcccgggttcaagcgattctcctgccacagcctcctgagtagggagctgctaaaataaaataccttcagttgggtaatttataaactacagacatttgtcactcacagttctaaaggttggaggtttaagatcgtggcggattcagtgtctggtggggacccacttcctggttcatagatgatgcattttctctgcgtggaaggggcgagggagctctctggggtcccttttataaggacgctgatcccattcatgaggctcgatccccatgacctcatcacctcccaagtctcccacctcctgactccattgtcttaggggtgaggatttcaatgcaggaatttgggggaggaatacaaactttcagactatatatagcaaataccattctttaaaaacatacagtaatagttaagctttttttttttttaatttgataaattttccaagaaggaggagacacagaaaccctccttgctttgaaggtgaatgttagtgctgtaaaatatacgtgggacttgggcttataaaatcttggtcacggtaaaatataggtggtacgcagaacctgggaaagcccacctttcctttttctgacatgtaacttttgtggaaattgcctaaaattgtttatagttagctcttcagtcctgtgtccaacccagcatgtccgatactatctaacattctttttttttgagacagagttttgctcttgttgccaagcctggagtacagtgacgcgatcttggctcgctgcaaccttcacctcccgggttcgagcgattctcctgtctcagcctcctgagtagtttggattactaaattttatataaatgttgtgtcaagaaataatattgctcttttgactttttttccctaagcattgagaaattcagaaaaaacatttataaacataaacactgttcttgacaagtgggccttccaaaaataagggctggagtttgttgaaactgctctactgtgttttatttatttatttatttattggtacttttttccttttttttttgaggcactaattggaatgcacttatttgtcctgggtggagaaacaattcagatctaacactgggggctctgtgtttccttaggtaacgcatgtgaggttttcgtcagtgtaattcggtaatctgtgttagtattatcacaaaagagcaggggggcatttgtgtcttctcagaattgcttattaaaacagctgcatggccaggcgtggtggctcacgcccgtaatcccagcactttaggccggtggatcgcttgagtacaggagattgagaccagcctgggcaacatggccaaactccatctctactaaaaatagaaaaaattagtatgtgcttatattcccagctactcaggaggcagaggtgggaggatcacttgagygtgggagttgsaggctgcagtgagctgtgaccacagcctgggcaaccaagcgagaggtgctgtgtctaaaaatacaaacataaaaattagccaaaygtggtggcacgcgtgtgtggtcacagctacttgggaggctgaggctgaaggatcgcctgagcccaaggaggttgaggctgcagtgagctagcatcatgccactgcactccaggttgrgcaatcgcctgggtgtgaccctgtctcaaccacaataaatttaaaaagataggaaatttcaatatgaaaatcagtgtcccccagaatgttccatttcttcccagctgggctatttttggagttctatggggagctgtctcagtgcaccttgcatgtactcaggaggatgagccctgccatggtgtgtgttaggggacagcctgatctcaccaaccctcctgagcaggcccggccctccgagtaataactgggaacactcgccgctttgtgagakgacctcgtgtgatcatttgaaggtcgtctcttctggtcagggtrcagagtggacacatttttttttttttttgagacagagttttactcttgttgcccaggctggagtgcagtggtgcgatctyagctcactgcaacctccacctcctgggttcaagccattctcctgtctcagcctcctgagtagctggcattacaggcgcccgccaccacacccrgctaatttttgtatttttagtagagatggggtttcagcatattggtcaggccagtctggaactcctgacctcaggtgatccacccgcctcagcctcccaaagtgctgggatgacaggcgtgagccaccgcgcccggcccagtgtggatacaccttgagcacataactggaatcctttccttggaaacttggaaccccttgtgtcatggtcgtgtaaactgtgttgaattaagaagagacaccattaaatatgtcacagctgtcctcaaaactgggacttgttttgctttctgcctggaaatgcgagtcatttttatagaaaatgtattgttcattaacaaaaaataatcgtatacatatatatgaggtacgtgatgttttaatccaagtacacattgtgcggtgattaaatcaagctagatactatattaacaatcaagtcaattaacatattaataatcaggctaattaacatattaacattgaagctaattaacatattaacaagctaatttacatatttacataattctaactctgacctatatcacctcacctacttttttttgtggtgagaacatgtaaaatctacttttagtcattttgaaagatgcgatgtattattaactatcatcactgtggtgtgatagaactttgaatttatttcttttatctaactgaaaaaatttaattttaatgtaatttatatttttttgagacagtctcaccctatcacccacggtggagtgcagcgtcatgttcatagctcactgcagcctccaactcctggctcaggtgaccctcctgagcctcccaggtagctgggactacaggtgcacaccaccacacctggttaatttttaaattttttatgtagatgggatcttgctatgttgctcaggctggtcttgaattcctgggctgaagtgatcctcctgcctcagcctcccaagtagctgggactacaggtgcatgccaccatacccagctaatttttttgtttttgttttttttttagagatggggtttcattacgttgcccaggcttgtctcaaacttctggccttcagtggtcctccttcctcagccttccatagcattgtgattccggacatgagccaccgctcctggcctccaactgaaatgttatgttctttgacaaacactccagaagcattcttccctggcaaccaccattgcactctctgcttttatgcattcagcttttttagattctacatacgagatgatatggtattctctctgtgcctggttcatttcacttcacattgtattttccagtcccatccatgttgttgcaaatggcaggatttcctttttcatggctgcatactattccactgtgtgtctatgccacatttgcttgaggcactcatgtgttgattgacacatgggttgattctatatcttggaaactgtgagtagtgctgcagtgcacagggggtgcaggtatcccgttgatgggctgatttcctttcctttgggtacacaccttatggtggaataactggatcctgcacatcattctttcctgtgatgtttcacaggcccatgactgaaccttggggaatgtctttactgtgtacaaggtggcggtcccttggtcatattctttggaaacatcttcagtgtgtatacggcgttggtcccttggtcacatgcttgggaacatcttcagtgtgtacatggcagcagtcccttagccacattcttagtgaatgtcttcagtgtgtacacggtggcagtcccttggctgcatgcttagggaacgtcttcagtggtgttccttggccacattcttagggaatatcttcagtgtgtacacggtttgtgtacagggcggtggtcccttagccacaagcttagggaacgtcttcagtgctgttccttggccacattcttagggaatatcttcagtgtgtacacggtttgtgtacagggcggtggtcccttagccacatgcttagggaatgtcttcagtgtgtacccgtggcggtcccttggcctcatgcctagggaatgtcttcagtgccgtcccttggctgcattcttagggaatgtctttagtgcgtacatggcttcagtgcgtacatggcggcggcccctcagccacatacatagctaacatgttcagtgtgtacactgcaacggtcccttggccccattctttgggaacatcttccttgcggtcccttggctgctttcttagggaatgtcttcagtgcctacacagtggcagtcccttgtccacattcttagggaacgtcttcttctgtacatggtgtcgatcccttggccacattcttagggaacatcttcagtgagtacatggcggtggtcccttggccacatttttagggaacttcttcagtgtgtacatggctaccgtcccttagcccatgcttagggaatgtcttcagtgtgtacatggaggtggtcccttggccgcattcttagggaccgtcttcagtgtgtacatggcggtggtctcttggccgcattgttagggaccatcttcagtgtgtacatggcggtggtcccttagccacaagcctcgagaccgtcttcagtgtgtacacagctgtcgtcccttgggccacatgcttagggaacgtctgcagtgtgtacacggtggcggtcccttggccacattcttagggaacgtcttcagtgaggtcccttggccacatgcttagggaatgtcttcagtgcctacacagcggcagtcccctgtccacattcttagggaacgtcttcagtttgtacatggtgtgggtcccttggccacattcttagggaacatttttagtgtgtacatggcggcagtcccttagccacattcttagggaatgtctttagtgtgtacatggtggtagtcccttggccgcacacttctggaacgtcttcagtgcggtccctttgccacgttcttcgggaacatcttcagtgtgtacatgatggcggtcccttagccacaaacttagggaatgtctttagtgaatacacagcagcggtcccttggctgcattcttagggaacgtcttcagtgcggtcccttgaccacattcttaggaaatgtgttcagtgtgtacatggcgtcggtcccttggccacattcttagggaacatcttcagtgtgtacatggcggagtcccttagccacatgcttagggaacgtcctcagtgtgtacacggtggcagtcccttggccacatgcctagagaacatcttcagtgctgttcctttgctgcattcttagggaatgttttcagtgtgtacacggtggcagtcccttggctgcatgcttagggaacgtcttcagggtggtcccttggccacattgttagggaacatcttcagtgtgtacatggcggtggtcccttggccgcattcttagggaacctcttccttgtgtacagggcagcggtcccttggccgcattcttagggaaagtcttcagtgtgcccacggcagcggtcccttgggggtgaggatttcaacgcaggaatttgggggaggaacacaaactttcagatagtagcaaataccattctttaaaaaaatacagtaatggttaagcttttttttttcttgattgataaattttccaagaaggaggagtcaaagaaacgctccttgttttgaaggtgaaggttagtgctgtgaaatacacataggacgtgggcttatataaaaatcctggtcacggcaaaatataggtggtacgcagttcctgggaaagcccacctttcctttttctgacatgcaactttttcggaaattgcctaaaagttgtttatagttagcccttttcggccctgtgtccaacccagcgtgtccggtactatctaatgttctttgtttttgagacggaattccactcttgttgcccaggctggagtgcagtggtgcgatcttggctcactgtaacctctacctcctgggttcaagcaattcccccgcctcagcctcctgagtagctgggattaccggtgtccgccaccaggcccagctaatttttgtatttttagtagagacggggtttctccatgttggccaggctggtctcgaactcctgacctcaggtgatctgcccgcctcggcctcccaaagtgctgggattacaggtgtgagctactccgcccagcctaattttttattatttttaatttttaacattttttttttggagactgggtcttgctgtgtcccacaggctagagtgcagtggcatgatcatggctcactgcagctttgacctcctggactcaagccatgctcccacctcagcctcatgatagctgggactccaggtgtgtgccatcatgcccaggcaagtttttaaaaaaattatttgtagagatggcgtctcactatgtttcccaggttcgtctggaactctgggcctcaatggatcttcccacctgggcctcccagagtgctgggattacaggcatggggcacagtgcccagtccctcatgtgtgtaattgttcaacagctagagaaacccaaacacataccctcagacactgtcccgtctgccgcccaggtctcctcacctgcgtggtttgctgttgccacttgatttaatggagggcataatgaatgacccttaaacacggcctctaagagtcctcgtaagtgccttcctcattaaaattcaagaggaatcaaatacctgttactgaatataaatgtttagaggagaaagcctgtgagctgagagtcatatcttaaggggtgtgtgcttgcagaattatcacattttcaatttcatgtgtgaataaattgttgtatttgggatcaccaagaaggcagaaacatgtatcaatgaaatttagtagacggctaaaaacaaacagtagcagcctactgaggggctgtggaataagcagattttagatttttagagggaaaacggtgatggtaggttatttccccaatggcttccaggcctccaactcaggcttggaattggccatggtcattggccctttttttttttttttttctttttgagacggagtctcgctctgtcgcccaggctggagtgcagggtgtgatctcagctcactgcaagctccacctcccgggttcacgccattctcctgcctcagcctcccgagtagctgggactacaggcttccgccaccacacccggctaattttttgtatttttagtagagatggggtttcactgtgttggccaggatggtctcgatatcctgacctcgtgatctgcccgcctcggcctcccaaagtgctgggattacaggcgtgagctaccgtgcccggcccattggctcttttttttaccatctcatcttctctcacacgagttattctcactgttggaaagaacttgtccttaaagcattgcttccaggtgagtgtaacggtgcccagcatgtgatacaagttaaaaataagagcagagcccaaatgctgtcattgcttgatccatcatttcccctgtcatgcagctcatttgagtaacagggtctcgtttcggggtgctgtgtccggagaggcagaactccccttggagaatgggtagagaatgtacatcacttgccaagtatggtggttttgcatgctgccttgactggacttgtttgcctttggttttctgtaagaatcttaggatatctgcccaggagttagacccctgggctaaagtaaggttgagggccagccacggtggctggtgcctgtaatccctggactttcggaggctgatgtgggaaaatcacttgagtccaggagtttaagaggagcatgggcaacgcagtgagacccccgtctatataaaatttaaaaaaaattagctggacatggtggtgtgcatctgctcccagctactttggaggctgaggtgggaggatcactggagcccaggaggtggaggctgcagtgagccatgatcacaccactgcactacagcttgggtgacagagccagaccctgtctctacgaaacacaaataaaaagtaaaatgaggttgagaaactccgcctccctcttgatttcaaggtaatactcagcttctagattgacacacacacaagtcattgtcttatcatagtgacatgtgacggaacacgcacgtgtctggtgacagatggtgcattgaggggaacattccttaagctgtgtttccttggggaaagaggcaatagcattctctgttagtacagaacccttcagtttgtacaaatgtcttcggaaagggaatattcctgagagcttctacgtggcagttaacaagtcacacttttcatctcagatgtctcaatttccagaagatggtacttgattacacttcctggggttcttgtttctaggaaatcgcggctgggtttttctagaaataatgcagtgatttggggacctgtggcactgggaagggtatgatctcaggcacaggactgcaaagacacgttgtttaccggccagcatgataactaggcgtgacgctgatggccagtgtgttgcatacgtactgggctttattatccatacctggatggaactgaatatatayatatacacacacacatagacacccataatatattatacaatgtaattatatatcatcatatatcatatatattataatatatacagttgacctttgaacaacacaggtgtaaactccataggtccatttatatgtggattttctgccacctctgccacccccgagacagcaagaacaaccctttttgttcctcctcctcctcctcagcttcttcagcgtggagacgatgaggatggagacctttaggatgatccacttccactcgatgagtagtacatatgttttctcttccttaagattttcttaatagcattttcttttctctagcttactttactgtaagaatgcagtatataatacatagaaacacaaaataaatacaaacatgtgttgagaatgtagtatataatatatataaatacaaaatacgtgttgattgacagtggcatgatctcagctcactgcaacctctgccttctgggttcaagcaattcttctgcctcagcctcccaaatagctgggcctacaggcgcacgccaccacacccagctaattttttttgtatttttagtaaagacggagtttcaccatgttggccaggctggtcttgaactcctgacctcgtgatccacctgcctcagcctcccaaagtgctgagattacaggcgtcaaccactgtgcccagccgtgtgagtctttatggtagaacaatttatattcctctgggtgtgtacccaataatgagattttcagtagactttgagtgaagccgatagctgttcataatgtgggtgggccttgcctaatcagtggaaggtcttaagaggtaaaaagagtccctcctccaaggaagagggaattctatctggaatccaccttcagacttgagctgcgacatcatgtctccatgggcatctggcctgctggtctaccctgcacattttggttttgcccctcccccacatcttgggagccagttctttaaaatctctttctctctatatatatatcctactggttgtttctctgcagaactgtcactcatgcagatctgtgtccacagatgacatcattgcaaagccactaagagagacatagcatccagggaatggaaggaccaggttcctttcagacttgaagacacgtcaaaacacattccaccgcgttgccttggagaacccagggaccaggcctcttcccctcctgtcaaatagtccttagcctttgttcttcttgctccttgtgaatttcacaggcttccttgactttgaattctgctccttggatgtctttgttggtgaacgtgatgagatagaattttggaaagctccgaggtgtgatcattgcaccctgggactgacacgtgctccgtcttcactgaagacagccggaagccgtggtgttccagaacttgaatgtggctgtggaaactagagtgtccatgcatcctgggcggtagctactggtgccgtctgcgtcgtctgtagctcctcattgctgattctcattcggctgcctcagtcaggacagggctggttacagcgttgctcttcatgctgttcaagtcagggtgatctacagggacagaacgaataggactgatgtgtatatgaaggggagtttactaggataattgactcacacgatcacaaggtgaagtcccacaataggccgtctgcaagctgaggagccaggaagccagtccaaggcccaaaacctcaaaagtaggcaagctgagagtgcggccttcagtctgtggtcgaaggtccaggagcccctggcaaatcactggtgtaggtccaacggtccaaaacccaaagaccctggggtcttgatgttcgagggcaggaagcatccagcatgggagaaagatgaaggctagagatcccgccactgcactccagcctgggtgacagagcgagactccgtttcaaaaaaaaaaagaaagaaagaaaaacatttaaaaagcagaaatgagctggatgcggcatcttctgcttgtaatcccagcattttgggaggccaaggtgggtggattgcttgagcctaggagctcgaaaccagcctgggcaacatacggagaccctgtctctacaaaaaaacacaaaaattatctggccatgctggtgcacacctgtagtcccagctactcaggaggctgagatgggaggtttggttgagcctgggaagttgaggctgcagtgagccatgattgccccactgcactccagcctgggtgaaagagtgagaccttgtctcaaaaaaaagaaaaagaaaaaagaacaaataagaagacagacacacctctcttctttgtgtgggtacagccgttggcaaactttgctgacagatgctactgaccttgttttcctttctgctttctgttcatttcaaaagtgggtaaatcagaagtgggactcactgtgaccttcagtgactcaatgctgaattcacaagattaattggagagtgtgaagaatgcagggcatccgtggacccattttaatgaattttagcatctcttgcatccttgtatccttgcatccagtaccggtccccagccttttagtaactgggctgtgcagcaggaggtgagtagmgtgtgagtgagcaaagcttcatctgtattgacagctgctccccatagctcatattacctcctgagctctgcctcctatgagatcagtggtggcattagagtctcataggagcatgaaccctactgtgaactgaacatgtgagggacctaggtggcgtgctccgtatgaaaatctaatgcctgatgatctgtcactggctctcatcacccgcacgcagatgggaccgtctagttgcaggaaaacaagctcagggcttccactgattctacacgatggtgagtttcataattacttcattctctattacagtgtaataataatagaaataaagtgcatgataaatagaatgcacttcaatcatycccaaaccatcccccaccccacatcagtggaaaaatggtcttccatgaaactggttcctggtgccaaaaagcttgaggaccactggacaaaggaacttgtcagagtatggattgaaggtctttattgatgctttgctgtcactcttactttaagatgaatgcgtatatatatgtatatacattctgtaatgtgtgaatatatgaagctccagctgctctctccctctctttcctctgcagtccaattctcgtagatcagtcttttcctgaaatgaatgacctcttaaattttattttatattttaagcttttatgttattttactttatttttaagctgtttttattttttaagcttttttttttttgagacaaaaaagtctcgctcttgtcacccaggctggagtgcaatggcatgatctgagctcactgcaacctccacctcctgggttcaaaaaattctcctgccccagcctcctgagtagctgggactacaggcgccagccaccacgctgggctaatttttgtgtttttagtagagacagggttttaccatgttggccaggctggtcttgaactcctgacctcatgatccacccacctcggcctctcaaagtgttgggattacaggtgtgagccaccacaactggccagtttgcaggtctttgttgatgctttgctgtcaatcttactttaagacgaatgcatatatatgtatgtgtatacattctgtaatgtgtgaatatatgaagctccacctgctctctccttccctctcctctgcagtccagtactctcctagatcattctgttcctgaaatgaacgaccattttttttttttttttattttgagatggagtcttgctctgtcccccaggctggagtgcagtggcgtgatctcggctcaccgcaatgtccgcctcctgggttcaagcgattctcctgcctcaccctcctgaggcaggattacaggcgccagccatctcgcccggctaattttttaatttttagtagagatggggtttcaccatgttagtcaggctggtctcaaacttctgacctcaggtgatccgcccaccttagcctcccaaagtgctgggattacaggcgtgaagccactgcacgtggccggtttgcagtctttattgatgctttgctgtcaatcttactttaagatgaatgcatatatatgtgtgtgtgtgtgtgtgtgtgtgtgtgtatgcattctgtaatgtgtaactatatgaagctccagctgctctctccctccctctcctctgcagtccaatactcctagatcattctgttcctaaaatgaatgaccattcaggtttttttttttttttctgagatggagtctcgctctgtcacccaggctagagtgcagtggcatgatctcggctcactgcaatgcccacctcccgggttcaagcgattctcctgcctcggcctcccaaagtgctgggattacaggcatgagccaccgcgcccggccagaattcagttttttttttttttccccatggttatccaatagcacacaggctcgtgaagcttcaaggtgcttcatctgaggttcgcttagaatggttgccacatattgttctgccggtgagttttcatgaattggactctgaaggttcttaattatggtggttgagtgacacggtctttcttctataagaacctaagttacactgcatatcaggaaaatgtgttcctgggaccagctttgttgggtttttggctgctggtcatcttcactttactctcccaaatttgaggactgtgacacacacacacacacacacacacacacacacacactctctctctctctctctctctctctctgtctctcttaggaaacaatggtatatcaacaatgaaatgatgcttttttttcttcttcttttttttttgagacagggtcttgctctgtcacctaggctggagtgcactgatatgaacatggctcactgcagccttgctctcccaggctcaagcaatcctcccacctcagcctcctgagtagctgggaccacatgggcacaccatcacacctggataatttttgtatttttagtagagacggggtttcactatgttggtcaggctggtcttgaacttctgacctagtgatttttctacctcggcctcccaaagtgctgggattacagacatgagccaccagactcggctgagcatcttttcaatatgaccttgtgtccgggcatggtggctcacacctgtaatcccagcactttgggaggctgaggtgggcggatcacgaggtcaggagatcgagaccatcctggctaacacggtgaaactccatctctactaaagatgcaaaaaaaattagtcaggtgtggtggcgggcacctgtartcccagctactcgggaggctgaggcaagagaatggcatgaacccaggaggcagagcttgcagtgagccgagattgcaccactgcactccagcctgggcaacagagcgagactcggtctcaaaaaaagagaaaggattcaaggcagtgtataccaaacatgaaagtaaagttcaggaacctctttgatggaggagatgacggtggggtctgtagcctgttcatgcctataattgcaacacgtcgggaggccaaggtgggaggatcacttgaggccaggagtttgagatcagctcggccaacatagtgagaccccatctctacaaaaataaaaataaattagtggggcatggtggcacacacctgtagttccagctacttgggggactgaggcaggaggatcacttgaaaacaggagtttgagatcagcctgaacaatggagcaagaccctgtctctacaaaagattaaaaaaaaaactggcagatgtgctggcacgtgcctgtagtcccagctgcctaggaggctgaggcaggaggattgcttaagtctgggagtttgaggctgcagtgagctgtgttttcaccactgcactccagccggggtgacagagcaagaccctatcagtagtagtagtaataataataataataataataataataataataataataatatgttgctgcaaaagtaattgctgcttttgccattaacttttgcaccaacctcatgataaaacaacaaaaactcaacacctgtacctgccatgccctgaagctcatgacagtagacaaaactcactgtgtctccagccctcagtgttagatgaagggaccagggtgtgggaagatcagcagttcaaacgggaatcataaaacacatagtttttatttttttagttttgttttattatttatttatttatttttgttgttattatttttctgagatggagtctccctctgtcacccaggctggagtgcagtggtgtgatctcggctcactgctacctctgcctcccgggttcaagtgattctcctgcctcagcttcccgagtagctgggattacaggtgcgtgctaccatgcccggctaatttttgtacttttagtacagacggggtttcaccatgttgactgggctggtctcaaactcctgacctcgtgatccgcctgcctcggcctcccaaagtgctgggattacaggcgtgagccactgcgcccagcccccatgaaacatatagatattttcaaaacaactgtactaggatcaagaaggataggacttttgtttttcctgttttttaagaatgaaatatcatatggcgtaagcatagatttatttatttacttacttatctattcatttatttttagagacaggatcttgctctgttgcccaggctggagtgcagtaatgcaatcatagctcactgcagccttcaagtcctgggctcaaacaatcctcccatctcagcctcccacgtacctgggactacacatgcaagccaccatgcctggctaagttttaaatttctttgtagagatggggtcttgctatgttgcccaagctgatctcaaactcctggcctcaagtgattgtctcaccctgacctcctaaagtgttgggattacaggtgtgacccactgcttcctgcctagactttttttttttttttccaattaaggtttttactttgagatcattgtagatttataagcagttgtaagaaataataggaaagaatcttgtgtctacttcccccagtggtaacatcttggaaagcaataataccatgtcacaaggaggatattcacattcaggcaataatgcattgatcttatgttttactcgtatccgtgtgggtttttgtaccgagttctgtgcaatttcatagtgcgtgcaggtttgtgaagccagcattgtccgcaacacacagagcatttctttcaccaacaacccctcctgtttctctctctgcatcctacctcaacctcctctcccgtcctgaacccctgagaattactagtctgttctctatttctgtaccaacctgcatcctacctcaacctcctctcctgtcctgaacccctgagaattactagtctgttctctatttctgtaccttttctcatgtcaagaatgtcatataaatggagtcatacagagtgtaacccctttcaaatcacgtgtgtctttttttccttcactcaatagaattccctggagagccatccaagttgttgctaagaacaataagatgtttctttttaagtaacacctgcaaaaagtcttttataaaatggcgatgaaactaaatggtttttgattctaaacaaggcagccatgaatggttttctcgtatatcttagcatatgtgtgggagtgtatctgtgcaagtaattcttggaagtggaatagctgagccaaaaagaaaatgcatgtaaattttcttttctttattttaaagagacagcgtcttgctctgtcacccaggctggagtgcagtggtgcaatcatagcttgccgcagcctcgacctcctgggctccagtgatcctcccatttcagcctccagggtagctgggactacaggcgagcatcaccacgtctggctaatttatttttatttttgtagaggtagggtcttgctatgttgcccaggctgggcctcgtgctcctagcctccgctgatcctcccaccttggcctctcaaagtgttgggattacaggcataagctaccaggcctggctgcctgtcacctttcaggagtcattgtcaacttatctcctaagaaaatgcagtcttggtgggtacatttgaactgagtatgtaaacttctaacttctccaaggcatacgcattctggataacaaccctactttttaacctattccatgtgattgatgaaagctcacaattgctttattcattatttcattgtcagcgagactgaactttgtttcatatgcttatgttttatttcatatctccaaattgcatattcatttcctttacccatttgtggagggactggggtttggttagaagagctctttatagaccgggcgcggtggctcacgcctgtaatcccagcactttgggaggccgaggcgggcggatcacgagatcaggagatcgagaccatcctggctaacacagtgaaaccctgtctctactaaaaatacaaaaacaaaattagccgggcgtggtggcgggcgcctgtagtcccagctactcgggaggctgaggtgagagaacggcgtgaacccgggaggtggagcttgcattgagctgatattgcgccactgcattccagcctgggcgacagagcgagactccatctcaaaaaagaaaaggttagaaaaatacaccatggaatactacgcagccataaaaaggatgagttcatgtcctttgcagggacatggatgaagctggaaggcatcattctcagcctaataacgcaggaacagaaaaccaaacaccacatgttctcacttacaagtaggagctgaacagtgagaacacagggacgcagggagggggacatcacacaccagaacctgctgggggctggggaacaaggagagggagcgcattaggacaaatacctaatgcatgcagggcttaaaagctagatgatgggttgatgggtgcagcaaaccaccgtggcacatgtatacctatgtaacaaacctgcgcgttctacacatgtatcccagaactttaaaaaaaaaagaaatagtatttcaatatggtctgaattaggatgtytgttattagatataaaggagaacatatgtgttgagggccatttgagcctgttctgtatataaactcttatttttgcccttttctttgtagcatgtttggggtttttctggagttgaactttttagatatctgaaaaatagctgttaatatttctgatggaagttgcaaattttcttccagctcattatttattttttactttgcttatggagatttgttttgttttttaccatgtgattttttttttgagatagtgtcttgttcctcctggagtgcagtggcacgatcttggctcactgcaacctccatcccttgggctcaagtgatcctcccatctcagcctcccagcttgctggaactacaggcacgcaccgccacacccggttaattttttaaattttttgtagagatgaggcctctctctgtttcccaggctggtcctgagcttttggcctcaagcgatacccccacctcagccctcaaagtgctgggattacaggcatgagccactgcccggcctgttttttaaacaagtagttttttaaatagtgaaatctatctaaccatctttctgaattttcgtttaggaagcattttctttctgtggaggttaaactaatgattcctgctttcttgcaatcttctcatggtttaactttgtttttgccttggagttcactcatgcatgctatgaggtctggcactaattttatctgtttcctaatgtggcttcacgtgccccaacacggtttattaaaacgcccatcttttgccccttttgtcgtgtactcaatttccacatgcagttggcctatttttggaaattgtaccctgttccttcctccattaatgcctgtagtacctcccgtttaattatagaagcttctcaaatgttttaatctcctacagggccattgtgttctcaatctttgtacatatcagaattttcctctttgccgcctcatttggaattcttttccccacagcaattttcgaatcgattcgtccagtttgcctaaaagaaattctgtgaactatctttattggatcacatcaaatttgcatattgacttgggtcattctgacacctttaggattgtatcagtttagattttttttccccctccaacttctattttattttttaaattaaaaaaaattttttttttgagacggagtctggctctgtcgccctggctggagtgcactggcgtgatctcagctcactgcaagctccacctcccgggttcaagcgatcctcctgcctcagcctcccragtcgctgrgattacaggtggcacacaccaccacgcccagctaaattttgtatttttagtagagatgcggtttcaccatgttggccaggctggtcttgaactcctgacctcgtgatccacccgtctcggcctcccaaagtgctgggatgacaggtgtgagccaccgcatctggcctcaacttctattttaggttcgggggtacatgtgcaggtttgttccctgggtatattgtgtgatgttgaggtttggagcacaaggatcccgtcacccaggtagtcagcayagcactcaatagttttccaacccttgccccatcccttccttgccccattgaattgctcagtgtttattgttcccatctttatgtccatctgtacttgatgtttacctcccagtaagaagtgagaacgtctgatatttagtttcctggttctgtgttaattcacataggagaatggcctcctcttgcatctatattgctgcaaaggacatgatttcattctttttaatgggtgcatagtattccatggtatagatgcaccatgtcttcctaagaattgaattaacatttgagccagcaatcccattactgggtatctacccaagggaaagtaagtcattctaccaaaaagacacacgtactgtgtgttcatcgcagcactattcataaaagcaaagacatggaatcaaacttaggtgtctgtcaactccggattggacaaagtttgggggttttttttgtctttttttttttttttgtgagatggagtctagctctgtcgcccaggctggagtgcagtggcacaatctcggctcactgcaagctctacctcccaggttcacgccattctcctgcctcagccttccgagtagctgggactacaggcgcccgccaccacgccaggctaattttttgtatttttagtagagaccgggtttcaccgtgttagccaggatggtgtcgatctcctgacctcgtgatccacccgcctcggcctcccaaagtgctgggattacaggcatgagccaccgtgcccggccgtcttttttttgttttgttttgagacagtcttgctctgtcacccaggctggagtgcagtggtatgatcggagctcactacagcctcaacctcccagtcttgcgtgatcctctgaactcagcctcccgggtagctgagatgacagccgtgtgccaccatgcctggctaatttttttgtacctttttttttgttttgtagcaatggggcttcactatgttgcccaggctggtcttgaactcctgggctcaagcgatctgcctgccttggcttcccaaagtgctgggattacaggcatgagccactgcgcctgacccrtttgggtctttggagaagcacacaccaagaaggaacatgatgggccagagatttactaggggaactgtgtgtgaagggtcaaacaggcgctggcagaagagtggaggaaggcttgcaggtgatggtgtaggtgcctcacacctgtgaagaaagagacggcgaggaattgggtagaaggagcgtccagccagttctctggtcatgccgagtcattggctgtgaaaacccaaaaccctgaggaagcccgatcttgcgaaacatgttccccatctgcagaggcaccgggtggctggtgtcaggcgattgttgcaacctgttgtgtgcgggggtgtctgtgtgggtacatacatacttctcagccccaatgccagcttcctggtccgtaaggaaaacactaaactcttctagctaaagttacaaatgcagcaagggtccattctgcaatctgtgatgcttttttttttttttttgagctggggtctcgctaccttgcccaggctgcggtgcagtggcacaatcacggctcactgtgcgttttcagggaagaccccacgggcacctccaaaaccatgtggcatgacatcctcaccgagacccgagggcatctttccatggcctcaactctacttttatgtctttaggtttcctgatataggttttgcacactctcgatgaccaagtctcatttcagtgttgctgttgtttctatattataagcaggactgtctcttcccctacctttttaacctgccaattgtttgtgtatgtatggaagctattgatatttgcttctgagttttctatctgactaccttcctgaattctcttcttggatttatttaatgttgattttgttagttttttcctggcataccatcatatcatctgcaaagtatattttgactctccctctgccgttcttgtgtctgttgtaattatttgtctgaccatgttggataagatctccagtagcatgttaaatgacagggtgcactcctggaatccagctctttgggaggccggggtgggaggatgacttgagccccggagatcaagaccggtctgggcaacacagcaagaccccatctttacaaaaaaaaaatagtaaaaaaaattagccaagtgtggtggctcacacctgtagtcccagctacttgggaggctgaggcaggaggatcatttgagtccaggaggtcgaggcttcagcgagccatgattgcaccactgcactgcagcctgggcaatgtagtaagaccccagctcaaaaaaaaaaaaaagcatcacagagaacaggatggatacttgctgcttttccaagtttagctggaagattttagagatttctttattgactaggaagttggcattggggctgagaaatatgtatgtacacacacagacacacccacacacagacacacatgtatacatacacagtatatatgcatactgtgtgtctgtaattacaatttaataatacattcctatttttaaaataaacttagtaaattaagaacatcaatacatctactgatactacatatagtatttgcaagtccctcagcttgggtcaggaacacgggaatgtcattgtacaggttctatcttcaggttacgagggatacaccagaaaacctaagcatatggaaaacttattcggcaattttctaagtgaacatacyttttcatcgattcatgcgtgtatcaagaaaaacaaaatgaaagtcttacacaccaagaggattgttcgcacaatactgacaacgaaatgtacgggctgacaaataacagattatatgttgaagcctcctccacaggccccacctcctgataccatcaccctggcgattgtatgttctcaacataggaattattttggggggagaggagacacaacattttatacttggaaaggtgaaatggaaaagcagcataggctttattgttttattttattttattatactttaagttctggggtacatgtgcagaacgtgcaggtttgttacataggtatacacgtgccatggtggtttgctgcacccatcaacccatcatctacattaggtgtttgtcctaatgctctccctcccctagtccctcacctcctgacaggccctggtgtgtgatgttcccctccctgtttccatgtgttctcattgttcaactcccacttgtgagtgagaacatgtggtgtttggttttctgttcttgtgttagttcgctgagaaggatggtttccagcttcatccatgtccctgcaaaggacatgaacccatccttttttatggctgcatagtattccatggtgtccatgtgccacattttctttattcagtctatcgttgatgggcatttgggttggttccaagtctttactattgtgaacagtgctgcaataaacatacgtgtgtgtgtcgttatagtggaatgatttataaacctatttctatttaaattacctttgtatttttatagattttgtgggtatgagtacacttgtgttacatgaatatattgcatagtggtaatgtttgggctgttagtgaggccatcactcaaataacgtacatggtagccaataggtaatttctcatccctcatcccatcccaccctgtgagacttctgagtcctcgatgtctattttttatgctctatgtcgacgtgtacacattatttaattcccgcttataagggataacatgtggtacttgactttctgtttctgagccatttcacttaggataatggcctccagttcccttcgtgttgctgcaaaagacacaacatcattccttttcatggctgtgtagtattccatggtatatatgtgccatattttaaaaaatcaaattgtctgatggtggacacttaggctttatattttaataaagaacattccaaatatgttgaacaaaataatctcctaacttgaaaaagatcatatgtgcctataataattcacagaaagggactttcctgactacctgcctgcaaaatccacttttccctcagtctttctttctcaagggaattcatggaaattccctccttgaattttctcagcccccagtacaaggagtcattcttgcctcatcatgtccccctctctgtccttgtcttgtgatttctttttattttgaacgcgagaagtctgactcccaccagcacccctgtggccagtacctgtgagacatattctgaatccagcacctctcataccacctgtgctgaactgtggcggagctcccccgtcagtccctgcagctgcttcaggagacccttgatagccttgtcttcctccagctcaagtggattctccatgaatctattccttcctgtgaaacatatcacagattggctcagagccccgtgatgacgccctgtctgccagagagaagctcacgaactctggggtgcccctactccttcttccctcctctcttccctccttccatgtgcttggctccagctagccagccagccgccttcctcttcctggaatatcccaggcctgctagacttttgctctcaccgtcacaacatcagctcaggagcccctccttggaagattgttctctaaccctccgtccagaatcactgcttctccctttcctcttcttcctttgaagttcattcataactggaagatgtgagatctggaaagttctgcattattgccagacacatctgtgtatttagagtggttggtatctttcccaggggaaccaaatgtccttgaggcagacaacatgtttatctttgtctaattcatttccctgtatgctgggcacagagtgtgggctctacacatattttataaaagaaggagggaagggttagaagatggacagaaggaaggaggaagaaaggaaggaaagagggaggaaagaaaggaaagagggagggaaggaaagagggaaagaaggaaggaaagagtgagagaaggaagtaaagaggaaaggaagggaagggaaggaaggaaggaaaaagtgagagaaagaagtgaagaggaaaggatggaaggagaaaggaaggaaagggagggaaggaaaaaggaaaagaagaaagaaggagtgagacaaggaagtaaagaagaaaggagggaaagaggaaaggaaagaaggaaagagggagggaaggaaggaatgaagaaaagaaagagggaaggaaggaaggaaagaaggaaggaggaaggaaggaaaaagggagggaaggaaggaatgaagaaaggaaagagggagggaaggaaggaaggagggagggaaggaaagagggagggaaggaaagaatgaaggaaggaaggaatgaaggaagaaaggaaaaagagaaggaaggaggaaggaaggaaagagggaaggaaggaaggaaagatggagagaaggaagggaggacaagtggaaggaagaaaaagaaatacaaatctccctcaaaatgtggatcactcgtcttaaccagaaattcaagtgagatgctatctgcacgtgtgataccagcagctatgaagcaaactgtattaaccaagtcttttattttctgtgttctgatgcatgactttcatggccttgtcaaccctagagaccctgcccctcccatagctagcgaatccccagaggtggtgaagagcccacctatgaacctgtctttcatatgcaaacccatcaatccagaatccaccccccagccatctcctttattggggttgcatattccacgtcactctccacctgccctaaccaccccaaagccaggtaccagagagtcagggacagcccctatgccccagagcctgctgaaatcattcacactagccaactgtaagcctactcgcctgttccttcccttggaaaccacagtgagagctctggtctcctttgtcttcccacctgaccaaacttggtgcgcccctgtgtggtcctgagtggtgtcaacacgcccctcctcttgggacctgtgagtaacaaaccacttgcttaacggcagtctcctgatctgttggccccaccatacctacatcataataaagtctacattttacaacgcaaacgaacaaaaatgtcctgctcagtgctgccctgagagcagaggttattccaggattcttgctcgcctctgtaaagggtatccgttctgcagacctttctgccggtcacacygacggcatattgcagagcctgccagggactcacaggggatgacaggggatttatcaggtggttttttactgcactgtcattactgggggcgaatccactttaatacattcatgcctcctgagcctgtgggaattcaagaggaacagaaccagaaataawtgaaccataactccctttggcatcttgcctctctggaggcttaattcttacaaatatgtgctctgctttcaaatcttagtttgatgattttctcttcttctttttcagttttccccccacgacctgaccgtgtcgctatagtgacgggagggacagatggcattggctattctacagcgaagcatctggcgagacttggcatgcatgttatcataggtgatgacttttacagttacttgtgttttttgttttttcggttttttttttttttctgagacaggatcgcagtccgtcaacccgtgctggactgcagtggtgcaatcttggctcactgcagcctccacctcctgggttaaagtgattctcctacctcarcctcccgagtagctgggtttacagacatgcaccaccacgcctggataatttttgtatttttagtagagacagagtttccatatgctggccaggctggtcttgaactcctgagctcaagccatccgcctgccgtggcctcccaaagtgctaggattacaggtgtgagccactgcgcctggcagagttagttgtgtcttatacctaatgtgagctacttaggtgttgattcagacatgtatgcaaatgttgatgtgcatatagaaaattcagtcagatccagaaagctcatgaaggtgatattcacaacctagaaaacacagaaaattgttgtacccttttggaagtagatatatattctgcttaaatattgatcctgtgtttctttcacatggtttactggaaaaaaataaccatatatctttatgactttactagggctgttataacaaagtatctcaaggagactggaggttgcttaaaaagccaaaatttatttttcacaattccagaggctggaagttcaatatcacagtgtaagtagggctggttcctcccaattccagaggctggaggttcaatatcacagtgtgagtaaggctggttcctcccgacacctcactccttggcttgtagacaccatcttctccctgtgtcctcacagggtcgtccctctgtgtgttttcatctcctcttctcctgagatgtcttagtccatttcaggcgctataacagaattaccatagaatgggcagcttatatacaacagacattgagtttcccacagtcctggaggctggatgtctgagatccaggtgtgggcagggctggttcctcctgaggcctctctccttggtttctctctgtgtcctcacagggtcatccctctgtgtgtgtccgtgtcctcatatgctctccttataaggacaccagttcaattagatcggggcccactctggtgacctcattttaccttaatcaccastttaaagaccttatttccaaacacagtcacattctgaggccctgggctttaggacttcaatttatgaattttgttcaaacacaagctcctaacagaatctgaacaatgttgcgggatacttgtttcttctgcaaccatgacctatagacactcacggtttgatttctgctcttctttttgaaaatttctctaaaagcttatcgtgatctctgactcctcttcctctgtgacctcttcaggtctcccttcaactgggaatatgaggacagttcaaattaacccattccactactgccaatggagacggagtggggggcggggaggaggggagagagtctattgcatacctggggaagtctaaatcagctagcttaaatgatgtgtggagacgagcttggaaaaataaaagccttaatgtgtattatgcccactcttgacactatctgcatttaattaattattttcagacaggatcctactctgtcagcccagactgcagtgcagtgacataatcatagctcactgcaacctcaaactcctgggctccagcaatcctcctgactcagcctcatgagtcgctgatatgacaggcgtgcaccaccatgccaagctcattttatttatttatttattattgttttttttgagacagaatcttgctctgtcacccaggtggaatgcagtgacacgacctcggctcacggcatcccctgcctcctgggttcaagcgactctcctgcctcagcctccagagtagctgggattacaggcgcccgccaccatgccctgctaatttttgtatttttagtagagatggggttttgctttgttggccaggctggtcttgaactcctgacctcacgtgatctgcccacctccgcctcccaaagcgctgggattacagtcatgaaccaccgtgcctggccctggctcatttaaaaaagttattttggcggctgggcgtgggggcttatgcctgtaatcccagcacttggaaggtcaaggtgggcagatcacttgaggttaagaggttaagcccatgaatannnnnnnnnnnnnnnnnnnnnnnnnnnnnnnnnnnnnnnnnnnnnnnnnnnnnnnnnnnnnnnnnnnnnnnnnnnnnnnnnnnnnnnnnnnnnnnnnnnnnnnnnnnnnnnnnnnnnnnnnnnnnnnnnnnnnnnnnnnnnnnnnnnnnnnnnnnnnnnnnnnnnnnnnnnnnnnnnnnnnnnnnnnnnnnnnnnnnnnnnnnngtgaattgcttgaacctgagaggcggaggttgcagtgagctgagatcacgccactgcactccagcgtgggtgacagagcgagactcagtctcaaaaaaataaacaaaatgttttggagatactgggtcttgctatgttgcccaggctggtcttgaactcctgggttgaagtgatcctcccaccttggcctcccaaagtgctgggattacaagtgtgagccactaggcctgggcaccctttgcttttaataacttttatggtgtctgcttttataaacatcatactgtaggtctggtttgagatatgcaggatcgtattgacttaacactttccaggacgggagcagtggctcatgcctgtaatcccagcactttaggaagccgaggcgggcagatcacgaggtcaggagatcgagaccatcctggctaacatggtgaaaccccgtctctactaaaaatacaaaaagtagctcggcatggtggcgtatgcctgtaatcccagctgctcgggaggctgaggcgggagcatcgcttgagccagggagccggaggttgcagtgaaccgagatcgcgccactgcactccagcctgggtgacagagtgagactctgtctcaaaaaaagactttccaaaaccaatgcccattattgattgacttcttcctctccgccattctctgtccttctttcccttgttgtcattatggaaagatgatcatggatcataaacaatgcttagggctggagatttcaacatgaatttgtctcagttcttccttatctttgaggagctctgtccaggacagacacttttctgggccttgaatgcctttgcgatagcccaaaaggctcaagcataagagcatgagtctgatctggtgaccagggctcagcaaagagtctttccaggccttgaacctctggacatctgttgrtgctcattggacaggctaaaagtcatcatgttacgaatcgatgaagttgasatgcagataaaaggtataaggaaaaaatgaactctccacatcattgtatgcattacatctatacgataaaaactgtgatatactcatgcgtttaaatagctgctctggtcctgggcctcatgcgtttcaatagctgctagcattctgagcctcgatggccatccacttggctttgagttagctctctccaaaaatctccatggcagtttctgctggggcaaatgcacggctgctgcccacacctctgtgttttctcatctccatttacaaaagaagaaaatgctaaccttgctgatgctaacctcctgaatttcatgcaggaatccccaggagtctttgactcagatggggaaaccccatgttcagcccatgtggccttctggtctccctggagatgcgtggtccatgtcagcgcacatggctccttgctccgtccttcacttaagtttgagcctttttggcttttgcaaaacatgaatgcaaaacttgaaatttttctatgtcatggctcttcccaactttcacatttttgagacagcgtctcactctgtcacccaggctggagtgcaatggcgtgatctcagcccactacaacctctgcctcctgggctcaagcgatcctcccacctcagcctcccaagtagctgggaccacaggcgtgcaccaccaggcttggataattttttgtagttttagtagagatggggcctcaccatgttgcttggacttgtctcaaacacctgagttcaagcgatctgcctgcctcggcttcccaaagtgctgggattacaggtgtgagccactgtgcccagagtcttttaaaataataattttctacacgcagttccgttcctcatataaccatctttctctgatgcacttcagggtttgtaaaatagtatacagagatgtgtactgtttcacatgatgaagcttagttgtattagataatgataacatcgtgtttggctatgtcataatgaggcaattgagtagaatataatgaaatcttgttggattagttaatgacttgttgagcttcggaagcaggtgagyactttttggtctatatcagtctctttctttccatcaagcagttmttttcctcaaagttgtgcctaactcccacttgagcattttttttatccattctttttttttttactttgacatgaagtctcactctgttgcccaggctggagtgcagtggcgcgatctcagctcacttcaacctccgcctcccgggttcaagcgattctgctgcctcagcctcctgagtagctgggactacaggagcacaccaccacacccagctaatttttgtatttttagtagagacggggtttcaccatgttggccaagatggtctygatctcttgaccttgtgatccacctgcctcagcctcccaaaatgctggtattacaggcgtgagccactgtgcccggccccattctctttattttattttattattttattattattattattattattttttgagatggagtttcgctgttattgcccaggctggagtgcagtggcgcgatctcagctcaccgcaaactctgcctcccgggttgaagcgattctcctgcctcagcctcccaagtagctgggattacaggcgcgtgccagcacaccaagctaattttttgtatttttagtagagggggggtttcaccatgtaggtcaggatggtcttgatctcttgacctcgtaatttgcctgcctcggcctcccaaagtgctgggattasaggcgtgagccactgcgcccggcctcattctcttaatagactgggacaagttaaaactttatgacaatttcttgaaattgtcaagttcatccatgtccctaactctcctgtcttggtgtgtttgggctgctgtagcctgagtgccttgcaaaccatagaaactttttttttaaaattttattattatactttaagttttagggtacatgtgcacaacgtgcaggtttgttacatatgtatacatgtgccatgctggtgtgctgcacctattaactcgtcatttagcattaggtatatctcctaatgctatccctcccccctccccccaccccacaacagtccccggtgtgtgatgttccccttcctgtgtccatgtgttctcattgttcagttcccacctatgagtgagaacatgcggtgtttggttttttgtccttgcgatagtttgctgagaatgatggtttccagcttcatccatgtccctacgaaggacatgaactcatcatttttgatggctgcatagtattctgtggtgtatatgtgccacattttcttaatccagtctatcgttgttggacatttaggttggttccaagtctttgctattgtgaatagtgctgctataaacatacgtgtgcgtgtgtctttatagcagcatgatttataatcctttgggtatatacccagtaatgggatggctgggtcaaatggtatttctagttctagatccctgaggaatcgccacactgacttccacaataaaccatagaaacttattgtcctacagttctcaaggctggaagtcccaagaccagggggtcagtgtggtcagattctggtgtagtctgtcttctaggttgtggatggccactttctcctgtgtcctcacatggtggaacctggatggggtctcttttataagggtactaattccattcattgtgctccaccctcgtgacctaatcatcccgcaaagcctccgcctcccaacagaatcactggggatgttagaatttcaacataggaactttggagggatacaaacattcagtttattgcgccccctctagatgcaaaaggattgggtttagatgaggagaccccaggggagagggtgcccatctgagagtgtatttctagaacttcttatgaacttgagcacctccatgatctgtttacatctccctgggacctgagtaaattagagacaagatgtagggcaggggggkttctgagatttagcttggagactgtgaggtggtgatggatggcaacccttggttttgaccatccatgctaggtggatatctgctgtatcattaacaacatgacaaactttccaggactttctatatctcagacttctgccaatatttgagatgactgggtcaaaatgatgctgattttttgaacagggagagcaataggtattctctgaaggttggctggatgtgagcctagtggcttcaatgatggtggagtaggatgaagagagaccctcaaggttgaacaaagatgggagggctcacatccattactggttatatttgatcttttgtctcctccagtgcaatgatctttttcatcttcttaattcttaatttagctaggcaatgtttaattattagtttaattcttaatcaaactaggaaaggaagaaaacaccccatttctttgtgcttttttgcctcattgtggtggtttaggtcatgatgaggtctagttgggcaggtcatgatgaagtctagttgtattaggttctgatgatgtctggttgagttagatcatgctgaggtacagtttggtttggtcatgatgaagtytagttgtattagatcatgataacgtctcctttggttatgtcatgatgaagtagttgagtagaatgtaatgaagtcttgttcgattagatcatgatgactggttgagttaggtcattatgaggtatggtttgattaggtcttaatgaagtctagttcagtaacagcatgatgagatctagttggattagacttgatgatgtgtgacttatttaggtgatgatgaaatcttgttgggctaggtcactttgagatctaattgggtaggtcatgatgaggtcttgttgagttaggtcctgatgaaatgtagttgagttaggtcacattgaggtctagttgggtaggccatgatgaggtctatttgtattaagtcatgatgaggtttggttgtattagatcatggtaaggtacagtttggttaggtcatgatgaagtctagttgtattagttcatcataatgtttagtttggctatgtcatgatgaggtagttgagtagaatgtgatgaaatcttgttggattagattaggatgactggttgagttagatcattatgaggtgtgatttaattaggtcttaatgaagtctacttcagtaatagcatgatgagatctagctggatcagatcatggtgatgtgtggtttggctaggtcatgatgaagtctagttgggttaagactcaatgagttctagttgggtcaggtcacattgacgtctagttgggtaggtcatgatgacgtctaattgggttagatcatgaggagatctagttaggaaggtcatgatgaggcctagtggatagatcatgatgaggtctagttgggttaggtcatgataaggtctagttggattaggtcatgataaggtccagctgggttatgtcatcatgaggtagttgaatagaacacaataaagtcctcttggattagatcatgatgacaggttgagttagatcatgatgatgtgtggtttggttaggtcacagtgaggtctagttgactgaggactttgtaggcacaaagcaatgaagacatgtgagcaagcttcttgttcatgtgcatgggaatctcaagtgttaccacttcatttagatgatgtttactgagcatcaggagcagtatatgtcagcaccaatgtgccttttttcttgagataaacagaaagtaaacaccacatctgcaccccacctgtgtctcctatcccacagagctcctgatgtcagtgtttaattttcactgtgagttacagttttgacccttcaggtcaatccaatcaattatgcagtcttatttcccctgtgtgactttgaggataattggatatattctgagagaggcattttttcattttgtatggcagtttgattcaaagtcaattaatgaaaaaatatcattgaacacaatgaattttatattaaatacaaaataagagatgggaaatttaacttcaaaattttaattaaaaatttattaatatttaaagaataatcaattacttgtaaaataattcagattataacctgggtccaactgaagcacattaatattactagacacatatatcagttgttcaaattcccatctgtccacaagatcttagttctcattgtttcaaaatattattttggtgggggatcattttttttcataatgctcaatggactgtcatctaagatgaaagtggggtgggtaaactttttctgtaaagagacagataataaatgtgttcatatgtttctctcataactatgagctctgccctagtagtgagtaaccacccataggtaatacttaaaacaacaggaaagtctatgttgctgtaaaactttttgtacaatatccagctgcaggccaggtttagccgcagattggtgactctggtttgggctcaaaatctttttatttagtaagaggaaattatactgcttttttccaatataagaaatctcttgtacagtcctcaggaagggtagataatgatgaggtctagttgggnnnnnnnnnnnnnnnnnnnnnnnnnnnnnnnnnnnnnnnnnnnnnnnnnnnnnnnnnnnnnnnnnnnnnnnnnnnnnnnnnnnnnnnnnnnnnnnnnnnnnnnnnnnnnnnnnnnnnnnnnnnnnnnnnnnnnnnnnnnnnnnnnnnnnnnnnnnnnnnnnnnnnnnnnnnnnnnnnnnnnnnnnnnnnnnnnnnnnnnnnnnnnnnnnnnnnnnnnnnnnnnnnnnnnnnnnnnnnnnnnnnnnnnnnnnnnnnnnnnnnnnnnnnnnnnnnnnnnnnnnnnnnnnnnnnnnnnnnnnnnnnnnnnnnnnnnnnnnnnnnnnnnnnnnnnnnnnnnnnnnnnnnnnnnnnnnnnnnnnnnnnnnnnnnnnnnnnnnnnnnnnnnnnnnnnnnnnnnnnnnnnnnnnnnnnnnnnnnnnnnnnnnnnnnnnnnnnnnnnnnnnnnnnnnnnnnnnnnnnnnnnnnnnnnnnnnnnnnnnnnnnnnnnnnnnnnnnnnnnnnnnnnnnnnnnnnnnnnnnnnnnnnnnnnnnnnnnnnnnnnnnnnnnnnnnnnnnnnnnnnnnnnnnnnnnnnnnnnnnnnnnnnnnnnnnnnnnnnnnnnnnnnnnnnnnnnnnnnnnnnnnnnnnnnnnnnnnnnnnnnnnnnnnnnnnnnnnnnnnnnnnnnnnnnnnnnnnnagtgggctggtcatgatgagatcctagttgtattaggtcaggatgcgacgaagttggggtaagttatcatgaggtctcattgagtttgtcatgatgagagctagttgtattagatcaggataagtcaaagttgggttaggttataattagatatagttggttggtcatgttgagatccagattaggttatgatgaggtccagacgcggtggtcagtaatgaaatctagttgtattaggtcatgatgagatctagttgtggtaggatatgatgaggtctagtgcattggtcatgatgagatctagttgtattaggttatgatgagatctagttggattaggtcatgatgagatctagttgtggtaggatatgatgaggtctagtgcattggtcatgatgagatctagttgtattaggttatgatgagatctagttggattaagttataatgggatctgtttggttggtcacgatgtgatctagttaggtcgtgatgagttctagttgggtaggtcgtgatgagatctagttgtctcatgtcatgatgaggtctagttgggttaggttatgatgaagtccagtttggttaggtcatgatgaggtctagtgggattggtcattatgagaattagttgtattaggtcataatgaaatctagttggcctaggctatgatgagctctggtaggttgttcatgatgagatctacttgtattgggtcatgatgagacccaggtgtgttaggttatgataagatctagttcgttgtcataatgagatgtaatttgtttatgatgcagtctagttgtgttgctcatgatgggatctagttgtattaggtcatgatgagacctagttgggttaggttatgatgaggtctagttggtttggttatgatgaaatcttgttggattatgtcatgaggagatctagttggatggtcatgatgagatataattaggtcatgataaggtctagttgggttggtcttgatgagatatagttgtattaggtcgtgatgaggtctagtttggttaggttatgatgaagtctagtttggttaggtcatgatgagttctagttgggttagggtatgaggagatttacttggataaggttgtgatgaggtctatttgggttggtcatgatgagattttgttaggtcatgatgaggactagttttgttggccttgatgagatgtagttgtattaggtcataatgaagtcttgttgagttaggttatgatgtagttaagttgggttaagttatgatgaggtatagttgggttggtcatgatgagagttagttaggtcacgatgaggtagttgggttggtcatgatgaaatctagtcatagtcagtcatgattagttcttgttgggcttgtttataatgagatttagctgtgtcaggtcatgatgaggtctagttgagttggtcatgatgtgatctagttgtattaggtcatgatgaggtctagtttggttaggttatgaggtctagtgtcgttggttgtgatgagattcagttaagttatgatgaggtgtatttgggttggtcataaagatacctgtttgtattaggtcatgttgaggtttatttgggctaggttataatgagatttagttgggttaggtcatgatgaggtctagttgggttagggtataatcagatctatttgggttaagttatgatgaggtgtattttggttagtcctaatgagatttagttgggttagagtatgatgaggtgtagttgcgttggtcatcataaaatctagttttgtaggtcacaggaagtctagttggttaggttatctaaattgcaactgtcttttaaaaatgacttgtgccacatatactttgtattgtccatgaatagtacatgtgaaacgtgtaaaatatttaaacttgtatttaattatctatttacttattttaatagacaaaaacaagttacatatttttatggtgtacaaaatgtggttttgatatatgtttccatctggaatggccaattcaagctaattcacatatccattaccttacatgtttctttttgtgtgtgtttttggaaacacttaaaatctactctctttgcaattttcaaatattaattatagtcactgtgactaattatagtcaggttcaagattatagtcactaatttagtcaccttaagtacaatagatctcttgaacttataccttctgtcaaactgacatttggtgtcatttgaacaaaatctcagcaacccacccccctagcacctggtaatcaccataattctttttcttttctttctttcttttttttgagatggagtctcactctgtcaccaggctggagtgcagtggcgcaatctcggctcactgcaacctccacctcctgggttcaagcgattctcctgcctcagcctcctgagtagctgggactacaggtgcatgccaccgtacccggctaatttttgtatttttagtagagacaggcttttgccaggttggccaggatggtctcgatctcttgaccttgtgatccacctgccttggcctcccaaagtgctgggattacaggcatgagataccacgcctggccaataatcatcataatactttttcttgtgagttcaacttctggagactctacatatgggtgagatcatgtgggatttggttttatgtggcttattttacttaacatgatgtactcctggttgatccatgttgtatcacaggatagggtcctctggttttcaaagactgaatggtattccatggtgtagctatcccacattttatttatctacccatccttagatggacacttaggttggtttcatatcttggctcttgtgaatcatgctgcaacgaacatgggggtgtagatatctctataaggggctgatttcatttcctttggatctatacagaggagtgagattgctagatcctatggtaggcataatgatcattttttgaggaactcttaaaaaaaaaaaggccacccctttagacacaccttaaaatccaacctttctggtcaaagacatttgaaaaaaatgacgacaacatcaaactatagtctcctgtccaagcacgttcacttcctaagatgtgaaaaaaaccaggccgggtgcggtggctcatgtctgtcatcccagcactttgggaggcaaaggcaaacgggtcacccgaggtcaggcgttcaagaccagcctggccaacatagtgaaaccccatctccactgttttccataatggctataccaatttccattgcacatataacatgtaacgccctcccctgcccccccaaatacaaaggatgaagcagaaggcagatgcactgtgtttgggacgtgtgcggtgtttctgcatatgcagtacttgctcagcaaatgtaggaaccactccagcaaatgcataygaggccaaatgtcccacgtccagttccttaaagcagctccctccaggtctgaggagacaattgctgaaggtgacattggccaaagaagataccgcacgtgccacctcaccttctccattcctccagtgtggtgcttctgtcctatgccagcgttgacggtgccaccatggaaaatggcctgcccatgaaggtggtcttcccaaataatcacttcacctggctttttttgatgctcccagctttttctggtcacttttgtctttcttgagaaggtggaggctcccatcttacttcgtcccagcttccggcatgtttccctttgttttttttttgttttgttttgttttgttttctttttgagatggagtctcgctgtgttgcccaggctggagtgcagtggcgcaatctcatctcactgcaacctctgcctactgggttcaagcaattcttctgccttagcctccagagtagctgggattacaggtgcctgctaccatgtctggctaacttttttttttttttttttttttgggacagagttgggctctgtcgcccaggctggagtgcagtggtgtgatctcagttcatggcaacctctgcttcccgggtcctggttcaagcaattctcctgcctccgcttccctagtagctgggattacaggcacacatcaccatgcccatctaatttttgtgtttttagtagagatggggtttcctcatgttggccaggctggtcttgaactcctgacctcgtgatccgcttgcctcggcttcccaaatcccaaagggctgagattacaggcatgagccaccgcacccggccgcaccctttgatcttgagatggctgatacggcagagcagcccagcagtggatgagtgcttacatttaaaaagttcatgggatttcataaataagctcatgaatgtacaagtccccagtgtaaaggttaccttgactttgaatttttttatcctttctttttttgttttgtgtttgatgcataggacatttatagatggaatatacctttcaggctatttcttcctctccctcccgtcgaaacccacctccctgaaatgcctgctgcctcctcagtgccaaaggactgtcaaagcaaaaatgtaataatggtatcatgttctgtttctttaaggaagtcaaaggtgcaaattacctttgcagcttcagtcttctgatgtctgcaactttgaattccttcaaggaagtgacaatttagatattccatttactctgccccaaaggatggactttgcactatttatcttagccgtctcccactggagccaaaaacatttccaacttcataagtttcactgcttctcctctyttatatattttttcastctttgctgaaaacattttcattgttttttgaaaagtgcattctaatagttaatttgggagcccatggccttaacacagaagaaagaataccgaatacaatgataggatatcaaacagcatggtctcttccttgtgttagagtgtgtaaattcaatacgccgtgttgactcagtattcaggaatgccaaagagagggattatttggtaatgtattttcatggagacccggggacggtgctgtactacagaacacctcactggcccgggctgggtgcaggtaggatggagatagaccggccccacccccttggtaactgctccttgcagatcagctgtttgaagctctccgggcacccaagacgttcttgttcaagcctgtgcgcttcccctgctagttctcatctcccttctctcaacactttttccgtgaccstccctgaaagggagttttgggcttggctcaccctggaaagcagctaatcccacatgttgccaacaggttaatgaaggatgaggctgaaggaggaaaaatttgccaaactcctttcccctaaagagccgccccttcagaaacaccttaaaatccaacctcccgggtcaaagacatttgaaaaaatgacgaagacaacatcaaactatagtctcctgttcaacgcrtgttcacttcctaagacattaaagaaaccaggccgggtgtggtggctcatacctgtcatcccagcactgtggaggccgaggcgggaggatcacctgagatcaggagttcaagaccagccttgccaacatggtgaaaccccctctctactaaagatacgaaaaaattagctgggcatagtggcagtcacctctaatcccagctactcaggaggctgaggcagcagaatcacttgaatcagagaggtggaggttgcagtgagctgagatcgcaccactgcactccagcctgggcaacagagcaagattctgtctcaaaaaaaaaacaaaacaaaaaaacaaaacaaaaaaacccaattaacattctttcaccccggatttcctagtctttattttagctataacaagcaaaacacctctttccatccttctaaaggcgtgttcctgaaacctcacttggagagttttacggaagtgcagtgagaggagtaagaaatcctgagcacacagccaactaacgcaggaacagaaaaccaaagaccccatgttctccttcataagtgggagttgaacaatgagaacgcatggacacagggaggggaacatcccacaccagggcctgtcgaggggttgagggggcagggcagggagagcattaggagaaatacctaatgtagatgatgggttgatgggtgcagcaaactgccatggcacgtgtatacctatgtaaccaacctgcacrttccgcacatgtgccccagaacttaaagtagaattaaaaaaaagaaacagaaagaaatcctgagcacgtagtaggaaccacggtctgtgatcacgtgcatcgtgcagtctgtgtgtgcacactgggatgtttccagcataaaagctccttcgaaaattcgtttccatcctgacattttaatgcacattttttatgcttatgctattctcagctctcacgtgcaaattacaccagcaggtgccccgggtccctgtcactattgaaaagtagaatgtcaaatgcatttgtactttttgccaatgcaggctaaagaaaatgactcttaaatggatagctttagtctgccaaaatggctgtcaagttagacgctaggataaagggaaagtccatcaaaggcacatttcagatttgtgttatacttctcttaaaacctctttttttttttgcagttaatagtttctggataatcctacaagtcaccgtatcttttttttctttttccttttagctggaaataatgacagcaaagccaaacaagttgtaagcaaaataaaagaagaaaccttgaacgacaaaggtascgagagatactccaatggcttttttttgtttttttttttccttgggacaggtcgtttgcrtggttcatggctgagcttcagtcacgtgccaggtggcatttgggagagatggctctgatttttgcactcttcttttggggatttctggccccatcctagagcaggagatggtcaaggcaaggcgaagatagcatcactcagctctgacatctgctaggaaaggcatgcagatgtgctggtagcttgcactcttactcaaatgtgtgttccccagggaacaggagccattgtcctttcctgttgacctccagggcacatgccaggaggtgcctctgctggttgggagttcttgacttaagataaatcaggccgggcgcagtggctcgcgcctgtaatcccagcactttgggaggctgaggcgggtggatcacgaggtcaggagttggagaccagcctggccaacatggtgaaacccaatctctactaaaaatacaaaaattagccaggcatggtggcatgtgcctgtaatcccaatgacccaggaggctgaggcaggagaatcgcttgaatctgggactgcctgggagagagagcaagactccgtctcaaaaaaaaaaaagaaagaaagaaaaaaagataaatcaaacaggaatatgcttgcccttaagattttcgaccaggtgctagaccaaattctggtgtgctctttctgtctgttcacactaaggaaggtgtgcacacaactttctaatatccatctagattctcaatgctctgtccttttatttatttattattttatttttcatttgtatacaggtagggagtgcaagtacagttttgttaacatggatgaatggcgtagtggtgaggtctgggcttttagtatagctaacacctgaatcacgtacattgtacccgagaggtaatttctcatcccttgctcctcttccacctcccacccttctgagtctccagtctctgttattccactctttccatgtggacacattatttagctcctgcttataagtaagaatgtaggaggtcggtcagggtggtaggaaaaattgtagaagatgcaaaccttcttgggaggccagaaggttttgcaaatgctcccgaataagrtttggctgaaggcagccagattctcttatccagtgcctgaaagcttaggttagataacgaggggatgtaaagaaactgatctagataagttagtttgcttaggcctcagaacctggcctttaatcatccacgcacagaactactctctccctctctccgggttgcgggggacgaccatatgaattgcccacgaatgtgttgactcaaggcctttgtcattaaatgtatactaaataaaggcccacagcagcagcttgtcaaagccgtggctgctgactctttaaaacaccctcctcagtgtctgtgagtggccccatcccctagcccaygctttcactggaaatctgtgtctgagtgcatttgttcatccgtcgctcagccaaagtctgcgagtcggacccagcaaattggactcgacctaagaagaatggtatttgactttcggtttctgagttatgtcccttagggtaatggcctccagttccatctgtgttgctgcaggagataggatttcctcctttttcatggctgcatagtattccatcaggtatagatatatattttctttatsctttcgtgtgttgttggacacctaggttgtttccatatcttggctcctgtgaatagtgctgcaatgcacataggaatgcaggcatctctttgatacactgatttcatttgctttgagtctgtgcctagcagtggaattgctgaattatgtggtgcttttatttttaatgatttgaggaacttctgtactgtttttcatagtgactgtactaattgacattcccaccagtggtgtacaagggcccccttttctctacaccctccccaacacttgtaattaactgtagaaatcatcattctggccagcgtggtggctggcacctgtaatcccagcactttgggaggccgaggcgggyggatcacctgaggtcaggagttcgagaccagcctggcyaacatggtgaaacctcgagtctactaaaaatacaaaaattagccgagcgtggtggcaggggcctgtaaccccagctactcaggaggctgaggcaggagaattgcttgaacctgggagttggaggttgcagtgagctgagatcacacctttgcactccagcctgggtgacagagcaagactctgtctcaaagaaaaaaaaaaacaaaaaacaaaaaaacacaaacaaaaacacccttctgacaatatccattttagctggtgtgagatagtagctcatggtggttttcatttgcatttccctgatgattagtgatgttgagtaccttttctttgtttatttttttgtttctttttgagacggagtctcactctgtcacctaggctggaatgcagtggtgcgatctcggctcactgcaacctccggctcccaggttcaagcgattcttctgcctcagcctcctgagtagctgagattacaggcattggcgaccatgcccagctaatttttgtatttttaatagagacggggtttcgccatgttggccaggctggtctcgaactcctgacctcgtgatccgttcgcctcagcctcccaaagtgttgggattacaggcgtgagccactgcacccggccgactaccttttcctataagcaccttttcatatacctgttggccatccaaatgctaagtgcttttctcggccatgtttatgtgtggtaccttacgtttttttttttttttaaatgcacatcccttccttggctgtttgaatttgagatggtgttttgagaattcccccaagtgggggatgggtgtattttgattctttatttgtttgtttgttttttgatacagggtctcactctgttgcccaggctggagtacagtggtgttatctcggctcactgcaacctccgcctcccaggcccaagtgtttctcctgcctcagcctccccagtagctgggaatacaggtgtgcagcaccacacccagctactctttgtagagttggggttttgccttgttgcccaggttcatcttgaactactgggttcaagcggtccattcacctcggcctcccaaagtgctgggattataggtgtgagccactgtgcctggcctattttgatgatgatgacgattattattaatattttgagacagagtctcactctatcacccaggctggagtgcagcgatgtgatctcggctcactgcaacctctgtggcccgggttcaagcgattctcctgcctcagcctcccgagtagctgggattacaggcgcccacccaccaagcccggctaatttttgtatttttagtagagacggggtttcaccatcttggccaggctggtcttgaactcctgacctcatgatccacccgcctcagcctcccaaagtgctgagatgaccggtgtgagccaccgcgcccggccttgattctttttaaagccatgagagtgaaatgaacgctacacagagctgagcctggtcactgcctatgcccctatctcctcctttctaccctaagctgctgtgaaacaccttgttattacctctgccaagggctggggtatgttgaaatttcatagccggcattgcaggatccctgtgattttcaggaacacactcccacaggrgctcccgctcagccagagccaagcccagtgtacartgtcacagagtggcagcagcctggccagatcttttctcctcattaggatctgccttggggcaaaaggattggtttctgtgtagagggataattaaggaattagagacaccgaggggttgaggaggaattatttaattatttatttgtaccgaccccgtcggattaacatttaaaggaccgagttttgaacaaagagtttggttattttttaagtattttctggggcrgggggagctctgtgtagggggaagtatatyatagaagtgagaaacaaagacagttgtttaattgacacatgcattatattattttttattttttaaggaataatatgttttatgatttgagattatttgcctagtgactttgtagctgtatagctagagaagcagagtttttataatgcttgggaaaggaagagacaaggcttattagccgcagaaaaacaggcagttaatttttaatggacttcaactctttctcttcctcagggagaactgggttttcttacatacaactgagtttttgcttatacatttttaaattttttaaaattcctgtttcatctgtgacagggggtcctattccctgccaccttggcccttcctcatttgcagcaggttttcaaaggagtggcattttctaacacaatgaatccaaaagtgccttctccgggcctgtcacatcagcatttccggggagtaaacaagaaatgcaggtgcccagggcccatctgtgaatcggggcctctgggggtgggggcggggccctggaatctgcattcttatgaggccgttaaatgatccccacgcaccttcaaatggtacacttgctgctgtcctgaaggcattcarccatcaatctggagcccaaagagaagtttctggaaactgacaagtgaggcattcttttctcatgactttttgcttttaatctgaacggcttaaaaactatatatagttccccaaaattcacatatgtgatccacctaaccaaaatgacagccaagaaacaatgatttataatcaccaacttaattttattagattctgaaaatgtttcagatttagacaacatgaattttgaccaataattttttttttttttttttgagacagagtttcactcttgttgcccacgttagaatgcagtggtgtgatctcggctcactgcaacctccgcctcccgggttcaagcgattctcctgcctcagcctcccgagtmactgggatcacagacacccaccaccaggcccggctaattttttgtatttttagtagagatggggtttcaccgtgttagccaggcttgtctcaaactcttgacctcagatatccacccacctcagcctcccaaattgctgggattacaggcgtgagccactgcatctgaccacaataacaaatcattgctgttttcttggaaaagtttgtgtaggatattcgatcatcagtttttaaagtgcagtgttttgtggacaagtagcatgacgaatacatgatttgtccccaccattaaaaaatgttagtttacttgtggcatataaataccgatggcctttaagccaatcttacagaaaagaagaaaagaatcgtttgcactttctgtggctgtttaaaagctttaccatcttgtaagagggtgggaagatggggtgtgccgtggagatggttaatgggcacaaaaatatactttagatagaatgagtaagttctcgtatttgatagcacaaaagggtgactacagtcaacaatccttcatggtccatttaaaaataactaaaagttgctggacatggtggctcacccctgaatcccagcactttggaaagccgaggcaggtggatgacttgaggtcaggagttcgagaccagcctggccaacatggtgaaaccccgtctctactaaaaacacaaaaattagccgggcgtggtggtgcacacctgtagtcccagctacttgggaggctgaagcaggagaattgcttgaatctgggaggcggaggttgctgtgagctgagattgtgccaccgcactccaacctggactacagagactccatctcaaaaaaaaaaaaaaaaaaaaagaaaccaattaaaggtgtaattggaatgttagtgacacaaacaagtgatgaatgctcgaggggatggataccctatttgccctgatgtgagtattacacattgcatgcctgtatcaaaatacctcattatcccataaatatatacacctactatgtgtgcatgcaatttttttttttaaaagaaaaaagtttaaaatctgaacaggtttggacattcatcagtggtggccctggtatgtccactgctgggggactctccagtccttgatagatgatgctgaggcccagctgggtggggacatttcggctgtggccattgagcctttacctcgactgagtctgcctccaggctcaggagcccccagatccgtggtccagccacacggcagggtctgccctctgcctgtgagtggtatctgctgcccacaacatcttatggacgaccacagctcctacaggcatcccttccctcctcagctgagacctgggcacacctccaccaaacccgtacgaaccttgctctaaattgtgcttctctctggactggcctgcacctgctggaactctgattcttgtccccacaacctccagttgcccagcgagggacagagggagctgaatgtgctgtttcgttcttgctctgctgggatcccggcatcgggtaaccccggttcagccatgtggatttatttttaagcaagtcggctcacgtcctgactccaggagcacagattgctgtggagtgtcagtcacacaattatttcaacatgctgggcgcctgtctagcctgctttcccctcctgcctttcctgctctcaattctctctccttagttcttgggttaatactctggcctgcgtactttgttgtactttctgtctttgaagtcgtgctcctctgagatcccacgctgggcagggcatgggaagctacgtgcccacagaaggacggctaattgagctctcggaattataaatgcgcgattgttttcaggaatctgggcgagatggctcatttcccaagctagggattttccagggaagcgttttcactccttatcatcacttagccattgtgcccacacctttgtggctcctgggtaattatgtgctgatgaaagctgtcttacttagaacaaatagtctcattcacttaccgaaactcctccaaatataaataaatcaaaccccagcggctccatgaaagcaaacacagaaaggcatagccgtgttcaaatgaactcagatggggagagataaccagttaaacactcttaaaagcactgaaggcaggcccattctcttttgcagctcgtacatgccatggtggaacccctgtaatcctaaatcctaagagagatcagactagacacgtgctgtgtatcctctttggaaggtgcacggtgtcctcattttctataatgattgtgtaactttaatcacaaacagcatcttctgattcatttagcttcctggctaggcacgatggctcacgcctgtcatcccagctctttgggaggcctaggcgggcagatagcttgaggtcaggagtttgaaaccagcctggccaacacggtgaaaccccatctctactaaaaatataaatgttagtcaggtatggtggcgggtgcctgtaattccagctactcaggaggctgaggcaggagaatggcttggacccgggaggcggaggtttgcggtgagccgagatcatgccactgcactccggcctgggcgacagagaaaaacttcatctaaaaaaaaaaaaaaaaaaaagcttcccaaatattattcttccagtagcttgtgccgtcttcatcagaagagggactagctgtttggttcatgtgcttccacccagttattagaccaagtttgttttcaataaaagaaatcactggtcaatgccttctgtaattgatgggtgtcaagaaggtaaattttgcacgccgccttgggaggcacttctactttgaaaatagatctttgtgaaccatcattttggcctatccaatgacctataaaatacttgaatttatcatgaaaacagaatactgtgaaatcaggatgaaggttgataacaggtcatcaacgtaattgagtagattgaaaatacaagagtcagtgaagtgtaggatgaatgcttgttgtcagtaagagagctctttgtgacccgttccacgtgcaagagatgagggttgttgttttgggaatactcaccctcctcatcgcctgtccctgctaaaatcagagctttgtgagggcagagatggattctgtgcacaggtatcttctgagtctctgattcagtgcctgaaacacagtggctcccgagacaatctacctcagtgcctgttttacaggctcacctgtgacacatgactgggacatatgttattcatgatgacatgcaagagtctctgtgtaggtgtctactggtcttcatcatcaaacagagcgagaactccaagtcaggaggcagacatatcttggggcaagaagacacctagaatttttcttcaacctgtagactttcggattgggtagaaggattgttaaggaggttgcgaaacttggaaaaaggatgatgtgagtgttgatggcatggaattctccccacacccctgggtatccatttttaatgtacagaattcttgtgacatgattttagggcatagaatccttgagagatcatgtctgtgctgaagttggaatcacagcactttatgtgaatgtgttcgccaacgattaattatgtttattcccgagaagttttaaccagattgtggatgtgtattctggttcagcatatattcacaattacctttgttttttgttttgttgttttggagacaaggtcttgctctgtcacccaggttggagtgcagtggtgtgatcatagctcactgcagcctcaaactcctcagtaggaaacttcctaccccagcctcccgagtagctgggactagtagcatgcaccactacacatggctaattttgttttttaaattttttctagagacggggtctcattatgtcgcccaggctggtctcaaactcctggcctcaggcgatcctcccaccttccaaagtgctgggattacaggtgtaagacaccaagctcagcccctgtgtttttttttttttttttttttttttgctttttgtttgtttgttttgagacggagtcttgctctgttgcccaggctggagtgcagtggtgcgatcttggctcactgcaacctctgactccctggttcaagccattctcctgcctcagcctcccaagatgctgggattacaggcgtgcaccatcacacccagctaattttttgtatttttagtagagacagggattcaccgtgttagccaggatggtcttgatctcctgactttgtgatctgcctgccttggcctcccgaagtgctgggattacaggcgtgagctatcacgcctggcctgtgttttttttttttttaaacataaaatggcccttattgactgttttccttttcatagtgagtccttttgtttctttcatgttttcgagaagtgtcccgagtcaggctgtagacaggcatatgcgtagataaacagatagactcatgcgttcctgttggtaatttttccttgaggtcaccgtatgtgttctcatgcgtgggcatagatgtcccacactctctgaaagtttaattggtcctcgcaggtctcattgtgttccttctcttcagggctcttcatatctcagggtggtaataaccttccaaatctctatggccgaggcgggcagatcacgagatcaggagatcgagaccatcctggctaacacagtgaaaccccgtctctactaaaagtacaaaaaaaattagctgggcttggtggcgggtgcctgtagtcccagctactcgggaggctgaggtgggagaatggcgtgaacccgggagggggagcttgcagtgagccgagatcgcgccactgcactccagcctgggcgacagagcgagacaccgtctccaaataaataaacaaataaatagaaatacaaaaattagccaggcatggtggcgcatgcctgtaatcccagctactcaggaggctgatgcaggagaattgcttgaacctgggaggcggagttttcagtgagccgagatcgcaccactgcacttcagcctaggtgacacagcgagagtccatctcaaaaaaaaaaaaaaaaaggaatatgcatttaacgtttctttgcgtcttttcgtggctcgatagagcccagtatatattttcactaaagagcaaaagcgcctttccatgggcctttaaatacttaagaataagcacatccacacatgggcctcccagatagtcggtgcgtttccagaaatgacggtgtgttgtggttcacagcctctttgggttttggtctccaactcccagcctcaggcratcctcctacctgagcctcccaaagtgctgggatgacaggcacagtgagccaccatacccagctattttttgaaaactcatagtctcatatttccctaatatttagggttagggctagagttaggtagaggttagaggtgctctgacgagtgtttcccaagtcttggagcccacctctggccaaatcaccgcctgcagttggaagcaaggctgtttctgagatgagtcatactgacatattttgctattgaatgcacggttgccctgatccattcagagatacttctgcagcaccatgagctccttaatccctgcccctgttcacctacaagggtctgcaagcgagcccccttccgcaactcatctctttgtgtaatccttctccagaccctgaatatatcagcctgttggcatatgtatctatgtgtgtgagatcagcctgttggcatatgtatctatgtgtgtgagatcagcctgttggcatatgtatctrtgtgtgtgtgtgtgtgtgtgtgtgtgtgcgcgctctgaggatattggcactttttaatcttcttccattagacgacaaggctgagggcttccacttgccgccgacttgccggcacacctggggcatgtttaataagtaattgtgtatggtctgctttgcaaatgcgctacttcacatttttccatcccgcccgtaacgaggactggggttgttttacaagttaattacccaaaagattatcgagtgggtttagaggcacaaattctacgcgctatttaacagataagaattaatgagtgttgttaaaatgggaaaaaaaaatgtctctgtcagtggagggagttatctctaccctgcctggctgtgttactgttgtttttttttttgtctgtgaatgagaaccgaggtagagaaacaaggcgagtgttctcattgctcttctcccaccagagcacaggcggcacgtgtgaaaataactattcacagtttctttcccaccgtgtctcaagaggggtgaatgccagggtcgggcccggtggctcacgcttggaattccagcactttgggaggctgaggcaagaagattgcttgaggccaggagttcgacagcagtcagggtggcgtagagagactccgtctctacaaaatattaacaaatcagtctggcttggtggggtgcactgtggtcccagctactcgggaggcagaggcaggaggatcgcttgagcccaggacttcaagaccagcctgggcaacatggcaagaccttgtctctacaactaaataaaaaaattagtcaggcgtggtgtgcgtgcctggagtctcagctactcaggaggctgaggcaggaggatcgtttgagcctggaggtcaaggctgtggtgagccatgatcgcgaccctgtactttagcttgggcgacagagcaagacccttttctctaaataaaaatggaataatagtaaaaagaagctgaatttcagctgttttcagccattctctttattccttcaaatgcctctgtattctgcagtatcctttaaaatattaagagcaattttagctaatcaggaggctgagacaggagaatcgcttgaacccaggaggcggaggttgtggtgagccgagatcgtggtattgcgctccggcctgggcaacaagagtgaaactccatctcaaaaaaaaaaaaaaagggagacacagataaggccatgtggagacagagactggagtgatgcggccatcaacttagggataccaggagctggaagaggcaggaaggatgccccctagagtcttcagaaagtatcagacacctttgggaggccaaggcgggtggattgcttgaggccaggagttcgagaccagcctggccaacatggtgaaacctcatctctactaaaaatacaaaaattagccaggcgtggtggcgggagcctgtcatcccagctcctcgggaggctgaggctggagaattgcttgaacccgggaggctgaggttgcagtaaggtgagatattgccaatgcactccagcctgggagacagagcatgattctgtctcaaaaaaaaaaaaaaaaaaaagaaaaagaaagaaagcatcaaacacaattgcaaggggttgaatgctgatctccaaaagatatgtccatgtcctaatccccagaacctgtgaacaggaacttatttggaaatagggtctttgcagatgtaattagttaaggatctcaagatgagatcattctggattagggtgagtcttaaatccaatgatagctgtccttgtaggagacaggagaggagacacagacacagaggagaaggccttgtggagacagaggcagagactggagcgatgcggccacaaacccagggactcctggagcccccaggaactaggagaggcagggaggccccttcctgagagcccccggagggagcatggtcctgagacacctgatctcagacttttggtctccagagccagtagaggatgaattcctgttgaattaagttccccaggtgtggtcatttgtcacagcagcctcgggagacgagtagagacatakatcgggcaggaatagaatatctagttgcattgctgatagaggcatactacagctgtgtgacatggtgtgacatcagcacactgtgtcctgaccccaggtcatgggacaagaacttggggagacatagtcacccccctggctcatcagggaaatgcatggcttccggtaaggtgaccctgaacatgcgtgtgtcactctgaagtgttggcctcagactctgcctccaaattccaagtcccctgggggttccgctggaggtggacacgcccccatccatgccttccttgcagtcacgggaacatcccttactcagtcctctctggtcaccgatggggcatgacaggaggcgctacatgtttccaagcagccggggttccagatgcwtggaaattctgcgtgcggcctctctatgggaaaaagggaggtctgccaggagtggaaccccagtgagaaagtaaactcaaaacagaaatgaaaggtttctagacacagtacaagccccctttgtggtgcgcgcagggacttacgtagctcggcccctccaccccctggctggccccagtggccgaggtgtgttgggtgctgatctgtgacaccctcctgcttcacacgggcagggaggggttctggagagagtgcaggtgggctggagagctgagctccctgcagcaggtgagtgtgagtcctgaacagactcgttccaaggaaacaggtgcaggaaagaacacaggtcttgraggaatcagggttgagccagccctgtgacctcgggctgtccttggccccagtgatggcttatctttacctggaacttcaacctcttatcatcacctataacgctgaccactgatcctcacctgggactcgaacctctccccatcacctgtaactcggaccacttgtcctcacctaggactccaacctccctccatcacctgtaatgctgaccactcattgtcacctggaagtccaacctctcatcactacctggaactccaactccaactcttttttttttttttcatgagacggagtctcactgtgttgcccaggctggagtgcagtggcacaatctcggctcacggcaacttccgcctcccaggttcacgccattctcccgcctcagcctmctgagtagctgggactacaggcacgtgccaccacgcccatctaatttatgtatttttagtagagatggggtttcaccatgttggccaggacggtctcgatctcttgaccttgtgatctgcccgcctcagcctcccaaagtgctgggattacaggcgtgagccactgtgcccggccccaactccaactcttatcctcatctgtagctctaacctgttatcctcacgtgtaaatgtgatgtcatcctcacctgtagctgtaatctcatcttcacctggcattctgacctcttaccctcacctgtagctctaaccggctatcctcaccgatagctctgacatcatatcacctgtagctgtaacctcgtcctcacctggaactctgacctggctgacgtgcttgcagcatgtgggtggggccgatttccctcctgccccagctccctgctgctgccaagtccaggtctctcctgtggggcaggtatacccctccctgggtctcagctgggcccactggccttcacagggagcctgctgtctgcactcccattcttgtcctgccctctcctccggcgccctgtctgctcagatgtcctcatggcctaggcacctgcagccgccaggacagtgagcccggacacaagcagccttccatccggttccccctgcatctgccaacccatcttgcccacagccaagcttctgtgaaaaatcatagcagtcatgaaactcatgagtgctcgggcaaatcagaaaaattgccagggatcctaccatggacacgcgtccctgaaccccgaatggtccctgtgtgttgtgtgtgcgcaggagacgggcaggtcactgtgtgtcgtgtgtgcaggagacagggaggtccctgggtgttgtgtgcccaggagatggggaggtccctgtgtgtcgtgtgtgcaggagacggggaggtccctgtgtgtcgtgtgtgcaggagacagggaggtccctgggtgttgtgtgcccaggagatggggaggtccctgtgtgtcgtgtgtgcaggagacggggaggtccctgtgtgtcgtgtgtgcgcaggagacagggaggtccctgtgtgtcgtgtgtgcggaggagacggggaggtccctgtgtgtcgtgtgtgcaggagacggggaggtccctgtgtgtcgtgtgtgcagaggagatggggaggtccctgggtgtcctgtgtgcgccggagacagggaggtccctgtgtgtcgtgtgtgcggaggagacggggaggtccctgtgtgtcatgtgtgtgcaggagatggggaggtccctgtgtgtcatgtgtgtgcacaggagatggggaggtccctgtgtgtcatgtgtgcgcaggagatggggaggtcgctgtgtcttgtgtgtgcacaggagatgggaggcgtcaacacacatttcatgctcacatttccattcactgtccacactgcacacttgtacatggtcaatgtctagacatttatagtttgtttatgtgttatattcatctactttatatatattcatattttaggttcatatatttattgtatacacatttatatatttgatctatattaatattttaggtttatatacttactatatatttattattataaagcatatacattaaattataatgtattattatatatgatgtattatgttcaatgtatatattaaatacataatgacataatatgaatttatattataatgtatatacatatgaattcacattcatatgtatgttacattttgtaatgtatatatattttgtaacatatatttgtaatataaaattatatacaagatatactttgatatattttatttatatatttatatataaaacataatataatatgcacaatacattttgtgtatatataaaatatatattacataaatatataatgataactataaattatatttgtatgtcattataaataatttatattaaatatttatgctattctataaatagtatatawatttagtatatatttttatatcatactttataataaacacgaatttataatatataagtataaactatagttattggatgtttaattttatgtatatattattttatatatatcatactatgtaacacataatatataataaatataatatataataagcatatatcataatatataatataaataaacattgtaacatataatatataatacatatatatcagtatacaaaatataaaattaatatatacataaaattatatacctacttattttattttattttttaagagacgtgagtcttgctgtgttgcccgggctggctttgcctctggaactcaagcgatcctcccacctcagcctctcgaggagctgggactacaggcgtgcaccatcatttcctcctaaaattgtatgtgctgcatatataaaatgataaatgctttacatatactttatgaaattatatatgctttagataaaagcagakgtttcataaaactgaactgtaacatgcatggcatttaaatcccattgaagtgaagggctgggcttgagggtagcgtcaccctccctgaccgtcatacccatttccatttccccaggaaggaccaggatgctttgtttaagcagcacgtttgaattgctggcattgcctgtggcctccctgtggcgagggatggtgaacgacagcgttttccctcctccttcctcaccttgcaaacctcacttcgttggatgcataattgctgactcatccccatggatcgccttggactgtgtagcaatcactgctcttttcacagtccctcttgaatttctttcctttttttttcttttagtcggaatttcgctctgtcacccaggctggagtgcagtggtgcaatcttggcccactgcaaccttcacctcctggattcaagcaattctcctgcctcagtctccccagtagctgggattacaggtgtgtcccaccacacccagctaatttttgtatttttagtagagatgggaatttcaccatgttggtcaggctggtctcgaactcctgacctcaggtgatctgcccacctcggcctcccaaagtgctgggattacaggagtcctcttgaatttcacttaagatgggctgggtgcttcgtggcaggcttttcacatcagcctttgcatttctgggtgtgacccctgtgtctgctgccttctatattcctctcttacttggcaggattccacccctaggtgggtttattttttcccccagtcccctgcctgcctgagaattcctacctatggctcctcctgggaaagggctcttggctgcgtcttaaatcttgggttatgccttggtgcatactggtgttgcaccagtggtgcaacgttgccggcatcccttttgcctgagggcaggtcacttgtattctgtcttgaaggaacctgacttttaaggagggacgacctggagagtttctttattattgaacttcactgactccctgaggatagactgatcctgccaaattcttgggtccccaataaaacagcattccatgaaataaaaagtaagaacagatggcaccaggaattccactgctgggtatatacctcaaagaattggaaacagggtctccaacagatatttgcacaaaccacgtttgcagcagcagtattacttacaataacccgaaggtggagagaaactgtgtccttccagaagcaaatggataagcagaatgtggtatatccaaacggtggaatattacgcagccataaaaaaggaagggtattcagatgcatgctgcgatgtgggctaaccttgaggacattaatgctaagtgaaataatccaatcctaaaaggtggagagaaactgtgtccctccacaggcagatggataagcaaaatgtggtgtatccaaatgatggaatattacacagccataaaaaaggaaggatattcagatgcatgctgcaatgtgggctaaccttgaggacattaatgctaagtgaaataaaccaatccccaaaggacaaatactgtaggattccactcctatgaggtacacagagtacctttaaatttttagagacagaaagtagaatggggtagttataggggttgggcgaggaaaaggtggggacttaatgtttaatgggaacagagtttccatttggcaagatgaaaatattttggagatgcatggcagtgatggctacataacaatatgaatgtatttaataccactttactgtgtacgtaaaaatggttaaaatgctaaactttatgtgatgtgtatttttccacaattcaaaattataaaaaaaaaaaatgcagctgggcatggtgactcatgcccgtaatcccagcactttgggaggccgaggcgggtggatcacctgaggtcaggagtttgagacgagcctgaccaacatggagaaacctcctactaaaaatacaaaattagccgagtgtggtggtgggcgcctataatcccagctatttgggaggctgagcaggagaatcgcttgaatccgggaggcagaggttgtggtgagctgagatcgcgctattacactccaggatgggcaacaagagcaaagctccattaaaaaaaaaaaaaaaaaaaggttaaaatgctaaactttatgttatgtgtatttttccacaattaaaaattattttaaaaatgaggccgggcacggtggttcatgcctgtaatcccagcaatttgggaggctgaggcgggtggatcacttgaggtcgggagttcgagaccaccgtggccgacatggcgaaaccccttctctactaaaaatacaaaaactagcctggcatggtggctcaagcctgtaatcccagctcctcgggaggctgaggcagcagaatcacttgatccccggaggcggaggtcgcagtgagccgagctcatgccactgcactccagcctgggtgacacggcaagaatccatctaaaacaataaaaaaaaaataaaataagtaattgcccttaaattggaaatgctcaacaacccacgtgattctgaatctgaaaaggccagatcagggagatacagagaagaataaataaaacacaaggcaagagaagatttatctctggagcatccttgtgcagctgttggtgagtgactcgtgtgtgtcaattgatcatacactcatgagtggataaaagtacccatgttttaggtcaagaaagactgtgacacacgtgtccagcacgccaagcacacagcccgtggggtgtcatccatgtgctgtgccctccctgtctccctctcccaagctcctgcatggaaacagaggtggacacgaaacctacctacccaccccctcccaggttaccgccatcactttcatcacaaaacagagtctggattcagggattcagcccagggcaggagctcaggtcatcttcctctttcagaagggagatttctgctgcctctggcccagcctttccctctctttccccccatgagctgccattggagcacccacctgggtgcaggtgagagagaggaggaaggagaccaggtgaccccttcctggctggttaccctatgtcccggtaacagacggttagagctgattctcatggcagaagcgtgactgccagagaccacctgcggcgcttctaatgctctggtccgtgtattcgtcttgtagcgttgccgagtgttacagagatccacagaccaggtggtttaaacaaaagatacttattctctcacagctgtagaggctacatgtctgaggtcaccgtgtcggtaggcttgctttctctctggcttgtagacgccrtcttctccctgtgtcctcacagagtccttcctctgtgtgtgtctgtgtcctcatctcttcttatgaaatgtcttagtctatttcaggctgctgtcacagaataccataggctggatgacttacaaacaagacatttattctcccacagtcctggaggctggatgtctgagatcagggtatgggcaaggctgattcctcctgaggtctctctcctggacttggagatgctgtcttctccctgtgtcctcacagagtccttcctctgtctgtgtctgtgtcctcatctcctcttcttatgagatatcttagtccatttcaggctgctatcacagaataccataggctgggtggcttagaaacaatagacattgattctcccacagtactggaggctggacatctgagatcagggtatgggcagggctggttcctcctgaggtctctctgctggacttggagtcaccgtcttctccctgtgtcctcacagggttgtccctctgtgtgtgtctgtgtcctcatctcctcttcttataaggagccagtcccattggatcagcctccccccaaccccctgaaacctcattttaccttaattgcctctttaaagaccccatatccaaatatgatcacattctgaagtcctaggggtgaggatctcaatgtatgaatttgagggggacaaaattcagcccatgacaaccagtgtttctttccaaggggctacctgaaaacrtttctgcaacccccagcaagctggcatcgtctcagcatcttgccatggggttccctccatgcctcccaatggctcctttgagtaagaccaaggacaaacccataccactcccttctcctgttttctctgccctcattgtcccctcaagccctgaggctgatcagtccccacaggaccacagctaccctgtagctatgagcagtggcttcctcaggagtgagccaggctcctgtaccccatgcctccctggcacagaacaagatttaggttctgggggtacctgagggaatcccgttttttttttttttttttttgcaggggagggtggaggctcagagtagggaatttttttttttttccgcctgctgtgaggaaattcacccctgttatctgatccatgcacactctggagctggctgaggtcctaactatttcctctgtaaacttctgcccttggaatgggttctgcgatgattaatacttagagtaaacttgattggattgaaggatgcaaagtattgatcctgggtgtgtctgtgagggtgttgccaaaggacattaacatttgagtccgtgggctgggaaaggcagacccacccttaatcatctgggtggccaccatgtcatcagcaggccagcgaggctagactataagcaggcagaaaaacatgaaaagactagactggtctagcctcccagcctgcatctttctctgtgctggatacttcctgccctggaaaactggactccaagttcttcagctttgggacttgggctggcttccttgcccctcagcctgcagacagtctattgtgggaccttgtgatcgtgtgagttaataccgaataaatgcccctttctatatatctatcctgttagttctgtccctctagagaaccctgaccaatacagggtccgttccttaccccctacatctataaccctgctgcctcagttgatagggaagcagaaagagccgcttttttaatgtttaattttattaagtttgcagtttcccagtgcccaaactcatgttgatttcaaaaactgtccttttaaagcatgtgggcagggtgacaattcatagcaggtgacaaaaatgttttataaataatatccatggaaatggaagctgtcactgtctgcagaatgcagccaaaatattcagaagatttgtatcactctaagttctcgtgctagtaagaaataaaaaagcaaatgatgactgggcctctaagaaataaagtaaaattaggaagcaggagtatgaaaataatgacattgtgcagaaataaatacaaaaggaaagtagcagagaagcaaaaaaaaaaaaacaaaaccatcaatagtagtttccttaagaaaaatgaaagaataatatcccaccatttattcatccttcattccacacacaaaagaagcaaggacagattagcatgaattggaacaagaaagaggaaataacatgtaataaaaatatgatttaaacttatgcaaaaaaagtaatttattcttaactcaactaacatatttgattacctcctcctgggcaaaggatgaaaggctgtcttattgcaaaaaattagaattttgctaaattcatgcaaatggaattacagatcacagataaaacaacatgctgaaatttcaaccgtcagaactttccaccaagtgttcctaatgaattcttgaatatctggttgggtgcagtggctcacgcctgtaatcccagcactttgggaggctgagttgggcgggtcacctgaggtccagagttcgagaccagcctggccaacatggtaaaaccctgtctctactaaaaatacaaaaattagctgggtgtggtggcacaggcctgtaatcccagctayttgggaggctgaggcaggagaattgcttgaacctgggaggtggaggttgtagtgagctgaaatcatgccactgcactctagcctggtgacagagcaagactccgtctctctgtctctctctttctttctctctctctctcacacacaaaataaataaataaataaataaataaataaataaataartawttgattatctatatactttttccaaaccatcaaggacaatctagatcaagaatctggaaactgttgaccctggaacatatctgacccttaacttgtttttctcattaaagttttcttgaaacacagccatatacattcatttacttattgcctgtgactgtttttgccttaggtacacaggtttgaagagttgcaacagagaccttatggcccacaaatcctaaggtgtgtagtatttggccatttatccaaaaatctactggctgtactcttcaaagtgaccagagccaccaacctgtgtctgagtaaaccgttttactcccaaatgaacacttttcaaagaagcatcatcggctggttctacttaccaacctaaataaagaaaatctagtttaatcttatccactgaatagacttccaggttaaaaaaaaaattactcctgacttagttgcaactcatccacctgtagaccaaaggatgcttctcattaggtaacagggaagcatttgggataattcaacatccattaattagtaaacctctgaaggaattaatctcataacagcagcyggaatgcaggagatgctctacacccgaatcacaaattgaatggatggcaagtggattttccctcctaaggctgattgattggttctggctgccagcaccctgagataagaatgatcctgcagcaaggaatagtcatcaattagtgatgcctgctgtggctatggaatgagaattacggtctgtgtgctacattctttccattcttggtggttctctcataaaccacaataaagcatgcatcttttaaagcaaccatgaccatcactagccaccaccatagccctctggctgattcatggatgaatttccaaattcaaatgtgaatttccagtgtcacatttgtgttcctttccctaaatgatgatgatggtgatgatggtgatggtaatgatggtacttgttggatgtgtgtatgtatgtatacacacacacacatatatatacacatacacacacacacacacacacacacacmtatatatttgagatggagtctcactcctgtcgccaggctggagtgcagtggcacaatcttggctcactacaactcnnnnnnnnnnnnnnnnnnnnnnnnnnnnnnnnnnnnnnnnnnnnnnnnnnnnnnnnnnnnnnnnnnnnnnnnnnnnnnnnnnnnnnnnnnnnnnnnnnnnnnnnnnnnnnnnnnnnnnnnnnnnnnnnnnnnnnnnagcagctgggactacaggtgcgcagcaaatgtatatatatatatttttttttctttttttttttaaatttatttattttttattattatactttaagttttagggtacatgtgcacattgtgcaggttagttacatacgtatacatgtgccatgccggtgtgctgcacccaccaactggtcatccagcattaggtatatctcccaatgccatcccccccctccccccaccccacaacagtccgcagagtgtgatgttccccttcctgtgtccacgtgatcccattgttcaattttaaatacaaccaaataagcttgcttcttgcctgtgtggaatttatagtccagctggagtgaggaattaaataatcatccacttatctgagtgagcaaaattatgataaacactcttaaaaagtgtcctttaacagctgtcttgaaagattcaattccatcctctcatgaggttccaccctctgggtttgctttctccaagacctaccctcctgtgtggcttctttcttgactgtttcttttatgctgcctttcctcagcgtttcctcgtagcatctcacactacacacctttccttaggtcttgcaaccacgtccgtgttctccaaaactctgctctgctagttctcaccaatatatttgtttccaaactcctgcctcctacacctccctgcttccacagcaagtgcaggaatgtatttgacattttccttctctctgtgtaagtcagtggactaccatcctctcagctgcctacagtcgatcctagagtgtctgagatgcttttctccaccttggcattcctctccctggtggcaactgagagctctgtagaccacctacatgcttatcaaaaacactccgtcattttcggtatcactccctacagcaggtcacacctatcccttacctgcttcataactctgcttcctggctagtctctcggcttccaggtttccctccctgaactgtctacactgcagtcagagagatcctgctgagtcacactgttgtcttaacctgcttaaacccatatgggcagaatgcccttcatgcctccacctgtttgctgtagctgtgcacatgtggttcctggttcttgagaattcttcccctcctctgcctcctgaccatccaagtccctttcatgctagtcttctcagcttttatagcatgctgtaaagcagttgtcctgaagccaggtgccttacaactccctgctcccttgggacacttaatcccttctatcgccaacctcacacattgtatcgttggttgtttaattgtgtcactgatttccccagccccatgatggtccatggaacatcactgggatataaaaagtactggccaaaggaataaaatacaggaaaatattttgtgcattgtgggatctcatgaatgacagctgccacaatgatgatgttgatgataatggtgattctgatggtgatgatggttgtgatgatggtggtagtgatgatggcaatgatgatgacagtggtaatggtgatgatggtgataattatggtgatggtgatatagtaatgactgtgatgatggtgatgatgatgatgatggtgatgatcatgacgatggtgatgatggtgatgataatgattatgctgctgctgctgatgtgataatgatgatggtgatggtgatgatggtgtttatgatggtgatgatagtgatgatgaaaatattggtgttgatgatgctgatgctgatggtgatgatgatggggtgatagaaatgataatgatgatggtgatgaggatggtgatagtgatggtcatggtcatgtgatgatgatgatggtcagtgatgatgatggtcatgatggtgatgacaatggtggtggtgatagaaataatgatgatggtgatggtggtgatgctgctgctgctgatgatggtgatggtggtgatgatgatgatggtgatnnnnnnnnnnnnnnnnnnnntgatggtaatgatgatggtggtggctatgatgttggtgatggtggtgatagtgatgattatgaaaatggtaatgattgctgttcatggattctgtgaaagaaccaaccccttttcctgaaacaatcttgctctacttgactatctgtggactgttctgtgtccttcctcccaagtctctgtggcttgcatgtcctccttctggtgggtaggttggccaagtctgacaccctcaactctgccctccttccatagctaacaacagccctaatatccgaagactcagggattttgctgtcagctcccttggctcagccaagcaaagactgtgcttgtgggagcccagaaagagggaatggaatacttctccagagagtaggtgttgcatttctgaatattgtaattaagccagatgagtctaggcaggcccacaggacctcttcaggcatcttcttgtccatgttttgcactatgcaggagaagtgatgctgtcagccatgcaagccatggccccccatacagcagactctcctacgaagccatgtagcttgcaaacaatgccatgttttagtttcatgttacccctcctgcagatttgcacatctaggctctgcttttaaaataatcatgcacctgtcaggctggaagttttcaggaaaatccttctcacctcatgtgtgttgctggctttttttttttttttttttttttggttgtggcttcctgagaacggggatgctacagcctgccactgttggaacaaaggtgcttttagtcactctacctgtcgctcttagggaacgtacgtgccctcaggggaaataggcggatgcacattttgcttctggctcttttgcctctttatttttttcatttttatttttttgaggcagagtttccctcttgttgcccaggctggagtgcaatggtgtgatctcggctcaccacaacctctgccctctgggttcaagcgattctcctgcctcagcctcctgagtagctgggattacaggcatgcgccaccatgcccagctaattttgtatttttagtatagacggggtttctccctgttggtcaggctcacacttctggaggctagaagtccaagatcaaagcatgccacgttcagtgtctggtgaggacctgcttcctggttcacagacggtgccttctcactcttgtcatcacgtggcagaagggtcgagggagctctctggggtcccttttagaaggacactcatctcattcctgaggccccaccctcatgacctcatcacgtcttaaagggctccacctcttaacactatcaccttgtaggttatgtctcaagacagggatctggggccgggtgtggtggctcacgcctgtaatcccagcactttaggaggctgaggcaggcggatcacctgaggtcaggagttcgaggccagcctggccaacatggtgaaaccctgtctctactaaaaatacaaaaattagccgggtgtggtggtgcacacctgtaatcccaagctactcaggaagctgaggcaggagaatcgcttgaacctcggaggcggaggttgcagtgagccgagatcacaccactgcactccagcctggcgactgtgtgagactccgtctcaaaaaacaaaacaaaacaaaaaagcaaaagcaaaaacaaaacaaaacaataaccaaaaaatggggatttygagaggacacagacattgaaaccatagcacatggcgaccttgagtctttgagtttacgtgtgcagcatgaatgctcggtggtgatggatgaagagagagcaaggggggaatgccacacacttctaaactgtcagacctcgtgagaactcactcactatcatgagaacagcaagggggaaatccgccaccatgatccaatcacctcccaccaggtccctccctcaacgctgggaattacaattcaacgtgagatttggatggggacacagagccaaaccataacagcagcaatagtaaactcatacatcatatctatacatctctcctgaaccatccctgctagactcagtaggacctgtagagaccatctttccctgtattccttcaacatcctgcttccttatcatatgtttctaaggttgtatagttccatgagagattacagctacttttttttttttaagacatctcatcctgcaatgcagtcttttttttttttttttttttttttttgagacggagtcttgctctgtagcccaggctggagtgcagtggcatgatctcagctcactgcaacctccgcctcctgggtcccggttcaagcaattctcctgcctcagcctcccgagtagctgggattatggggacgtgccaccatgcacagctaagctctgtatttttagtagagacagggtttcaccatgttggccaggctggtcttgaactcctgacctcatggtttgcccgcctcggcctcccgaagtgctgggattacaggtgtgagcgaatgggcccggccaatgcaatcttttagcaggaaatccatccaggattttggaatcaacagaaaagaaaaaccttgggttttggagtctcagattctggcggtcctgctagatgtgttgacgagtgtgttgggccagttaattaccctcataattgttctaattgcttttatcctgcaaatatccctctgtgttcattagctttgccattacgactgagcccaagtggattaaagaaagcctgtgatgccaccagacatcayttttgtttcggcaaaacagctttctctaggaatctggccttaatgtgttttggatgccccccacactgacagggtccttcatgagctctcctggatagaataacacaaaaaactcaaagcccattttaagaaasagcagcatcattaaaaaaaaaaaaaaaaaaaaaaaacctccactgccagcccacaggtcgctcattttcttcctagaaataaattccagttgagtggacacgtcttttacgggggaatttcagtcgtgattgatcatccgttgacctgtttaaaatgattgtcaagtgactgggctatcctcattcacagataactcaggcaggctcagattaattaacccttcgtttgtttgccatgtaggactaattagtcatcatccatctactgggaatcagacgtcrttggcacagttatcaaggacagggactttgccggcttatcatgtagaaggaagaattaatggtgttggtgatatatggtcttgtgtagtggtagggtattcctctccctcttttcttcatgttcttctttctttgcttgccacacattcatttacaggggactctgaagccacgtgagggttaggggcacgtgaagaccttgtgtaactcttcactcccccaaaacttaactaatagcttgctgttggctggaagcctttcctgcaactagacggtcccatctaggggtaatgggagacagtgacagatcatgaggcaggtcattattgcaccagacacaaataatatagtaatattcttacaataaagtaagccaaaggccgggcgcggtggctcacgcctgtaatcctaacactttgggaggytgaggcaggcgaatcacctgaggttgggagttcgtgaccagcctgaccatcatggggctaccccgtctgtactaaaaawacaaaaaagtagccaggcgtggtggtgcgcacctgcaatcccagctactcggggggctgaggtaggagaatcacttgaacctgggaggtggaggttgcagtgagccgagatcgcaccactgcactccagcctgggtgacaagagcacaactctgtctcaaaaaaaaaattaatcaagagaaaaaaatatagtatgtattatatactatattcttacaatgaagtaacctagagaaaaatatagtaaatattctatattatattcttacaataaagtaagctgtgattttccttaagaaaatcgtaaggatgagaaaatatctttactgtttatcaggtggaagtggctcatgataaatgtcttcatcctcgtcatcttgacgttgaggaggaggaggaagagaagggggtgtctcgggtggcagaggcagaagaaaatccacatataaggggacacccattcaattcaagcccgtggtgttcaagggtccactgtcataggggaggctcaatattttagtttcctggagctgctgcgacacaattctacaaaccagctggctgaaagccacagaagtcaaatctctgacagctctgaacaccagaagtccacagccaaggcaggctgaccacctggtcatccaagggcagagcccgtgtcaaaggacattcctggagcagaaagccaacacatccgggtggaaatacaaccttccagtcactaagtatatttgcaaatctccagcaggtcactattgcaccagacacaaagaataagcgttcagtaagttgaagtattgtgtgcacacggccgggcgcagtggctcatgcctgttatcccagcactttgggaggccgaggcaggcggatcacgaggtcaagagatcgaggccatcctggccaacatggtgaaactccatctctactaaacatacaaaaaattagccgggtgtggtggcacgcacctgtagtcccagctactcaggaggctgaggcaggagaatcacttgaacccgggaggcggaggttgcagtgagctgagatcatgccactgcactccagcctggcgacagagcaagactctgtctcaaaaaaaaaaaaaaagtattgtgtgcacactgcaattatgaaatgcatttcattctggagtattaaggcagggctgtgccccttgcggaggctctggaggaggatcctccgctatctcttctggcttccttcgctagctagcaatcctggttgtttcttgtcctgtagaacagaggactccaaccccctggctgtggactggtactgagcaaagcttcatgtgtgttcacagccacttcccactgcacgcattaccgcctgaggtcrcctcctgtcagatcagcagtggcattagattatcagaagattgagaaccctattgggaagtgggcagaccagggatctgggttgcatgcttcttatgagaatctaatgcctgatgatctgccactgtctcccatcaccccccggatgggaccatctagttgcaggaaaacaagtttggggctcccactgagtctacatggcaatgagttgtattgtagaattacttcatttaacgtatcatcatagaaataaagtgcacaataaatgtcataygctcaaatcatccccagatccttccccctgcactcacagtgactgtctttctatgaagacagtttttgtgtgtgtgtggaaaaattgtgttccatgaaactagtctctgtgccagaaaggctggggacggctggtgtagaagcatcaatacagtatctgcctttgtcgtggccatctctgtgtctctnnnnnnnnnnnnnnnnnnnnnnnnnnnnnnnnnnnnnnnnnnnnnnnnnnnnnnnnnnnnnnnnnnnnnnnnnnnnnnnnnnnnnnnnnnnnnnnnnnnnnnnnnnnnnnnnnnnnnnnnnnnnnnnnnnnnnnnnnnnnnnnnnnnnnnnnnnnnnnnnnnnnnnnnnnnnnnnnnnnnnnnnnnnnnnnnnnnnnnnnnnnnnnnnnnnnnnnnnnnnnnnnnnnnnnnnnnnnnnnnnnnnnnnnnnnnnnnnnnnnnnnnnnnnnnnnnnnnnnnnnnnnnnnnnnnnnnnnnnnnnnnnnnnnnnnnnnnnnnnnnnnnnnnnnnnnnnnnnnnnnnnnnnnnnnnnnnnnnnnnnnnnnnnnnnnnnnnnnnnnnnnnnnnnnnnnnnnnnnnnnnnnnnnnnnnnnnnnnnnnnnnnnnnnnnnnnnnnnnnnnnnnnnnnnnnnnnnnnnnnnnnnnnnnnnnnnnnnnnnnnnnnnnnnnnnnnnnnnnnnnnnnnnnnnnnnnnnnnnnnnnnnnnnnnnnnnnnnnnnnnnnnnnnnnnnnnnnnnnnnnnnnnnnnnnnnnnnnnnnnnnnnnnnnnnnnnnnnnnnnnnnnnnnnnnnnnnnnnnnnnnnnnnnnnnnnnnnnnnnnnnnnnnnnnnnnnnnnnnnnnnnnnnnnnnnnnnnnnnnnnnnnnnnnnnnnnnnnnnnnnnnnnnnnnnnnnnnnnnnnnnnnnnnnnnnnnnnnnnnnnnnnnnnnnnnnnnnnnnnnnnnnnnnnnnnnnnnnncgtactgcaattggccccagccaccctgtagaatttagatttagcgaaaaaagacttcacgtgttcgccaaattctgcgtttcctcctgagtcagaggcacctgcaatgcaggcagcgggaagttgttcttctaccagaacaagagcccctaggaaaattgccccttttattactgttttggtcaaaatatggcaacaacattggtgactccaggcgagttagtaaaaatcacagagaggcacattttgtgtccggggaatgctgggatgctcctaaaacccactgagccggccgggtgcagtggctccagcctgtcatcccagcactttgggaggccgaggcaggtggatcacgaggtcaggagatcgagaccagcttggccaacatggtgaaaccccgtctctactaaaaatacaaaaattagccaggcgtgggggtgcacgcctgtagtcgtagctactgaggaggctgaggcaggagaatcacttgaacctaggaggcggacgttgcagtgagccgagatcgcactactgccctccagcttggcgacagagtgagactctgtctcaaaaaccaaccaaccagccaaccaaccaaccaaccgaccaaccaaccaaccatcccatcgagccgttctcttgctgactcaagagagaataaatcaagaaacaaacacacaaggaaaccaaaacaaccctgtagctgaggattctcccctaggaggaagaaaacgggcatccacacggcgtgtgcccagctaaatataaactgcgaggggaagggaggagacagtgatgacaagccccagccttttccacaagaagaaaaaggtttaagttttcaatgctgcccatgatatccaagaacgaaccgcatttcacagccgcggtgtgcataccatactttcacttatcggaagctcattcattgtgtgatgtgcactaattacccgctggagatttgagaacgcacctgctgactgggagggcgtattcccacctgatgtggttgctttctgcactccagaaattccctttgagatgggctccatccttccatgacagcgtgaccgcttgtcctgtagtcacagtgttgtctgaagaatgcaggatagtttattttcatttttgtttatttatgtttctgttttagaggcaggttcttgctctgttgcccaggctggagtgtagtggtgctatctggctcactgcagcctctacctcttggactcaagcgatcctcccacctcagcctcctatgtagctgagactacacatacatgccaccaacacccagctatttttattttttatagagacagggtctcactatcttgccctgggtggtcttgaactccagggctcaagggatccttccaccacggcctcccaaagtgctgggattacaggactgaacctggccttgctgtggtctgtttcgagaagactttgtttttcgttttttgttttttgktttttttgagatggagtctcgctgttgtcacccgggctagagtgcaatggcgtgatctcggctcactgcaacctccgcctcccgggttccagcaattctcctgccttagcctcccaagtagctgggattacaggcatgtaccactatgcctggctaatttttgtatttttagtagagatggggtttctccatgttggtcaggctggcctcgaactcccgacctcaggtgatttgcctgcctcggcctcccaaagtgctgggattacaggcgtgagtcactgtgcccggctgctcacccagctatttttattttttggatggggtctcactatgttgccctgggtggtcttgaactcctgagctcaaggaatcttcccaccacggcctcccaaagtgctgggattacagccctgagcctggcctcactgtggtctgttttgagaagcctttgtttttaaacagaaccacatgttggtatttcagagccaactcttctgtcaagaatccaaatcagccaggcacggtggcatgcctgtgtagtcccagcaattccagaggctgagacagaaggatcatatgagcccaggagtttgagatcagactgggcaacatagtgagactccatttctttagaacaatactaatcacatgagggtggtaggccattgcctgggctggacaggtgagtagagggcaggtgtgcaggtgcagaggtctttttttgtcctcattccatgcacgactgtttctcaaacttgctatgctaagatgctacaggaacttactttacgtcacaatatcattgaccttttttcttccttcctgtggcttcctcttcccccactctctcacctgtgtgccctattttggataaccctcctcctgggttcctttctcaccatctcctgctgtcaacatctcacctctatttcctggccggatgatgcctcctccaggaagcctgcctaggtttcctgttggcttgcaaactctatgtgggtgcgaactgtccacaccgcgtcaggtacgcaggggcccttgaagtatcacacgttggcagctcagccctgaaaacttcagctccagatacaacaaccccttccccttttctccaacctgataatttataactccagggtgactcggttcagcggcactgcagtccctcagctcttccttgcagcagccgtggtttccatgggatgtagagggttatcctgcttggaaagcattagagctgggggactagagaccccctaattctggcgtggggagaatggaggccccagaggaaatggagcaggtgttttagtggaaaagctggttttgaaattccagcctcgcctcagaacacagcatagcttccctagatgatgtttcttttgaaaggtctcctctgaaaagagtgtgaggattctggcaaacttgcaacaatctctgtaacgatgggatggctgtgtccccacccacatggcacctggaattgtaatgattcccacctgtgaagggtggggccaggtggaggaaattgaatcatgggcgcggtgacccgcatactgttctcgtggtagtgagtgtgttctcacgagatctgatgttttataaatggaagttcccctacaggagccattttgcctgccgccgtggaagatatggttttcgtcttccgtcgtgattgtgaggcctccccaaccccgtggaactgtgagtccattaaagctctttttctttataaattaccccgtctcgggtatgtctatcagcagcgtgagaatgaactaatacagatgcaaagtagagccgcggtttatgagccacaagaaataccaacccccagccaggcgcggtggctgacgcctgtaatcccagcactttgggaggccgagaccggcggatcacctgaggttaggggttcgagaccagcctcgccaacatgatgaaaccccgtctctctactaaaaatacaaaaaattagccgggcagggtggcgggtgcctgtaatcccagctactcgggaggctgaggcaggagcatcgcttgaacccgggaggcggaggttgcagtgagccgaggttgcgccattgcactccagcctgggcaacaagaggaaaactccgtctcaaaaaaaaaaaaacaaagaaggaaaagaaaagaaataccaacctctccctttcaaacctaaaaccccaacatgctggatgctctagggggtctctggggcttcgctgcttacgtttgcccttgttgggtcctgggtttttatactcaacgggatcctggaatttatgtttcatttgtgattcggttccaatttgacacaactgcctgccttcccccagcggttcgtgtgatagacacactcacgctgtcaatcatggagctgtggggcgcgtctgggagatctatagcaaaactccatccactccggttcccttgtataatacaaaagggttttatcagtcatgtatttcgcctcaaaactagaagcatggatttcccaacccgattcaccattaaaattgtgaatttttctggttctggtaaggatacgttgactgtataatggattacataacagtgtgttttcttcaccttagtaagtagccctgggagtttgtagcaaagaaagaagaaacccgagcctcaagaaaatttctccgacgatggtgcccagaacaggggtcaggggtcacgtgtgatgcgcgaaaattaaataagtgataattaagggaaaagaaaaactcagtgcctcattgcactaactgtctggcaagcgcccagtgtccagctgtggacagcacagttgtctggggcagggaagatatggactttcctgcagagagtgctactctgcagcagtgaggtacacctttcagggatgtcccatgatggtgacagagacaccagatacacaggtagcaacagtttcatttgaaaagatcattcccacagatgggagcttttgcaataagaggaggagggactactgtaatgggaggaggaggggctgtgataatgggaggaggaggggctgtgataatgggaggaggaggggcggtgataatgggaggaggagggactatggtaaggggaggagtgtggactatggtaacgggaggaggaaggactggtaacagaaggagggactctgctaatgggaggaggtactatggtaatggaaggagggactatggtaacagaaggacggactatggtaacggaggaggggctgtggtaacggggagggtctacggtaacgggaggaggagggtctatggtaacgaggagggactatagtaacgaaaggagggtctgtggtaacagaaggagggactatggtaatgtgagaaggggggactgtggtaacggagggtctatagtaatgggaggagggactatggtaacggaaggagggactatagtaacgggaggagggtctatggtaatggaggagggactatggtaacagaagtagaagggtctatggtaatggaggagggactatggtaatggggagggactacggtaacgggagaagggactgtggtaacggaggagggtctatggtaacggaaggagggactacggtaatggaggaggggggactatggtaatggcggggagggattatggtaataggggaggaactattgtaacaagaggaggagggactaatgcaaccactggtggacgctgcctatagcaccatgaagcacacccgagcagtgacatctgggagcctcttggagcgcaggcagcataccattttcttttctagggacaggcacgtgatgctcggaacaaccgtgattggggtcgttcgatgtggggttcagtcatggataaaagctgccaaaccctgtggctgcatagctaattttgagcaggtcctaaggaagcgttgcttgatcctctgacgtttgctccaggtgaggctggcccaacatcccggggcctgataggaggagagaaacccaaccaaaatgtgatcacgttagatgggaattttgttcaggtcaaggaagacgaggaattcagtccatccctgaaggggcaaataaagaatgtgaatttggaggatgtggccagccttgtcctaggctgacttggaagcatctgtgagtaatgaggaagggaattttttttttttttttttcagtaaaaccattttctggaagacaaaggcagtggggaattcttaaccttcacagattcccaacagcacagttgtgtggaatgatggactgattgtgtctccgtaaaatacaaagccctcagctgggcgcggtggctcagactgtcatcccagcactttgggatgccgaggcgggtggatcacctgaggtcaggactttgagaccagcctgaccaacatggtgaaaccccatctctactaaaactacaaaaattagccgggcatggtggcgggtkcctgtaatcccagctactggggaggctgaggcaggagaatcgcttgaacccaggaggcggaggttgcagtgagccgagattgcgccactgcactccagcctgggagacagagtgagactctgtttcaaaaaaaaagacgaactgggactcctcaaactgggggaatggtgcatttgtagacaaaactcatggtgtgccatctgcaggtgtcattgtcaggaaggtgagcttggttcatctgtgcccacttgcaagctctttggagagtgaggagcaggttgggaagcatctatcctcagtcatgaacccggagctcctgctggaaaagacagccttggggtctctgtcatgcacatttcagtaggggagtccgggccgggcacaggggctcatgcctgtaatcccagcactttggaaggctaaggcgggcagatcacttgatgtcaggagtttgagaccagcctgaccaacatggtgaaacccgtctctactaaaatacaaaaaatagctggggctgggtgctgtggcttaggcctgtaatcccagcacttggggaggccgaagtgggtggattacttgaggtcaggtgttcgagaccagcctggccaacatggtgaaaccccgtctctactaaaaatagaaaaaattagccccggctaattttggtggtgtgagcctgtagtcccagctacttaggaggctgaggcaggggaatcgtttgaacctgggagatggaggttgcagtgagctgagatcgtgccactgcactscagcctgggtgacagggcgagactctgtctccaaaaagaaaaacaaacaaaaaaaaacaaaaactaaacacataggagagtcccttagcccctcacgaatactccacacacacatctagtccagctgcatcttgttgactcacaagacatcaagataagcctgattcaatgaagttcttcaaaatcagagttcatttgctcattttcttttcttctctccaccaattagtggtgagagtttcgcctgaatcacagtacctgctgtctccagttctgatgttggtatcacccatcttcagacaagatttcttgtgttatttccacatcagcttagccactgtctctcaacatgaaatgctggctggggggaagtttcaaccgcagaagcaaagctcttaaactcattgaaaagacaagctctttcccccttggtagggtcacgaaggctcctcagtgaagggtgtggtaggtttgcttctatagggtagaaatgagacaccctgaaaatcaggaggctttcattggcttttaatttacacagaaggcaatgtgtagtttcaaaatattcttttttatttacttatttacttttatttatttatttgagatggagtcttgctctttcgcccaggctggagtgcagtggtgcgatctcggctcactgcaagctccacctcccgggttatttatttttttgagacagagtcttgttctgttgcccaggctggagttcagtggcacaatcttggctcactgcaacctccgcctcccaggttcaagtgattctcctgcctcagcctcctgagtagctgggattacaggcacctgtcaccatgcctggctaatttttgtatttttagtagagacggggttttgacatgttggccaggctggtcttgaactcctgacctcaagtgatccgccctccttggcctcccaaactgctgggattacaggcgtgagcttccgcgcctggcctcaaaatattcttaatgagtaaatacccgtaagcatttgaatacaaccatttatgttttttgttgtttagcaattgtttgaacttcaatgtgcctcataaaaatgtttcattataaaacatttcacacatttgaaagacgcagagaataatttgaacagcatttgtgtacccaccatccagttgtatcaaatcgtaatgttttgccaaattagttataaattacgtatgtgacttgggtacccctctccaattattttgttattacataaaaaatgactttataacatgggtcaataggagaccttttttcttttttttttttttgagacagagtcttattctgttgcccaggctggagttcagtgccacaatcttggctcactgcaacctctgcctcccaggttcaagtgattctcctgcctcagcctcctgagtagctgggattacaggcacacggcaccacgcccggctaatttttgtatttttagtagagatggggttttgacatgttggccaggctggtcttgaactcctgacctcaagtgatccaccctcctcggcctcccaaagtgctgggattacaggtgtgagcctccgtgcctggcctcaaaatattcttaatgagtaaatacccgtaagcatttgaatacaaccatttatctttttcattgtttagcagttgtttgaacttcaatgtgccttctaaaaatgtttcattataaaacatttcacacatttgaaagacgcagagaataatttgaacagcatttgtgtacccaccatccagttgtatcaaatcataatgttttgctaaattagttataaattatgtatgtgtctttgtgtgcctgagtgtacatgaaataagacatttcagagactattgtgctcttgggtacgcctctccaattattttgttattacataaaaaatgactttataacttaggtcaataggagacatttaaaatattattttccatgcatctttgtccttgtttattttctctagaaaagaaaaatgtatttccctgttcttattttcaattcccaaatgaagcttcaatgtaaaactaattttctgagaatgtagcatcgttcttttttttttttcttttttctttttttttttgagacagtcttgctctatctcccaggctggagtgcagtggcacaagcttggctcactgcatcctctgcctcccaggttcaagcgattctcttgcctcagcctcctgagttgctgggattacaggcacctaccaccacgcgtggctaatttttgtatttttagtagagacgggatttcaccatgttggtcaggctggtcttgaactcctgactttgtgatccgcccacctcagcctcccaaagtgctgggattataggtgtgagccactgcgcccggctagcatctctctgtatttgctgaagccatgtgtgctgtgaagattgtagttttagccattgtggttcctcttgaaagggggccctatatcttcctgatggggaatggcttaactgaagcctggggaatggctggtgttcgtgaaatggctgcattcagatgagaaaccgcacatacacatcctcacaaagtctcagagtcagctttccagggggctgggttttattccggtgcaaaggagtgagaatattgtacacacgaatgatccatggtggctcctgcctgtaatcccagcacttttgggaggccaaggcgggagcatcacttgagcccaggaatttgagactagcctgggcaacatagcaagatctcgtctttacaggaaaaaaaaaaaaaattatccgggtatgatggcatatgcttctggtctccctctcaagatgctgaggcaggaggattgcttgagcccaggaggtggaggctgcagtgagctgtgactgctccactgctcttcagcctggctgatggaatgagacagtgtcacagaaaaagaatgagaaaaataagcccaggatgcagcaaagaatgctatcctttatttattaaccccctaccctggttgtatattgatggtcatttaaatattagagggtataaaaatacaatttccaagaattacctgaactattttctttttcttttcttttctttttttttttgagactgagtttcgctcttgttgcccaggctggagtgcagtggcgtggtctcggctcaccgtagcctccacctctgggttcaagtaattcttctgtgtcagcctcccgagtagctgggattacagccatgcccaaccactcctggctagttttgtatttttagtagagatgggggttacttaagggttggccaggctggtctcaaattcctgacctcagatgatccacctgcctcggcctcccaaagtgctgggattaaaggtgtgtgccaccacacccggcctattttcttagaattaatattttatcctctgccatcagccgtcgtaggggtatgagcagtttcctgcctattgtaagggtttagagaagggtttgtgataaattggccgtgtggtgaagagattcccattcgggaaagacattgggcagagggtaggatgtcatgtgaagacagcattcatttcaggcagggagagggggttcatagaacgctagtgttcagtgaactgttcctagaactagttcatatgtatacatgtgccatggtggtttgctacacctatcaacccgtcatctaggttttaagcccagcatgcattaggtatttgtcctaatgctctccctccccttgccccccacctcccgacaggccccggtgttcacagagctctagtatccacccaaggctcaccaaaggcagtcaccctttgctatggtggagtatcctgggagccataggtatccctgagctacctcaggttaaagactgcatacctgtgaaagcatgtgaggatttacccatttctgtgtattttgaggaaatctcacttccatcttcagagcttggtagccccaaggtaaaattttaagaagtaaagagattgtaagtttgcatattctgggaggtgatatgaggacaagctcttaggatgaactctctaggcatacaggagaaagaagtaaaggtcaaagcaaagtggcatcaaaaaggccaaaacctggccaggcacggtggctcacacctgtaatcccagcactttgggaggccgagatgggtggatcatttgtggtcaggagttcgagaccagcctggccaacatggtgaaaccctgcctctactaaaaatacaaaaatcagccaggcgtggtggtggctgcctgtagtcacagctaccagggaggctgaggcaggagaatttatttaagttccttgtagattctggacattagacctttgtcagatgaatagattgcaaaaattttctcccattctgtaggttacctgtttgctctgatgatagtttcttttgctgtgcagaagctctttagtttaatgagatctcatttgtcaatttttgaggcaggcattgttattaccccaatttcataaatgaggaaatgacagacagatagatagatagatagatatgccagttgtccctgaggaggcgaaattttgctcagttgaaaaccactgtgatatagatagatgatggatacatagatagatattagttagacagaaaatagctagatagataatagctagatagatagtaatggtcaatgatagattgtgatcaatgataggtaatagatgacaggtagataaatgatcgatggtcaatagatgataggtagatgatagacagtagatagagagtaaacagatgctatataatgatcaaagatagataaatgatagataaatatgtacttgatagataataaatggtaaatagataaatgatggtagataagtagatgatagatgataaatggtaaatagataaatgatggtagatagataagtagatgcttgattgtaaatggtaaatagataaatgatagacggtagataagtaggtgataggtggtaaataggtcgatagatattctataaatagttgatagataaatggtaggtgatagatgataggaagtgagttggatgataggcacacagacaaatggatcacatatgcatacaatctgtcatgctaaggcaggctttgtcaaccttggcagtatgtccatctggagctggatgattctctgtggtgaggccatgctgtggactgtagcgtgttgagcaggatccctgggctccacccacttgacatggatgtacccactataccccccaccacagttataacaaccaaaaatacctccagacatttctatatgttcctgggggagggggaaacaaaaaggcctccaatggaaaaccactgatgtagatccctacagatgccagcccagttctgtggggatgtgcctactaccattcaatggcagtaacctggacctaagaccagtatgctctctgaggctctggaaagggactcccagcctcgcatcttgaggagagcttagacatcctacgtagcattatgattcccctccaaacatggctgtgctgtgtggatcaggggtctcctcccttatctcctccatcccacccagccgtctcctttcacctcagtccctgtgtgttgagtgtggaaatatctctgtgcccaggatcctgggccggttttgtggcggggattcttctcccacagctccatcatgcatgttccctcatctccttcgatgctgatgtgttattattcgtagaacagtgatgaaatggcagcatgataccatagaacggtgataaaatggcagcatgatatcatagaacggtgataaaatggaagcatgataccatagaacggtgataaaatggaggcatgataccatagaacggtgataaaatggcggcatgatatcatagaacggtgataaaatggcggcatgataccatagaacggtgataaaatggaggcatgataccatagaacggtgataaaatggcggcatgataccatagaacggtgataaaatggcggcatgataccatagaacggtgataaaatggcggcatgatctcaagggttgggattagacacccagaaatgggagcacctgtggttgggtggagttattgatccatccttctccagtgttcaactcctccacctatgctcatatcacttataaggcagacctggccaggcatggtggcttatgccggcaatcctagcactttgggaggctgtggtgggcggatcacgaggtcaggatttcgaggccagtctggccaacatggtgaaaccccatctctactaaaaatacaaaaattagtggcatatggtggtgggcgcctgtaatcccagctacttgggaggctgaggcagaagaattgcttgaacccgggaggcggaggttgcagtgagccaagatcacaccactgcattccaacctggtcaacagagtgagactctgtgtttcaaaaacaaacaaacaaaaacaaggtagaccttatgggtctttccctgggagccttctacagagtggttgttgctacagacagcagtgatatgagacaaaccatctaaggccctgaaatatgagtcttgaaaatggctgtggacaaggaaaatcaatgaaataacagtgacaccagcaccccactctctctagggctcttaaaagttcttagcctgtagcctcttttccaatccactccagccttccttttctttgaatttgaaaatgaactttgaaatttctttcagtgacaagaaaatgtcactgtgttacgtgttgtatatccatgtgtctccttgggaagaaaattaaaggactaattgaagaaagaattagaaacactgaatccacagaaacgcagccacactctgtaattaatttttgaagaaaagaaaatgaaatgcttgccgatggtgaacctctccagcatgttcattagatatttgcattttctgcctattccattaaaagtacctctaatcagacagtcaatcaaaagtgcttatccagacatcttctttttagaatttgaatcatgccatgttctgtataggagtgagaccttaccacataaacagggtagggcttgctgtgtgctcagaaacgacacattaaccaggctgaactgatggaactccagctctctgtatccttctttgtccctctaatacttgggcagattctgccccaccattaaaaattcaatcattaataccaagaagaaaattgaggggtttcaaagaacctcaataaaccacagatttaggtctttataagaccttggtaagcagttgtggattctatagtttgtacctaccataagttatgatgatcattatagcattactgatarcattttaaaaacttttattgagctgggtgcggtagctcacacctgtaatccyggcactttgggaggctgaggcaggtgtatcacgaagtcaggagtttgagactagcctgaccaacatggtgaaatcccatctctactaaaaatacaaaaattgggtgtggtggtgggcgcctgtagtcccagctactcaggaggctgaggcaggagaatcgcttgaacccgggaggtggaggttgcagtgagccgagatcgcaccactgcactccagcctggcgacagagtgaaaactccatctcacaaacaaacttttatgataatgtgtatggaaagtgtctcctcttgaaatgttccattttctctaaccaaagccaatgctccagccagccagtaggtagcagccagtaggagctgtcagaactgattgctcttatcatcactaaacacacaaagagggaaaagccatttcctcattccccaaatnnnnnnnnnnnnnnnnnnnnnnnnnnnnnnnnnnnnnnnnnnnnnnnnnnnnnnnnnnnnnnnnnnnnnnnnnnnnnnnnnnnnnnnnnnnnnnnatttctcgctccggatatgtatttggtgtttagtcattcaaccgtgacatatctaacgttggcagagagggggcagaattggaagttcttgccattccaggaagaggaagccatgttccctgtctaagcatctgcccacatcgggccgtgtctcggtaccaactccaccaagagagcagtgagtgacaaaggcaaggatgttcttaccaaacttggcgataacctggctccattaccatcctagattaataacccttcagtcattccagaggtggatgttgatacccaagaaatggtgggtgatgtgtatttttttgttgttgttgttgaaacagagtctcactctgttgcccaggctggagtgcagtggcgcgatcttggctcactgcaatctccgcctcccgggttcaagcgattctcctgcctcagcctcccaagtagctgggattacaggcacgcaccaccacacctggctcatttttgtatttttagtagagacagggtttcaccatgttggtcaggctggtcttgaactcctgccctcgtgatccgcccaccttggcctcccaaagtgctgggattacaggcgtgagccaccaygcctggccccattataaccctcttgcatagtctatccttcactcttgcgaaatgtttaatgagatgttgaataaatgttaatatgctttgtatctttttttttgcttctatgtcacttttctttttgctgtgggtggcaatggtgagttcttttgcactcagggaagcttcatgcctcatcaccccaaccttctggaaattttgattcttatagttcaaacttccataatttttaaaaaccatttttaagttcagggatacaggtgcaggtttgttacataggtaaactcgtgtcatgggggtttgttgtatgattatttcatcacccaggtattaagcccagtacccattagttattttcctgatcctgtccctcctcccaccttctgataggcctcaatgaatgctattcccctctctgtgtccatatgttctcatcatttagctctcacttataagtgagaacatgtagtaatttggttttgctgttcctacatagtttgctgaggataatcgcctccagctccatccatgtttctgcaaaggacatgatcttgttcttatttatggctgcatagtattccatggtgtctatgtaccatattttctttttctttctttctttttttttgatatggagtctcgctgtgtcacccaggctgctggagtgcagtacccttgaaaattcctctgcctcagctcactgcacccttgaaaattcctctgcctcagcctcccaagtagctgggattacaggtgcacgcccccacgcccagctaatttttttgtatttttagtagagacggggtttcaccatgtgttggccagactggtctcgaactcctgacctcgcgatccacctgccttggcctcccaaagtgctggaattacagacgtgagccaccgcacctggcctatgtaccatattttctttattctgtctaccactgatgggcattcagattgatcccatgtctttgctattgtgaaaggtgctgccacgaacatacacgtgcatgtgtctttatgacagaatgattgatgttcctttgggtatatacccaggcatgggattgctgagtggaatgatatttctgtttttaggtctttgaggaatggccacactgtcttacacaatgttggaactaatttacactcccgccaacagtgtttaggtgttcctttttgtctgccaccttgccagcatctgttgttttttgatgttttagtaatagcctttatgactggtgtgagatggtatctcattctggttttgatttgcgtgtctctaatgagcagtgatgttgaatgtttttgcataggcttgtcggctggatgtatgtcttttttttttttttttccgagacagagtctcactctgtcgcccaggctggagtgcggtggcgcgatctcggctcactgcaacctctgctccccgggttcacgccattctcctgcctcagcctcgcaagtagctttggtttttgactttagttacatgcactttttcagaaatcaaggtatgcataagcaaagcacatctgtctttccaaactggatttaaattcgccatttactaactaaggaatattgtgcaatttagttaacttctctaagcctcattttcctcgtctatgaaatgggaagaatagtaagatctacctcaaaagaatgttgtaaaggttaaacaaggtaatcaaattgtttagtaatatgcctcccacatatcaagccctcaaccccgccaccatgcctggctaattttttttgtattcttagtagaggcagggtttcaccgtgttagccaggatggtcttgatctcctgaccttgtgatccacccgcctcggcctcccaaagtgctgggatgacaggtgtgagccaccgcgcccggccagctgcatgtatatcttcttttgaaaagtgtctgttcatgtcctttgcctgacgtggcaaagggtgtgctttcaatgggattttttttgtttttatttttgttttgttttgtaaatttgtttaagttccttataaattctggatattaaacctttatcagatgcatagttggcagatactttctctcattctgtaggttgtctgttcacgctgttgatagtttcctgggctgtgcagaagctctttgaaactttcgtaactttaaaccaagtgttagctaactccgtttctcaactgagtaacttcagaaattaaattagaacaacaggttctgccttttgaagacaaagtagcataaccctagccatccaccacatgctatcacttgattctgattgctgttttgaggattctttttgtcccaatctctaattagttttttaaaataagygttttgtagagaggatgtttttctcaagagttaccctgttttgactatggtagccacaccccagtgatgtacatgtgtttctctattttccatttcataaccaccrttatgtaggtgaatccttgatctgacacacagtgcctgtctttccctatgaatggcttagtgatttgcctggaaatcttagcttgctgtagtgtgtgtgtgtgtctgggcacannnnnnnnnnnnnnnnnnnnnnnnnnnnnnnnnnnnnnnnnnnnnnnnnnnnnnnnnnnnnnnnnnnnnnnnnnnnnnnnnnnnnnnnnnnnnnnnnnnnnnnnnnnnnnnnnnnnnnnnnnnnnnnnnnnnnnnnnnnnnnnnnnnnnnnnnnnnnnnnnnnnnnnnnnnnnnnnnnnnnnnnnnnnnnnnnnnnnnnnnnnnnnnnnnnnnnnnnnnnnnnnnnnnnnnnnnnnnnnnnnnnnnnnnnnnnnnnnnnnnnnnnnnnnnnnnnnnnnnnnnnnnnnnnnnnnnnnnnnnnnnnnnnnnnnnnnnnnnnnnnnnnnnnnnnnnnnnnnnnnnnnnnnnnnnnnnnnnnnnnnnnnnnnnnnnnnnnnnnnnnnnnnnnnnnnnnnnnnnnnnnnnnnnnnnnnnnnnnnnnnnnnnnnnnnnnnnnnnnnnnnnnnnnnnnnnnnnnnnnnnnnnnnnnnnnnnnnnnnnnnnnnnnnnnnnnnnnnnnnnnnnnnnnnnnnnnnnnnnnnnnnnnnnnnnnnnnnnnnnnnnnnnnnnnnnnnnnnnnnnnnnnnnnnnnnnnnnnnnnnnnnnnnnnnnnnnnnnnnnnnntgtgtgtgtgtctgggcacagttttagacaaacaagcaatgattcttttttttttttttttaatttcctgagtcccaaagtgtttgagacaaatctcgttttcccatatcgggtctagggttatttgttcagatcctttgtcattcaggactctgtagctctttctttattccttactgaaatctcacattgacgaagagctctttccacctgatttgcttttccattggcagatgtcctttttgttcctcccttgatgcttttaggattttctcttgatctttaaagctccacggtttcatcaggatgaggttgatggacatatgggcatttaaaaataaatcgtatggcttactatacatcttataatggcagatctgggtttttatctcagggattttttttttctttgcacgaaacctttccatttacaattgacccttgaaaaacatgggggttagggacaccaacccctcacacagtcaaaaatccatgtgtaactttttttttctttttcgagacagagtttcactgttactgcccaggccagagtgcaatggtgtgatcttagctcactgcaatctccgcctcctgggttcaagcgattctcctgcctcagcctcctgagtagctggcattacaggcgcacgccaccatgcctggctaatttttgtattttcagtagagacggggttttaccatcttggtcaggctggtcttgaacttgtgacctcaggtgatccacccactttggcctcccaaagtgctgggattacagatgtgagcccctacgcctggcccatgtgcaccttttgattctccaaaaacttaattattaatagcctactgtttacaggaacccttgccaataacataaacaggtgattcactcattcatattttctatgttctatgtattgcatactttatgcttagactaaagtaagctagagaaaagaaaacgttaccaagagaatcatgagaaagagaaactacatttactattcatcaaatggaaagggatcatccccgaggtcttcatcctcatcatcttcacatggaggaggctgaggaggagaaggaggaagagggaggttggtctggctttctcaggggtggcagaggcagaagaaaatccacatataactgacctgtacagtccaaacctgtgaaggatcaactatgtttctgtgtctctttctcccagttcttgtcttcagagataccaacattggatgttgcctctcaactggtttccttctctttcatgttcttttctccaatcacttcatgtcatcatctttttcttctacattctacacgcttccacaagcctgccctctgcacccctggcatgattctccacattcattttttttctttttttgagacagagtcttgctttgtcacccaggctggagtgcagtggcacgatcacggctcactgcaacctctgcctcctgggttgaagcaattctcctgcctcagcctcgtgagtagctgggattacaggtgcccaccaccacacccagctgtattttgtatttttagtatgacagtgtttcaccatgttggcctgcctggtctcgaactcccgacttcagttgatctgcctgcctcggcctcccaaagtgctgggattacaggtgcacaccaccagacccggctaattattgtatttttttttttttttttttgagacggagtctcgcacttgttgcccagggtggagtgcaatggtgcaatctcggctcactgcaaactccacctcctgggttcaagtgattctcctgccttagcctcccgagtagctggaactacatatacctgccaccacacctggctacattttgtatttttagtagagatggggttttaccatgttggcctgggtggtctcaaactcccgactttagatgatctgcccacctcaacctcccaaagtactgggattacagggtgagccagcatacccagctgagtctcctcattcttgattttgatcttccctctgtctactattgtccgggcttctctaggatgtgatgttatatctcctactcgtttccggcacccttcttattatgttaccgcattaacccttttgttaaacgtttaatatttttgtgctctgaatttattattttttatctgatatgaatatattaggttggtgcaaaagtaattgctgtttttgccattaaaagtaatgatagtccttttttttttttttttttttttagatggggtctcgctcttgtcacccaggcaggagtgcagtggcaccatcttggttcactgcaaccttagcctcccaggctgaagacatcgtcccacctcagcctcccgagtagctgggactacaggcatgcgccacaacgcatagctaatttttgtattttttgtagaaacaggctctcactatgttgctcaggctagtctcaaactcctgagctcaagcaatccgtcctccttggcttcgcaaaatgcagggattccaggtgcgagccattgtgcccggcctgataatattttgactctgactttcttttcgtttctatttacctttaaatctcttttatgttccacctgaattactcctctgtgggtatcttttataggctgtatatttgtgttttccttccaacctatttcttgctataattgagatagtgaaggattagtggtctcaggtccttctgcctcgccccacataaatcttcatttcaactgatgctcttcatttcttttttatggaatattactttcctgttttttgtgtttgcctgtttttcccatgagtcccaagatggatattttccctccatacgggcatttattttaatgcccagtcttcacccctggaggatgcgtgagttggttcttttttcctccttgccccgtggacctcagacatggacacacgtgtctgtggttttgagggctttgttttatccgttcagttcttcagctgcttaagatggacggacagaggccgagcgcagtggcttacacctgtagtcccagcactttgggaggctgaggcgggcagaccacaaggtcaggagttcgagaccagcctggccaatatggggaaaccccatctctactaaaaatacaaaagttagccaggcgtggtggtgggtgcctgtggtcccagctattcgggaggctgaggcaggagaatggtgtgaacccgggagacagaggttccagtgagccgagattgcgccactgcactccagcctggctgacagagcgagattccatctcaaaaacaaaaacaaaaaagatggatgggcagggagtggaggctgtgggtagtgattgctgtccatgacccctgtctgtgagcacctgctctctaagctgagggaatccctggtgtcatcccagcagtggcgtgttccatgctgctgtaggccaggaacatggtgcagccgaagtggacggccatccagtgatgacttggccccagtggacagctgcccagtgatgggacatctggagtagatggccgtccaacaacagttcattattgttgtgctacgtctggtgtttccagtggctggaaccactagagctccgctccattgggttggagccattccagggtgggaatggccaccaggagacgatgcctacccttctcttcttgcaccaagtcagcacccatactcaggcgaggccctgtgtctcctcctcctccccagcatagtcttgctggagtcatgtagaaaagtcatggaaaggggcttgtgaagggatacgctgccttcttcctgggctctcctggtatcccactggtactcagtcattctccttccaaactgaggtgtgtgcatacatataatttgctggcccttaaaaaccacgtgtaggcctggctcctgtaatcccagcaatttgggaggccaaggcaggaggatcacctgaggtcaggagttcgagaccagcctgaccaacgtggagagaccccatctctactaaaaaaaacaaaattagctgggtgtggtggtgcatgcctgtagtcccacctactcagggggctgaggcaggagaatcgcttgaacccgggaggcggagattgaggtgagccgagatcgcgccattgcactccagcctgggcaacaagagtgaaactccatctcaaaaaaaaaaaaaaaaaaatgcaatcagctataatccttccctaaactactggtgtgactgtyttctgactccttcaactattacccaaaagatgaatgacttcttagtgaccctttgtcctaggaattatttcataggcttctgtagcaaatggaaccttgggtctcactaggataataagcatgttctgaattcctggacgcttttttctttttttcctgcacaacttcatttcggggtaaatgaggacagcacctgagttccccactcccctttggattctctagggggttgaaggtttcttctactgacatacacatggcttcaggaagatggtgttggaccctttttctttttttgagacagggtctggctctgtcgcccaggctgaagtgtaatagtgcagtcttggctcactgcaatttctgcctccgggctcaagcaatcttcccacctcagtctctcgagtagctacgactgtaggcacgtgctaccatgccctgctaatatttgtatttttttttgtaaagatgaggttttgccatttgtcccaggctggtctcaaactcccgagctcaagccatcttgcctgccatggcttcccaaagttctgggactacaggcaggagccactgcgtccagcctggttttggactcttggtcttgggtttggccaaaactttggtggttcagatggactcttgtagattttaaggagaattgaagttttgtggcttaagctgaactgctgttctcaatgcccgtgctggtccgaatgcccatgctggtccctatagcccttcatctactgtggctggtcttgtaggtctgttttatttgctgtaggagcctttgcctgtgcttgtagctatcaccgtagcattcaacacacctctgctgtatcccctgaagacgccgaaacgtggtattctcaccccaaagagtttccaccctgataagttccagcaaggcagcccagcagctacgcctgcagacacttgttggtaggaagaagtgtcagatgatctgtaacactgtgcgttgatcctgcatgtctgaagaacttcacagaattgtcgcatggtgagcagtgatactaagcaaagctgagtcacccgtaagctcccaggccctcagcccggcaagtaggacggtattttcacacctctgttgatgaagcacctcagatagctcaagtttttggagacagcctcgtaggagttttagtttaaccataatctgcttgcggatcactgatgtttccatgagtcattccctgagattgtagtgaagaaaacagatactatcccattcgcttctttgcaaaatacccacaaagccacatgcattttcatactgaacatcttgggataccatttattttcctgcaggattatatcatagtttagggttgagtgtgcctccaggagtcatcagctaagcttcctgttttgtggatagagaatacgggaggacatctgatcccctatgactgccagcatcaggcctgggattgtggtcgtccaatggtgcttttagggggcaaaaatgcacagctgtttattgaaacaacaaatgttccaggcygggcacggtgactcacgcctgtaaccccagcactttgggaggccgaggcgggtggatcacctgaggtcaggagtttgagaccagcctggctgttatggtggaaccctgtctctactaaaaatacaaaaattagccgggtgtagtgttgggcatctgtaattccagctactcaggaggctgaggctggagaatcgcttgaatcgaggaggtggaggttgcagtgagttgggattgcgccactgcactccagcctgggcgacagagtaagggcagggagggctctcagtctggtagtctcacccaggtggtccagggttccagcactgagagccaggatgccaactcccaatgcatcatcagcctcctcttcagccatgcaggaagtcagggctggtcccagtggttaatccagacaccagagtgcatagcatggccctccccatgtccagcacactggcctttcactgtaccatgtcctctttctcccattgggtggcctgtgttgctttctcaatctccaagtctgtgtcagcaaggaagtgttccatcctttactgagtcatgacctgtctgaggctgacaagtgccagagctcatgttattcaggcatatttataagcaggtgtttttatttaaagacttagtccacatattacaagtattctgatggactcatcaaagcagatagggaaagttggccagtctcattttgaatgttacgatgtagccgaacatttacaaaactgtctttgactttctttctttttaattttactctaagttctgggatacatgtgcagaacgtgcaggttcgttacataggtgtgcgtgtgccatggtggtttgctgcgcctatcaaccaatcttctacgttttaagccctgcatgcattaagtatttgccctaatgccctccctccccttgcccccagctccctgacaggccccagtgtgtgatgttcccttccctgtgtccatgtgttctcattgttcaactcccacttatgagtgaaaacaggcagtgtttggttttctgttcctctgttagtttgctgagaataacagtttccagcttcatccatgtccctgcagaggagatgaactcatccttttttatggctgcgtagtattccatagtgtctacatacyacattttctttatccagtcttatcattgatggacatttgggttggttccaagtctttgctgttataaatagtattgcaataaacatacgtgttgaaatttttattttatcacggtcaaacgcttaccatgagagccaccctcttgacaaagtgttacatgtataatacggtcttgttaactctaggcacaactgctgtggtgtgcacagttgtacccagactgcagaactgattcatgttatataccaaaaccttatacttgtggaacagcatctccctacgtccctctctcctcatcttctgaaaaccatcattctactgtctgcttctgtgaatttgactattttagattctacatgtcagtgacatcatgcggtatttgtctctctgtgtctggtgtatttcacgttaacatcccccaggttcatccatgttgtggcaaatgacagaattcccttctttttaaggctgcgtggtattccattgtctgtatgtactgcattttctttctttttttgagatggagtcttgctctgtcacccaggctgcagtgcagtggcgtgatctcggctcactgcaacctccgcctcccaagttcaaatgattctcctgcctcagcctctggagtagctgagattacaggcacccgccaccatgcccggctaatttttgtacttcttagtagagacggtgtttccccatgttggccaggctggtctcaaactcctaactaactgcaagtgatctgcctgcctcagcctcccaaagtgctgggataccaggcgtgggccactgcacctggccaattacgttctttttttattttttttcttgagacagagtctctgttgcccaggctggagtgcagtggcgcgatctcggcttactgcaagctccacctcccaggttcacgccattctcctgcttcagcctcctgagtagctgggactgcaggtgcctgccaccacgcctggctaatttttttgtatttttagtggaaacggggtttcaccctgttagccaggatggtctcgatctgacctcgtgatctgcccgcctcggcctcccaaagtgctgggattacaggcgtgagccaccttgctcagcccaattaccttccgtttaaggctgtaaagtatcccattgtgtgtatttacagcattttctttatttctttctttgagactgagtgtcactctgtcgcccagtctggagtgcagtggcgtgatctcagctcactgcaacctccgcctcccaagttcaagtgattctcttgcctcagcctcccaagtagctgagattacaggtgcctgccaccatgcccggctaatttttgtacttcttagtggagatggggtttcaccatgttggctgggctggtctcaaactcctaactaactgcaagtgatccacccgcctcagtctcccaaggtgctgggattccaggcaccgcgcctggcccaactaccttcttttgaaggctgcatagtatcccattgtgtgcgtgtaccgcattttcttttttttttgtttgagacggagtgtcagtctgtcgccaggcctgagccaccgcacccagctgtaccgcattttcttcatccattcatctactgaacgcttgggttcattccatatcttggtgattgtgaatactgctgccataaacatgggggtgcaaatgtctctcatagaccgatttatcttttggataaatacctagaagcatgcttgctgcatcatcgagtagttctatttttaatttttttgaggaacgtccgtaccatttactgtattcacccatttctgcaggaaacagtggcagaggaacacaagttttcttcttccctgtcccagctgtgcaaaaagagacccacagccgggcgcggtggctcatgcttgtaatcccagcactttgggaggctgaggcaagcggagcacctgaggtcaggagtttgagaccagcttggccaacgtggtgaaatgtcgtctctactaaaaatacaaaaattagctgagtgtggtcgtgggtgcctgaaatcccagttacgtgggaggctgaggagggagaataccttgaacctgggaggcggaggttgccgtgagccgagatcgtgccactgcactccagcctgggcaacaggctctctcaacaaaacaaaataaaaaaaaaaaaaataaaaataagagacccacaagggctttggacctcctttctttgcaaaacaagaaaataatatagcagacattgggcagtttttcattctgactttccagtttcatttttgcttcttcctgtatggttgctgcctggacctctttcttattgctgggaggtctttcccctgcccccatccttttgagcctttctatctacttttcttttgaaagaaagtaaataaaaccccacacatccagacaataggagcacacgcctcagaattctggctgcgagggactgaccccatccagagagaacgaacaaatgcatcaaaaccctggctgcaagcgactgaccccagcttgatccacttaagccagaagagcctttgcttctatgtttaatctgcaccaagcttagtgatcactttcttctcagaggccagaacacagagtccaacctttccaggatgccagcttcctatctctggggtctcctcttcctgcagagaagctttagtctcttacccgagctgcttctctattctcttttgccttgctttgcctataatactaacacactgtctttttcttatgttacgttggactatcccaaggcagggacccaattggcctggcttgggttccctgcctgactgtgggtttggctgaggagtgggcagcaatttccagccgttggcactgccagaacgcatgggtgtatggggtttctggaggcagcagctctatagtgaagcagatatgtagggggtgttcattaccaagacagcagtgattgtccacgagcagggtggttccaacagggagcctacagtctaactgcagatggatgctaccattttacatgtcccatgtatgacatccatgtaccgtatgttgctggacaccgcattatggcaactgaaaaacaaaaaggcattaaatgcctgggaaaatgtacagctcattacatctcatatggtttggctctgtccccactcaaatcttatttatttatttagagacagagtctcgctcactcaggctggagtgccgtggcatgatctcggctcactacagcctccacctcctgggttccagcgattctcctgcctcagccttttaattagctgggattacaggtgcccgccaccatgcacggctaatttttgtgtttttactagagacgggcttttgccaaattggccaagctggtcttgaactcctgagctcaggtgatccacctgcgttggcctcccaaagtgctgggattacaggcgtgagccaccgcgcccggccccaaatctcatcttgtattcccacctgttgtgggagggacccagtgggaggtaaccgaatcatgggggcaggtctttgccctgctgttctcatgatagtgagtaagttttatgagatctgatggttattataaaggggagtttcctgcacatgctctcttctcttgtctgtcacaatgtgagacgtgcctttcaccttttgctttccaccatgattgtgaggcttccccagccacgtggaactgtaagtccagttaaacctttcttttctaaattgcccattctcagatatgtctttatctacagcatgaaaacatacttatactttatttatccatccttatctatatcaaatactatttgaccatagattgtgtaaagacaatatggcacagagacaccatggaatactatgcagccataaaaaagaatgagttcatgtcctttgcagggacatggatgaagctggaaaccatcattctcagcaaactatcacaaggacagaaaaccaaacacctcatgttctcactcataagtgggagttgaacaatgagaacacatggacacagggaggggaacatcacacactggggcctgtcggggagtaggggactgggggagggatagcattaggagaaatacctaatgtagatgacgggttgataggtgcagcaaaccaccatggcacatggatacctatgtaacctgcatgttctgcacatgtaccccaggacttaaagtattaaacaacaacaacaacaaaaaaaaaaaaaccagactcatacaacatccctacaaacaggaaaaatggggaggggaacatgggagtcaccttgtagtttacttagatttgctgtgagaagaagctatgggaggctttccaaaggctgcgggaaggatttgggctatcttcaggagattgagcttgacagcagcttcaaggcgccttgtgggaggggaggctgggggcaggaaaatcaggtgggtgaaaaatacactgatttgcagagaaatggtgccagcctggactgtgaaaacagagacgagaaaaaccacactcggcaatatttgagcacgtattaaatcctggatggcacattgcatttttatggatgtcattcctaagagattcacagtcaggggaagatggtacataacaactcaggggcatgtcagatgcacctctgtagctgcgtgtccagatgccatggagtgagatgcctggttttgctcatagagttagaaacattatcagaaaatacatgtatttgagttaaattttagagagtgagtagaaattcatcgggtctacaaggaggcaaagagctttcctggatgaaattcctccttggcgttcacctaaaacttactaatttcttacagaacaaggataccacgggaggtgggtgccgcagaaccagggaactgtgtgtctgagtcaagatactgcagagaaatagaaccaatatgatgtgtgtactgatagaaagcacatttattttaaggaattttgctcatatggtgatggaggctggcaagtctcaagatgtatggggtagaccagccagctggagacccagggaggagctgatgatgtagttggagtccaaagtccatctgttggcagaatcccttctggctcaggtaacattagtcttctgttctagtcagaccttcaactgattggaccaggcccacccaccataggaaggacaaattgctttactcaaagtgtactgatttagattttttttttttttttttgagacagagtttcactcttgttgcccaggctggggtacgatgcgatctcggtgcgatctyggctcaatgcaacttctatctcccaggtttgagcaattcttctgcctcatcctcccgagtagttgtgattataggcacacaccaccacgcccagctaatttatttttatttttttggtagagacaaggtttcaccatgttggccaggctgatctcaaactcctgacctcagatgatccacctgcctcagctgcccaaagtgctgggattataggtgtgagccactgcacccagcccagtcttttgttctattatgaccttcaactgattagaccaggcctacccaccaattcctttactcaaagtctcctgatttcgatatttatctcatttaaagcaacctcaaagaaacacccagaagaacatttaatcacatatgtgggcaccatggctcagccaagtggacttataaaatcaaggatcaagggtgcctcagaacaagagtacccagacagaacacaagttgggcagtatttcaagaggcaggggaagccatggaagctgctctgaggggacttgtgatcaggtgtgtatgttagggaggtcactgtggcagcagggtatagggtagactgcaggggtcttgtggcctctgtctctgtcacaggccaagtcatattcaaatttataaaattcaaaatttttacatcattaatttgaaattttattaaataaatacagtatatatatatatatatatatatatatatatatgcttctttttatatactttaagttctggggtacatgtgcagaacgtgcaggtttgttacataggtatacatgtgccatggtgggttgctgcacccatcaacccatcatctacattaggtatttctcctaatgctatacctccactagcccctgaccccctgacagaccctggtgtgtgatgttccccaccctgtgtccatgtgttctcattgttcaactctcacttatgagtgagaacatgtggtgtttgcttttctgttcttgtgttagtttgctgagaatgatggtttccagcttcatccatgtccctgcaaaggacatgaacccatcctttttatggctgcatagtattccatggtgtgtctgtgtaccacattttctttatccagtctgtggtcgtatagtatttctggttctggattcttgaggaatcgccacactgtcttccacaatggttgaactaatttacactctcaataacagtgtaaaagcgttcctatttctccacatcctctccagcatctctcgtttcctgacttttttagtgatcgccattctaactggcataagttggtatttcattgtggttttgatttgcatttctctaatgacccgtgatgatgggctaaaaattcagagaaaatgtaataaaatgtttaatctagctcaagtatccttcctttgttgaatcagttttcaccttttctgtctttcctgctggctggcttgctggagcccactctcatgagtggtgcaaggtcagagatagaaaaccaggcccatgtatggttgtgtcttttcacaagttcagccttttattgatgctatttcagtttacagaagccccgagatgcacggagttttcaaggaggcaattctccttaggacttcccatttagtactgaaatggcttgagcccttggagtactggagcctgtgtgccggcagcatttagtcagagctacaggcgcacaggctcctgctgtgacccaagtcagtcagtattgcaacctatacatactaatacacttcaccaatatatgcatgttatagattaaacattctacatcaaacaacgtaacatttatcatcaagagaaaaggggtaggaaaaagcttaacaaaggagcacagggatattgatgtggacaaaaaaaagtctcctggcctggccctggaggrccatcagtggtcgccatcttgcaaggaagagcctttgatatcagtggggcagagccttttgcggtggatgctgcgtaatgattacaagtgacagcaagatggcatctgttaaggtagccatttggagctgctgaagccctgttctttcatgaccacagagtcctctggtgaggattgacaatggaagagggtgtttggttgtgtccttaactgtttggatgtggtctttattgatcaggtgaacatctggctcctgtaggcatgatgccttttgaatgaaatgtaacatggaatctttttctaaggtggagtcacttatgtcaagcgtgctctacacactcactgtaagaattaaagaggaaagaagcatgaaatgtcacttgacagttaaacacaggtttattttagagaaacctgagaggggcttctggctgagttaggtcagagctcttctctcttatagactaagcacatttaagggttttggaagggggtgcttatcataggttcagaatgtttgtatgtgagggagagtttattgcagggttgaatatctctggtcagaggggaggctgtctcagggttggtatgtttttggtcggagacgggtttatcttagggttggaatgtttctggttatgctgacatgagtcatgaggctgatgttttcgggctggatttaggcggtttttaatcaaggggagcctagaatggtggtgtttgttcaagatggccatgctcccgctctgtcacccacaacctgaagaccgttatcatattgattttgtatctcctgtgcrtacctgatggagaatgactgaatgtttgaattaaaagactcagggagaaggcaaagttgtgtttaagttgcaagttgaaaaaaacaatccattggctctgttagcagctattagagaggttggggcgggagcagagtctgtagcttaactttgcttttgttatgtcgatgctatgagcgtgggaatcatggaaactgtgaataaatggaagagagtctgtcagtgacctactgctgcatcttgggccagcccaggcatccgtgagtgttcagggagacctcgggagagttctcaggcagaaactagccactcacatgcttgtcatctgcggggttgacatggtgggctatttttatgctcagacacttgggagaaagggcaggctgtacccaaaggcagataagtgctggccagatgggcttgctgggcaccgtcgaactcatggtcaccgtcctgcccaggagctagaaatagaactagccccgggacaatccgtgaggtatcaggtgagtatggcccgatacatgtgactcagagacacaaggagtgagggtgtgtgctctgtctcaatgagagaagagagaagtcagggcttgctttggcaacaccaaatgcagatatcagactcctattcagaagccagaattctcatctcagcatttattttctggatatgtggccgacagataggcatctctgtttataatgcctttaattttgatcttgacaaggactagaggaagctcttactgaaccttcacgcccacaaacaaaagcttctaaatcggccgggcgaggtggctcacgcctgtaatcccagcacattgggaggccgaggcggacagatcacctgaggtcaggggtttgaaaccagcctggccaacatggtgaaaccccatgtctactaaaaatacaaaaaattagccgggagtggtagcgggcatctgtagtcccagatacttgggaggctaaggcaggagagttacttgaacccaggaggtrgaggttgcggtgagctgacatcacgccattgcgctccagcctgggcagtaagagtgaaactccatttaaaaacaaaacaaaacaaacaaaaaaacttctaaatcacattcaggaagcattttgtaatattttatttcttatcaggaagcattttgtaatattttatttcttatcagggagcattttgtaatattttatttcttctcaacccctgtagtggattgaatggtgcctctattttacccccacccccaccaaaaaaaaaaaaagacaagttcaccttgaatctgtacatgtgattttttatttggaaataaggtctttgcagatgtaaaaaaggatctggagatgagatcatcctggattgcagtggatcctaaatctaatgacaggtgtccttgtaagagacggaagaggagacacagacacagaggagaaggccacgtggagacggaggcagagactggagtgatgcggccataagcccagggatgcctggagcccccaggagctgggagaggcaggaagaattcttccctagagcagggagcatgtccctgtaggcacctcgatttcacagatgtagtctccaggactgggagaggttaaatggctgcttttgtaagctccctagtttggggtcatgggttacagtggtcccatcccaacctgtaagctctggagaacatgagtctggaatgcaagcgtgtgcggtgattcagcttgatgcctgtggtgggaaaagagccccttgtattatggcttcctgctgtgtgtaagtaaaaccagtcctctgaggaaatcaaagcccagtaaacccgtgcaccctaacttcccaggatcgcaaactggagagagagcggcagccattttctccccctgccttgatttgctgaacctgccacccgtgcagcatttcccaggaggctaacctggtgatattgtccattcttggtcctccgcaatgcaggcaatattccttgctcagctcaaatgcttgcgtctcctctttcttctctccacctgcaaaacatcttttcataggtcccattgggaacaccagctcgttggctggtatttccacactctttttccttccttttgttgcttcatctacctctgatttgccagttgtctgatgtctcctctcacgagcctatctttctcccaagcctagtagacacgaaccattgaaagcatccttgaatgacaaaagtccaaatatcaatttgcaaggtgaagactgtggcttttattatttgttctcaatggcgggtgtctggcggggagtccagtcgcctgacgttgaatgcagtcatttcctaggtgtgggtcaagattctgatgtccacaggcaataatgtccgtgaacgtgtgtatgtaccttgatggacattactgactgtggactccagaacattggacattgtatatattgatggacatcatatatatatatacacacacacacacagacagacgcacacacacaccatggaatactacacagccacaaaaaagaatgaattaacagcatttgcagtgacctggatgagactggagactattactttttttattattatactttaagttctggggtacatgtgcaggacgtgcagtttttgttacataggtatacatgtgccatggtggtttgctgcacccctcaacccgtcatctacattagatacttgtcctaatactatcactcccctagccccccacccctcgacaggccccagtgtgtgatgttcccctccccgtgtccatgtgttcttattgttcagctcccacttatgagtgagaacatgtggtgtttggttttctgttcttgtgttagtttgctgagaagaatggtttccagctttattaaaagtcaggaaacaacagatgctagagaggatgtggagaaataggaatggttttacactgttggtgggagtgtaaattagttcaaccattgtggaagacagtgtggggattcctcaaggatctagaaccagaaataccatttgacccagtaatcacatgactgagtatatacccaaaggattataaatcattctactataaagacacatgcacacgtatgtttattgtggcactattcacatagcaaagacttggaaccaacccaaatgcccatcaatgatagaatgtataaagaaaatgtggcacrtagacaccatggaatactatgcagccataaaaaaggacaagttcatgtcctttggagactattactctaagtgaagtaactcaggaatggaaaaccaaacatcgtctgttgtcactgatacgtggaagctaagctatgaggacacaaaggcatgagaatgatacaatggactttggggacktggggagagcttgggagggggcagcgagggataaaagactacaaatagtgtggaatgtgtactgcttgggtaatgggtgcaccaaaatctcacaaatcaccactaaagaacttactcgtgatcggatgtggtggctcacacctgtaatcccaacagtttgggaggctgaggcgagcggattaccttaagtcaggagttcaagaccagcctggccaacatggtgaaaccctgtctatactaaaaatacaaaaggaattagccaggcctggtggcacacacctgtaatcccagctgcttgggaggctgaggtaggagaattgcttgagcgtgggaggtggaggttgcagtgagccgagatcatgccactgcgctccagcctggctgacagagcgagactctgtctcagaaaaaaataaaaagaacttacttatataaccagatactgcctgtaacccaataagttatggaaaattaaagaaaaacacacaaaaagagtatattcaggatcacttaagtaagcatgatactacatcacatctcgttgcggaaattatatggattatcattccatgagtgtaccagcttccggaagtttctgagctcatatggggagtgggaagtaggtggtctcgtgggaactgcagggctggccccttgtcaggacggtcatcactagtgacataaataccccatggtagagagagctggggtgtcttcgtcggttttgtgtcactagaaaggaacactggaggctggataatttatagaggaaagaggtttatttgggttatgattctgcaggctgtacaagaagcacagggccagcatctgtctctgctgaggacctcaggaggcttccactcatggtggaacgggaaggggagctggtatgtgtacagagaccacacgaagagacaggagggaagacagacgggagacgccaggctctatttaacaaccagcctgtggagaactcatagagtaaaaactcactcatgcttcaagaaaggacattgatctcttcaggaagaatccatcgtccgttgctcaaacccctcccattcgacctcccatccagcactgaggcttacattttaacctgagtttgggagaggaggaattttaaagcagagcctgtagattctaaagcaaaatattctgggtctcctgcttgtagaatggttgtgagtgtgacttcctttttctatttttattttatttttttgaaacagagtctcgctctgttgcacaggctggagtgcaatggcactgtctcggctcgccgcaaccttcatctcccaggttcaagcgattctcctgcctcagcctcccaagtagctgggattacaggcgcgcaccaccatgcctggctaatttttgcatttttagtagagacggggtttcaccatgttgaccaggctggtcttgaactcctgacctcgggtgatctgctggcctcggcctcccaaaatgttgggattacaggcatgagccaccatgcctggcctgggattgttatttctaaatgattccagcttttttttttttttgtctcagctgaggcacagcggtggaacttgtcgtcttatcattgacttgttatgttcatgaaggacttggaaaaccaacgctgatcctcagagtaacagcatagatcctcacaagacagtctatgaagctggagccccctgggttgtaaaatgcctccgcaccccgtctctgtttctgaagaaggaagctctgctgagcagctaaacatgacgtgcttgttaagtgtgcattggttaaagaacagatgaaggtacaggctcagtctccaaaacttcattatacaatctcacagatgagtagcaccgttcagcattgagtgacacctactttcccatctccaggtggttagatatcatcatctccaatttaaggcccatctaagaggtgcaccttttctcgatcctgaggctcaagtgtctaaacagcaactgtaaattttctccaatcagtgtttctcccctgtgtggaaataaattckcatccttgaagttcagctctctccttcattttacaaaaaaacaaaaaacaaaaaaacttgttttaagcaagattaaaagtgaattttctattagcagtaattttatatcactccctgtcttgcttcttttgcactcactgaattgaagagaacgatatgaaattgcctggaaataaaaatgaaagtgcttctcagagccaaacaacactactcgtgtgaaagaatatagaatgaaagtttgaagtgtccatcagtcctgaacctgggatgatcctgtcctgatatccttaacgagaatgcatctaccaagaccctattcgcaaatcagttcacattcacggtgtttgggggttaggacttgggcatgtcattacgggaaatagctttgttggcttttctggttttacatagaaagagcaataaaggtcagccgcggtggctcacgcctgtaatcccagcactttgggaggccgaggtgggtggatcatgatgtcaggagttcaagaccagcctggccaacatggcgaaaccccatttctaatgcaagcagggcttaaaacctagatgacgggttgatgggtgcaggaaaccagcatggcacatgtatacctatgtaacaaacctgcatgttctgcatatgtatcttgcaacttaaagtaaaataaatctatctatatctatctatctatcttagggctgctgtaataaacgaccacacacttggaagtcttaaagccacaacaagtttattcttttccagtcctggagaccagaagtctgaaataacgatgtgggcagtactgtgcttcctctggaggctcacttgaacctgggaggcagaggttgcagtgagccaagatcatgcctttgcactccagcctgggcaacaacagcaaaactccgtctcaaaaaaaaaaaacaaaacaaaaaacaaaataccgtgaatatgttctctaaattaatctcacagcatgggagaaggtgaacaggataccccagtactgatgacaagtattatgggatggaaaagagaactggcattcttctttgctggcaacacaacctgtttttgttgatgtgaaggcagttaaccttgttgctagataaatgttactgcagatgtctgacgtaatgagaatgcgttatccacagcaaaatgcttttgaaaaagaaactgcagggaacttcacagtgagtgactaagactcactactgcagtctggcgtggtggctcacgcctgtaatcccagcattctgggagggtgaggcaggcggatcatgaggtcagtagatcgagaccatcctgggcaacagggtgaaaccccgtctctactaaaagtacaaaaaaactagctgggcatggtggcgggcgcctgtagtcccagctacttgggaggctgaggcaggagaatggcttgaaattgagaggcggaggttgcagtgagccgagatcacgccactgcactccctggtaccagagcaagactctgtctcaacgacaacaaaaaaacaaaaacaaaaacaaaagcatgatattaaagacactgtgctccatgactcagaagttgaaagagctactttgaatctgcaaatgatacctccatggatgtcgcctaagttcatgaaagatggaagcatagtgacagtaacaataatttaagaaggtttgaaaggaaaatcttggggtccccaaatcactaagctcaagggaaaagtcaagctgggaacttctcagagcaaacttgcctcccgttttattcaaagttactcctggccaggtgcggtggctcacgcctgtaatcccagcactttgggaggccagggcaggcagaacacgaggtaaagagatcaagaccatcctggcctatatgatgaagccccatctctactaaaaatattttaaaaactagctgggcatggtggcgggcacctgtagtcccggctactcgggaggctgaggcaggagaatggcttgaacctgggaggctgaggttgcagtgagccgaggtcgcgccactgcactccagcctggtgccagagcaatactctgtctaaacacacacacacacacaccccaaaaaaataatgaatgcaaccatttgtctcttatccacctatgacctggaagccccctccccacttcgagtcgtccccgtgtttctggatggaaccagtgtacctctcaacatatattgattgatgtctcatgtctgcctaaaatgtataaaaccagcgtgtgccctgaccaccttgggaacatgtcgtcaggaccacctgaggctgtgtcatgggtgcgtcctcaactgtggcaaaataaatttttcttttttttttttttttgagatggagtcctactctgttgtccaggctggagtgcagtggtacgatctcggctcactgcaacctccacctccctggttccagcgattcccctgcctcagcctcctcaatagctgggattacaggtgcccgccaccatgtccagctaaagttttttttgcatttttagtagagacggagtttcaccatgttggccagacttgtcttgagctcctgacctcagacaatccgcccgcctcgacctcccaaagtgctgggattacaggcgtgagccaccacgcccggacttaactttctaaattaactgacaccatctcagatattcagggttcacaaaggcttggaggggcctgcaaatatatacaattatagaattaaatagtgatggatagagtcccttattcaaaaatactgttataaattaagttaaaatattaaagtcaaagaaacttcacacccataatcgcaatgctttcagaagatggaggattattttgagctcaggactttgagagcagcttgggcaacacagcaagatgccatttctacaaaaatttttcaaaaatagctgggcatggtggtgtgtgcatgtggtcccagctactggggaggttgaggcgggaggatcacttgagcccaggagtttgaggctgcagtgagatgtgctcaaatcactgcactccagcctggctgagagaccaagaccttatctcttaaagaaagaaaataggcggctgggtccggtgactcacgcctgtaatcccagccagggcacgcgaatcacctgaggtcaggagttcgagaccagtctagcgaacatggygaaactccgtctctactaaaaataccaatattagccaggcatggtggcaggtgcctagaattccagctacttgggaggctaaggcagggagaatcacttgaacctaggaggtggaggttgcagtgagccaagatcatgccattgcactccagcctgggtgacagagtaagactgtgtctcaaaaaaaaaaaaaaaaaaaaaaagcatacttttgagttaaaacaacagaattaccattcaacccagcaaccattcctgggtacatacctaaagaaataccaattattctaccgtaaagacacttttgcacatgaatgttcattgcagcattatttgcaatagcaaagacatgggaattaagctagatacccatcagtggtagactgggtaaagaaaatgtggtacatgtacgtcgtggaatactrtgcagctgtaaaaaagaacaagatcttattattttttgcaggaacatggatggagctggagatcattgtccttagcaaactaatacaagaacataaaagcaaatatcgcatgttctcacttataattggaagttcaacattgagtaaaggtggcctcaaagaaaggaacaacagacattggggtctgcttgagggtgaagggtgggaggagagggaggattaaaaagctgcctattggccgggcgcagtggctcacacctgtaatcccagcactttgggaggccgaggtgggcagatcacgaggtcaggagttcgagaccagcctggccaagatggtgaaaccctgtctctactaaaaatacaaaaattagccaggcagagtagcaggcatctgtaatcccagctactcgggaggctgaggcacaagaatcacttgaacccatgaggcggaggttgcagtgagccgggatcgcgccattgcactcaagcctgggcggcagagtggcactctgtctctactgcatatcagatattgtgctgattatgtgggtgacaaaataatctgtacaccaaactcccatgtcacgtaatttgcctgtgcaacaaacctgcacatggactcctcccgaatctaacatacaagtttaaaaaaatacatgtttgtacagctgcaccacgtgtgtatgtgttttaagctatgtgttatgatgactcaaaaacgttcaaaaaattaaaaggtgttaaagttataaaaaagaataaaatgcatcacacttttcaaatcatgaaatacctttttttacccatcgtgaatgtaaacattgacaccaatgggaagcttgagtattgtgtccattttacagggcaagaaaacaggggaatgggtaaatagcaaaacgagcaaagaaatgagtaggcaaaggcccatcacctatttctttgtggatgtctttgttgaactttttttcaacaaaatgaaaccaagccccctgattgttagttacctcacgcccatagtcttggccagtgagtcttttcgtaaaatggtactcaccgcagagtacattctgaatacacgttagacaacgatgaccaggaaaattcctgagtttttgatcgatcacattcctggccaaatcagatggatatttaagacctcagtgtgccctttgcaatcttgcaactcctgctttggttctctggaagaaatcttcttgtcgaagattcttactaaaactcaatgggttaaaatgcaaagatcttatttgttgcatagaatcaagactctgggtcaatacctggcagagtgactggaggctgcattggggtggactgtttttagacggcaggtcaggccccagagagaggtagttgggtgggaaacataagtcctatttctaatgcacagttgttgtgcctcctctggatatccaaatgtttggcacaatctgttttcctagaatcccagctgacatagagcagctaatgctcacatactgtcatccagccagtggctcatttagccaattaacacgctgatttcaaaagcrttgtgaaaatatcactgcacacactamctagcttctgaccatcccttcccttcccttcctggcatatttctccagcgtaatctctgctcayagcctttcttacgagctacccacacccttgagcttcacaggacccattcagtctgtttgtgttttctccccgacctttcagcaatgtcaccatgatcttttcaagaatctttttctttgcttctcctgacaaatgcrtcatccttctgagcaataaacagaggaattggcaaagttaataatgtcgttattgagcacttagtgaatggtgagcattatgctaagactgttttgtggtgtatccatacaccattccaacgatatatattttttaatttaagcatactttattggtaaacaatactaacaattatctgaacatttcgcgagtcaaaaccttattgctggtggagagtcttgcctcaatgttgctggctgtggactgatcagggtggtggttgctgagggtagagggtgctttggcaatttcttaaaatagacaacagtgatgtttgtcacatcagttgaccctttctgtcatgaaagatttttctgtatcaagcgatgctgtttgatagggttttacccagagtagaacttttttcaaaattcgagtcagggccgggcgtggtggctcacgcctgtaatcccagcactttgagaggccaaggcaggtggatcacctgaggtcaggagtttgagaccagtctgaccaacatggtgaaaccccatctctactaaaactacaaaaaaattagctgggcatggtggcgggcacctgtaatcccagctactcggcaggctgaggcaggagaatcgcttgaacctgggaggtggaggttgcagtgagccaagatcgcgctatggcactccagcctgggcaacaagagcaaaactccgtctcaaaaaaaaaaaaaaaaaaaaaaaaaaaaaaaaccaaaaaaccttcctgaaaggattcctcattctgaatgccatttagaaccttggtgattcatggcaggaagttaagatatccacattaacagaaatcgggaaaaagtgaattccaatattcatgaatgacattgagggggttcaagacttcagtggaggaagtcacttctgctatggtgaaaatagcagaagtaaaggtgcaggttgaagatgggactgaactcctgtaatctcatgataaaactggaatggaagaggagtttcttctcatgaaggagcagagaaaatggtttcttgagatagatactattcttgggcccatttcactgatgagaaaactgaggcctctccaggttgaagggtacaactaccaagtgtgggagtctgggctctaccccattactggacatctccagagcctgttctcccttctgctaagtttgcgggtcgctcaacattgtctccttggacgtgtgataagtcttcctgctcctccttcatcagtctttaacatttgagagacatttagagtggcctggaccaggctctttgctcattctcttttcttctactgaggcctctttcacaagtaggttttctcatctctctcttctttcatttattctctccttcattctctctttctcattctcttattctctctccctgtcttctttcctcttctcttccctcctcttcccctcctacttcttccttcccctccttctcctgcccctcatctcctcctacttctcctcctccttctccttcttctccttcatcttctttcgtttcttctccttccctttctctcctcctccttctccttctccctttccttcccttcccctctcttcccctccccttccctcccctcccctcccttcccttcccttttcttttcttttttttttgctttcacggagtctcactctgttgccaggctggaagtgccgtggcgcgatctcaagctcactgcaacctctgcctccccggttcaagcgattcttctgcctcagcctcctgagtagctgggattacaggcatgcaccaccctgcccagctaatttttgtatttttagtagagatggggtttcaccatgttggccaggatgatctcagtctcctgacctcgtgatccacctgcctcagcctcccaaagtgctaggattacaggcatgagacaccgcacctggccccttctactttttttttcccttctccttcacctcctcttccccctcctcctgcttctcctcctcctctttctcctcctcctccttcctttctcctcctcctccttcctttctctctgtctctctctctctctctccctccctcccccccctctctccctctgtctctctccttctctctcattcactctcattgacgtccatatccaaatttttggaatcgcagtgctgccctcttagttctttgtcatgaaccatctgttgcccttggattgttttaccttttgtatccttggcagcttgacatacccatggtctaagcaagagtgttttctctgaaagtgcaggcatgagctgatacttgtgtgtttcatccattatcagcactgttttatgcatgtaaggagggtgtgtggcatttgcctcgtgggttgtaggaagggacacccaggaaacaaacaactaaagtgaagctttcctgcgggctaggatttgaaggtcatactaatgtccttcgagagagttaatgtcaagaattggtgtgaccaaacagtggtggatgtcatagtgttttcctcttttcataggttcacttttcaaatgagacagtagccatgagggaccatccatgcaggctgagactagtcttcaggaaaatatctatgcctagtagtttcagaaaggttagggttgcatagatgtacccacctgtccatcctgatccttactctaaattcgacctcttctatcattgctttcaccatcactgtcttgttggtgatgggcccagcttcgagaaactcagatctgcctcagtgctgctggagctggagagctggaagaaaaccaatatggcgtttgaaccgcacaatccaaaagtattgtggcagcactgattcataggttccttctcagtagaacctcttttgaattcctccaaacaaagccttctatttgagccatggcccttgagtagaccgatgtcatggactattagagtatgctattggtgctccagctacccatggccaaccaccaggcattacttaggtagagccccactgcctggcctatgcaccaggcatcaacatgaggtttcataaatacctgggagtacaagtgcagaatctctgttgaaagaatgcaatactctttttatttcttcaccgaataattaaataatttttatttcttcgttaaagggcaattgaagagaagacaacatgtctctcttagtaggtaccatccccgagtagaactcatcctcctctgtgcaaagattcccattgttcagatcactctaatgctttgaggaaaacctccccacagtgtaacatacagaacactcttccgggggttatggcagatgctggagtctcttctaccaccacctaaagatgctggggtactctgcaacaccacctgaggaaaggaacaggatgaaacacctgttgtattagtcacctagggctgccatgacaaamtactacaggctgggccgcttaaacagcagacttttattttcccacagttctgaaggctggaagtctgtgagatcaaagtgtgggcagggctggttcttcctgaggcctctctgctgggcttgtagacaccgtcttctccctgtgtcctcatagggtcgcccctctgtgtgtgtctgtgtcctcatctcctcttatgaggtgtcttagtccatctcaggctgctatcacagaataccatagactggctgacttataaacaacagacattgattctctcacagtcctggaggctggaagtctgagatccaggtatgggcagggctggttcctcctgaggcctctctcctgggcttggagacgccatcttctccctgtgtcctcacagggttgtcccaatgtgtgtgtctgtgtcctcatctccttttcttatgaggtgtcttagtccatttcaggctgctatcacagaataccatagactgagtggcttgtaaacaacagacgtttattctcccacaatcctggaggctgtaagtccaagatcaaggtgtaggcagggctggttcctcctgaggcctctcttgtaggcttgtagatgccatcttctcactgtgtcctcgcagggtcgtcactctgtgtgtctgtgtcctcatctcctcctcttttttttttttttttttttgagacggagtctcgctctgtcgcccaggctggagtgcagtggcgggatctcggctcactgcaagctccacctcccaggttcaagcgattttcctgcctcagcctcccgagtagctggaactacaggtgcgtgccaccatgcctagctaattttttctatttttagtagagatggagtttcaccgtgttagccaggatggtctcgatcacctgacctcgtgatccacccacctcagcctcccaaagtactgggattacaggcgtgagccaccacacccggcctcatctcctcttcttataagcatcccagtcttctcggattaggggcctccctggtgactttgttttaccttaatcacctctttaaagactatctccaaatatggtgacattctgaggtcctgggcgttagggctttaacatagggatttgggagaaggaatcagcccatcacagctgtgcattctaagactccagtgactttgtgctgacaatggcttttccttgggtagctctaaccagatggtctggctgggtctatcttgagtctagtgactcccaccacgaggccaactgagcagggtggccaggaaagcctgtggccttacaacaaggtgatgctcacctgcagcacacaggccatcactgtagctctgctggctttattcttgggtttatagtgatggcttctttctgcctctgcctcccttgaggcatctcgtttctgtggttggagtactgtgagcctaagagacagagagcatgtccacagtcaggcttcccttacttgcttcagtagcatctcatgagtgtttccaatgcattcagggagactcttcttcactgaaggagtcagatccattttgcagctttgctgcttggaaccttgatggaatggctgagtacatggccgccagcgtcactcatgcacgaaaagtgttgttgaaagctaatagaaactgaaatctggtcgggcacggtggctcannnnnnnnnnnnnnnnnnnnnnnnnnnnnnnnnnnnnnnnnnnnnnnnnnnnnnnnnnnnnnnnnnnnnnnnnnnnnnnnnnnnnnnnnnnnnnnnnnnnnnnnnnnnnnnnnnnnnnnnnnnnnnnnnnnnnnnnnnnnnnnnnnnnnnnnnnnnnnnnnnnnnnnnnnnnnnnnnnnnnnnnnnnnnnnnnnnnnnnnnnnnnnnnnnnnnnnnnnnnnnnnnnnnnnnnnnnnnnnnnnnnnnnnnnnnnnnnnnnnnnnnnnnnnnnnnnnnnnnnnntccctagaatattgcaaagtggttactttcccccaataacacacaactggtatatttctttgatcttcaccctgggaacctggtggagctcccgggaggtaaaatttgtgaaagtacaaggtcccctctaagatgggcccccagaagtttttctgttgttgttgttttttgagacagagtctcgctctgtcactcaggctggagtgcagtggtgcgatctgggctcactacaacctccacctcccagggtcaagcaattctcctgcctcagcctcccgagtagctgggattacaggtgcctgccaccacgcccggctaatttttgtatttttagtagagacggggtttcactatgttggccaggctggtctcgaactcctgacctcaggtgatctgcccgccttggcctcccaaagtgctgggattacaggtgcgagccaccatgcctggccaggagtttttaacttacttaggcttgtccactgtcagcctgcagctgtttaataattaccctgcaaatgtgtccatcaggtgctggctccagcaggaactcctagacaagcacaattccacttgccacctgtctgtccagtcttcaggcagcatttcgtcttgtgatctctattttctgatggatcgcagagttgctgattttcagtatgttctgctctttgcctattgtgaggataggaattaaaatgcgcaagctctctacatgttagtgaagtggctacgttgtctggggtatataccctggggttcgtcattgggcatcaggaaaatttaggacaaagacacacacgaggagtttaggagtggaagtttaatcaggagaagagaagagaaagagaaatggttttctctatagagaaaggggtctccgagcggaaaggaccagctggcaccaaatgtgatggattttatagtccagtttgaggaggcggtgtctcatttacatagagctcagagattggttccatcaagcatggcatttacatagcccacaggaaaggctggttgcccaccctaatcgtttatgcaaatgggctttgtagttggtcggggctctccgagagattggttccatcaagcatgacatttacatagcccacagnnnnnnnnnnnnnnnnnnnnnnnnnnnnnnnnnnnnnnnnnnnnnnnnnnnnnnnnnnnnnnnnnnnnnnnnnnnnnnnnnnnnnnnnnnnnnnnnnnnnnnnnnnnnnnnnnnnnnnnnnnnnnnnnnnnnnnnnnnntcttgaacgtgtctagtctctagttcctgctgggaagatggagccgccgttttgaatgtgtctagtccctagttcctgccgggaagatggaaccgccatcttgaacgtgtctagtccctagttcctgccgggaagatggagccgccatcttgaacgtgtctagtccctagttcctgcccggaagatggagcccgccatcttgaacgtgtctagtcgttagttcctcccgggaagatggagcccgccatcttgaacgtgtctagtccctaggtcctcccgacattcacccgtacaagctcccagctggcttgtgtatgtctgcagctcgacttgacaggctgttcattgttagaaaatgacttggggctgcttttcgttaaagagaaaagctgccgggcgcagtggctcacacctgtcatcccagcacttttggaggctgaggcgggtggatcattaggtcaggggttcgagacgagcctgaccagtgaaaccgcgtctctactaaaaaaaaaaaaaaacaaaacaaaaattagccgggcttggtggtgcgtacctgtaatgccagctacttaggaggctgaggcaggcgaattgcttgaacccgggaggcggaggttgcaatgagcgaacatcacgccactacactccagcctgggcgacagagcgggactccatctcaaaaaaaaaaaaaaaaagaaaagaaaaaagccttgccgaggactcccatacccttactgtctgcctaagtgatttcttcttaactcctgtatcactggcagactctgagttgcctgttgggtggagtactatattgccgagtatcatgactgtattagatgtgagggagacagtgtgaataggacatggtccctgaagagcacagagctttcacctggggctgggcggagcttctgtcctatccagtgttatggaacccttgcaagcacaggtcaagcagctcaagggctggaagacgtgcacacaaaatccaagggcaacgttggaaagaggtttagtgtttcttagaaaaatgccagaaggctgaagaagtgggggccccgagcagctctgaagggtgtgtatgcaattaaactgaagccaaaggctgagagagaggagtgagagccgcctacggagctctgtgcagcttcatcataaactcacagacaggcttcatgcagcgccgtctcagtgcattcaatgtttggattccacatgcatgcgtcctcaacccccttgcaatgctgttctccttggagggaaatgggtccttcttaccctatcacatgcaggtatctggtctaccagataaatgtgtgagaaatcaccaacaaagcagaaattacttttaattacaaagcagagtcatcgtaaaactttgtgcaaaatctttttttttttttttccagacagggtctccatctgttacccaggctggagtgcagtggtgtgatcatggctcactgcaacttcaacttccgaggctcaggtgatcctcacatctcagcctcccaagtagctgggatgacaggtgtgcaccaccacacccagctaatttttactatctgcttaagtcatttcttcttaacccctgtatcattagaggagaaaccggaagcccctatttttgaaattagtaaccacctatcacctaaaattcctctcattactgtgacgataatgatgattttttcgagaccggatctcactctgtcacccaggctggagtgcagtggtgtgactgtggctcacgacagcttcagcctcccgggctcgagtgatcttcccaccacagtgtctaaagtagctggggctgtaggtacgcatcatcattcccagctatgtatatattttaaatattttgtagagatgggatcttcctctgttgctcaggctggtcttaaactcctggcctccagcagtcttctcacctgggcctcttaaagtgctgggattacaggcgtgtaccaccgtgtctggccaaaaaacatatctattctggggttcatagtgatgcttgtttctgccttggcctgtcttgaggcatctcactcctgtagttggagtactctgagtgtaacagatggagagtatgtccacacccactcttccctcacgtgtttctgtagcatcccgtaggagttttcaaatgcatttggagatgtattcaccctgtgacagattcaatgcatctctacaaggcagaatagctctaccatggtgtggctatggcgcttggctgcctgagtctttattctgccttccaggtgcttgttggttggataactttgggtaggttcttgtacctctttgagcttcaagactgtcttagtcagctctggctgttgcaagaaaatacagttgaccttgatacaaaaattagctgggtgtggcggctggcgcctgtaatcccagatactcaggaggctgaggcaggagaatcgcttgaacctgggaggcggagattgcagggagccaagatcacaccattgcactccagcctgggcgacagagcaagattccatctcaaaaacaacaacaacaacaacaaaaaactagagttgacccttgaacaatgtgggagttaggggcgccacacacgtccctggcacagttgaaaatccaaagataacttttgactcacccaaaacttatgaatatcctattgttgagcagaagccttatcaataccataaagtcgattaacatatattttgtatgttttatgtattgtatactgtattattaaagtatgctagagaaaagaaaatgctgtttgttttttttttagccgggcatggtggcgcacgcctgtaatcccagctactcaggaggctgaggcaggagaatcgccttataaggaactttgagaatcaaaaatcataaggaactttcattnnnnnnnnnnnnnnnnnnnnnnnnnnnnnnnnnnnnnnnnnnnnnnnnnnnnnnnnnnnnnnnnnnnnnnnnnnnnnnnnnnnnnnnnnnnnnnnnnnnnnnnnnnnnnnnnnnnnnnnnnnnnnnnnnnnnnnnnnnnnnnnnnnnnnnnnnnnnnnnnnnnnnnnnnnnnnnnnnnnnnnnnnnnnnnnnnnnnnnnnnnnnnnnnnnnnnnnnnnnnnnnnnnnnnnnnnnnnnnnnnnnnnnnnnngtgaagtaactcagggatgaaaaaccaacatcgtatgttctcagtgttacgtgggagctaagctatgaggacacaaaggcataagaatgataaaatggaatttggggtcttgggggggaagagtgggaggggggtgagggataaacactacaaatagggtgcagtatatactgttcgggtgatgggtgtaccaaaatctcacagatcaccactaaagaacttaggtaaccaaataccaccagtaccccaatcacttatggaaagataattaaaaacaaaaaaggacaccaaactaaatttttaaaaatcatagagaagagaaaatatatttactatttctgaagtgggagtggatcgtcatgaaggtcttcatccttatcgtcttcaccttgagtagcctaagatgagagcggasaggagggattggtcttgctggctccggggtggcagaggtagaagaaaatgccygtagaagtggacccgtgcaattcaaacctgtgttgtttaagggttaactggaccatagatggggtggcataaataacagaaatttatttctctatagtactggaggcagaaatgtttacatccaggtggcaccatggttgggtacttgagaggttcctcttcttggtttacrgatggtctcgcagggcagagagagaggggggtggagcacgagggagcatgtgtgccctggtgtctcttcttacaagggcacgaatcccaacataaggatcccaccttcacgacctgatgtaaacatcatcatctcccaaaggctccgtctccaaataccatcccctttggcattagggtttccacacatgagattcggggtgacaccattcattccatagcaggagccctccttggcagactgggacaccaacgcctcttccctcttgggctgacacgagctgtaaatgtcagtggacatttaaatactgcgttacacattcgatgtcctgtctgcaatggagccgggttctgtaaacataagctgccatggcgaaatcggatcatcatcgcccatcaagctctttggcagcagtgctgtaatcagtgcaaacatttatttatataaatgctcccatcccctcggcatgaagatatacttaggctctctcaatggacagccacgccacaagcccaggaatgagagcttgtcagatactgaggctgttttcagagccagtgttcggctgaagtggcacagaagctatcattgtttgcaaatctctgctgcttgtcaagccacagggttaagtaaccccggatgttgcgaacactctgaagtgctgacctgcagtgtctttttggatcactgagccctcaggcagacaggctgtacgtggaccgacacgtcatggctgctgtcttgcacttaaccctctttatctttagaccttgattgtgcacctgtttctcattggaagctaatgacaatccacgaagcggcttggcagtgactgtctctgattgtgtaaggaggggttgccacattcacccatgttgttgactttcaactgtacacttgaaaacgtcaaaagtcagagtaagcattgcctcatgtctccgagtgtagcaattctaggaaaactcttccgaatgggtttaaagtcaaacaaatccaatcaaaacagacttgcagggccaggcacggtggctcatgcctgtaatcccagcactttgggaagccaaggtgggcagatcacttgaggtcaggagttggagaccagcctggccaacgtggtgaaagcccatctgtactaaaaatacaaaaatttgctgagcctggtggcaggcgcctgtaatcccagctactgaggaggctgaggcaggaaaattgcttgaacctgggaagtggaggttgcagtgagccgagatcccctgccctcccctcccctccccttctttttccttcaccttttttcttkyctctcccctttgctctgaagacattatgtctatctggctggttcttcctgtttcattgtcgttttgcagtgcaaatacttgaaaagatattctaaaacaaacggcagtttgtgcctcccatgaaagaaattgagaaacgtgagaggccccagggggagtttgcctctgctcatgacacagccgtgctcgtggctgatgggcctgcctggccttgctgtggctctggctcaagctggcatgcattccggcccctctgtttctcaagggaggttaccaattgatcttgtccgtctctcatggagcacacagctctcctcttcagtgtgtgaacttcatgagaactgtgtttcctggctgatggattgacataaggtctttgtgctagagatcaaagactcggtccatgactccaacgtttctccacctgtatctgggagggtttccaggggatcgctcctgctttcagcaaatgtggagggtctgaaaatggacatcctcagtcataccgtgggyggccagatcattgtactagccgtgcactcgcttacagttatttacagttattcttttgtatttgcagtaaaatacaggtgtcacaacattgaccatctttcctatgtttaagtctacagttcagcagttttttgttttattttactattttgttgaaacggagtctcactctgtcgcccaggctggagtgcggtggcgtgatcttggctcattgcagcctctgcctcccgggttcacgccattctcctgcctcagcctcccgagtagctgggactacaggcacatgcaaccacacccggctcatgttttgcatttttagtacagaccgggtttcaccgtgttagccaggatcgtcttgatatcgtgacctcatgaaccgcccgccttggcctcccaaagtgctgggatgacaggtgtgagagttcagcagtattaactacattcatgttaatgatgcgaccatcaccaacattcatttccaggaacactctgtccccagtaaacaacatgtccccgttcctcccagccactggtacctaccattctactttctgtttgtataaacttgacaactctagggtcctcatataagtggaatccagctgggcccagtggctcacacctgtcatcccggcactttgggaggccgaggtgggtggatcacgaggtcaggagattgagaccatcctggccaatatggggaaaccccgtctctactaaaaaaatacaaaaaaattagccgggcctggtggccggcgcctgtaatcccagctactcgggacgctgaggcaggagaatggtgcgaacccgggaggcggagcttgcagtgagctgctgagatttcaccactgcactccagcctgggcgacagagcaagactctgtctcaaaaaaaaaaaaaaaaaaggcgccttataaaagacgatcatctgcatgaaagaaataagccgcagtcatctggagaaaaacaaaacaaattttctgtctcaatgtcgtgtattctctgaaaaggttgaccagctttgatgaacagattctgccaaacctgaatgtgttctttacgaccccagggaagacgatgcggaaaattggtgtggcaccctaacaaaatgatgatagtcattaccgaatagatgcggcgacctcattcccagatcrgaacatcaggcccccggggtgtgcagctgagcgccaggcgttcacctccggacaaggagcacggtcatttctcagaggaacgaataacattaggatcttttcatctttcctttcatgacataccaaacagcgaaagagacgaaaactgtggggagggtgtgctcactggagttcagctccttcaagaaataatctttaaaataaaatcgaggactgcgtgcggtggctcatgcctgtaatcccagcattttgggagrccaaggtgggcagattgcttgaggtcaggagttcgagaccagcctggccaacatggtgaaatcctggttcaaaaattagctgtacgtggtggcacacactcgtaatcctagctgctcaagacgctgagataggagaattgcttgaacccaggaagcggaggtgcagtgagccaagactgcaccactgcactgcagcctgggcaacagagtgagagtccatctcaaagaaaagaaaagaaaaatagagtgtacaataaatgcaatgtgtgcaaatcatcctgaaaccatctaccctcattttcggtccacggaaaaattgtcttccatgaaaccggttcctggtgccaaaagggtggaagtcctccccttcctcctccccgtcccnnnnnnnnnnnnnnnnnnnnnnnnnnnnnnnnnnnnnnnnnnnnnnnnnnnnnnnnnnnnnnnnnnnnnnnnnnnnnnnnnnnnnnnnnnnnnnnnnnnnnnnnnnnnnnnnnnnnnnnnnnnnnnnnnnnnnnnnnnnnnnnnnnnnnnnnnnnnnnnnnnnnnnnnnnnnnnnnnnnnnnnnnnnnnnnnnnnnnnnnnnnnnnnnnnnnnnnnnnnnnnnnnnnnnnnnnnnnnnnnnnnnnnnnnnnnnnnnnnnnnnnnnnnnnnnnnnnnnnnnnnnnnnnnnnnnnnnnnnnnnnnnnnnnnnnnnnnnnnnnnnnnnnnnnnnnnnnnnnnnnnnnnnnnnnnnnnnnnnnnnnnnnnnnnnnnnnnnnnnnnnnnnnnnnnnnnnnnnnnnnnnnnnnnnnnnnnnnnnnnnnnnnnnnnnnnnnnnnnnnnnnnnnnnnnnnnnnnnnnnnnnnnnnnnnnnnnnnnnnnnnnnnnnnnnnnnnnnnnnnnnnnnnnnnnnnnnnnnnnnnnnnnnnnnnnnnnnnnnnnnnnnnnnnnnnnnnnnnnnnnnnnnnnnnnnnnnnnnnnnnnnnnnnnnnnnnnnnnnnnnnnnnnnnnnnnnnnnnnnnnnnnnnnnnnnnnnnnnnnnnnnnnnnnnnnnnnnnnnnnnnnnnnnnnnnnnnnnnnnnnnnnnnnnnnnnnnnnnnnnnnnnnnnnnnnnnnnnnnnnnnnnnnnnnnnnnnnnnnnnnnnnnnnnnnnnnnnnnnnnnnnnnnnnnnnnnnnnnnnnnnnnnnnnnnnnnnnnnnnnnnnnnnnnnnnnnnnnnnnnnnnnnnnnnnnnnnnnnnnnnnnnnnnnnnnnnnnnnnnnnnnnnnnnnnnnnnnnnnnnnnnnnnnnnnnnnnnnnnnnnnnnnnnnnnnnnnnnnnnnnnnnnnnnnnnnnnnnnnnnnnnnnnnnnnnnnnnnnnnnnnnnnnnnnnnnnnnnnnnnnnnnnnnnnnnnnnnnnnnnnnnnnnnnnnnnnnnnnnnnnnnnnnnnnnnnnnnnnnnnnnnnnnnnnnnnnnnnnnnnnnnnnnnnnnnnnnnnnnnnnnnnnnnnnnnnnnnnnnnnnnnnnnnnnnnnnnnnnnnnnnnnnnnnnnnnnnnnnnnnnnnnnnnnnnnnnnnnnnnnnnnnnnnnnnnnnnnnnnnnnnnnnnnnnnnnnnnnnnnnnnnnnnnnnnnnnnnnnnnnnnnnnnnnnnnnnnnnnnnnnnnnnnnnnnnnnnnnnnnnnnnnnnnnnnnnnnnnnnnnnnnnnnnnnnnnnnnnnnnnnnnnnnnnnnnnnnnnnnnnnnnnnnnnnnnnnnnnnnnnnnnnnnnnnnnnnnnnnnnnnnnnnnnnnnnnnnnnnnnnnnnnnnnnnnnnnnnnnnnnnnnnnnnnnnnnnnnnnnnnnnnnnnnnnnnnnnnnnnnnnnnnnnnnnnnnnnnnnnnnnnnnnnnnnnnnnnnnnnnnnnnnnnnnnnnnnnnnnnnnnnnnnnnnnnnnnnnnnnnnnnnnnnnnnnnnnnnnnnnnnnnnnnnnnnnnnnnnnnnnnnnnnnnnnnnnnnnnnnnnnnnnnnnnnnnnnnnnnnnnnnnnnnnnnnnnnnnnnnnnnnnnnnnnnnnnnnnnnnnnnnnnnnnnnnnnnnnnnnnnnnnnnnnnnnnnnnnnnnnnnnnnnnnnnnnnnnnnnnnnnnnnnnnnnnnnnnnnnnnnnnnnnnnnnnnnnnnnnnnnnnnnnnnnnnnnnnnnnnnnnnnnnnnnnnnnnnnnnnnnnnnnnnnnnnnnnnnnnnnnnnnnnnnnnnnnnnnnnnnnnnnnnnnnnnnnnnnnnnnnnnnnnnnnnnnnnnnnnnnnnnnnnnnnnnnnnnnnnnnnnnnnnnnnnnnnnnnnnnnnnnnnnnnnnnnnnnnnnnnnnnnnnnnnnnnnnnnnnnnnnnnnnnnnnnnnnnnnnnnnnnnnnnnnnnnnnnnnnnnnnnnnnnnnnnnnnnnnnnnnnnnnnnnnnnnnnnnnnnnnnnnnnnnnnnnnnnnnnnnnnnnnnnnnnnnnnnnnnnnnnnnnnnnnnnnnnnnnnnnnnnnnnnnnnnnnnnnnnnnnnnnnnnnnnnnnnnnnnnnnnnnnnnnnnnnnnnnnnnnnnnnnnnnnnnnnnnnnnnnnnnnnnnnnnnnnnnnnnnnnnnnnnnnnnnnnnnnnnnnnnnnnnnnnnnnnnnnnnnnnnnnnnnnnnnnnnnnnnnnnnnnnnnnnnnnnnnnnnnnnnnnnnnnnnnnnnnnnnnnnnnnnnnnnnnnnnnnnnnnnnnnnnnnnnnnnnnnnnnnnnnnnnnnnnnnnnnnnnnnnnnnnnnnnnnnnnnnnnnnnnnnnnnnnnnnnnnnnnnnnnnnnnnnnnnnnnnnnnnnnnnnnnnnnnnnnnnnnnnnnnnnnnnnnnnnnnnnnnnnnnnnnnnnnnnnnnnnnnnnnnnnnnnnnnnnnnnnnnnnnnnnnnnnnnnnnnnnnnnnnnnnnnnnnnnnnnnnnnnnnnnnnnnnnnnnnnnnnnnnnnnnnnnnnnnnnnnnnnnnnnnnnnnnnnnnnnnnnnnnnnnnnnnnnnnnnnnnnnnnnnnnnnnnnnnnnnnnnnnnnnnnnnnnnnnnnnnnnnnnnnnnnnnnnnnnnnnnnnnnnnnnnnnnnnnnnnnnnnnnnnnnnnnnnnnnnnnnnnnnnnnnnnnnnnnnnnnnnnnnnnnnnnnnnnnnnnnnnnnnnnnnnnnnnnnnnnnnnnnnnnnnnnnnnnnnnnnnnnnnnnnnnnnnnnnnnnnnnnnnnnnnnnnnnnnnnnnnnnnnnnnnnnnnnnnnnnnnnnnnnnnnnnnnnnnnnnnnnnnnnnnnnnnnnnnnnnnnnnnnnnnnnnnnnnnnnnnnnnnnnnnnnnnnnnnnnnnnnnnnnnnnnnnnnnnnnnnnnnnnnnnnnnnnnnnnnnnnnnnnnnnnnnnnnnnnnnnnnnnnnnnnnnnnnnnnnnnnnnnnnnnnnnnnnnnnnnnnnnnnnnnnnnnnnnnnnnnnnnnnnnnnnnnnnnnnnnnnnnnnnnnnnnnnnnnnnnnnnnnnnnnnnnnnnnnnnnnnnnnnnnnnnnnnnnnnnnnnnnnnnnnnnnnnnnnnnnnnnnnnnnnnnnnnnnnnnnnnnnnnnnnnnnnnnnnnnnnnnnnnnnnnnnnnnnnnnnnnnnnnnnnnnnnnnnnnnnnnnnnnnnnnnnnnnnnnnnnnnnnnnnnnnnnnnnnnnnnnnnnnnnnnnnnnnnnnnnnnnnnnnnnnnnnnnnnnnnnnnnnnnnnnnnnnnnnnnnnnnnnnnnnnnnnnnnnnnnnnnnnnnnnnnnnnnnnnnnnnnnnnnnnnnnnnnnnnnnnnnnnnnnnnnnnnnnnnnnnnnnnnnnnnnnnnnnnnnnnnnnnnnnnnnnnnnnnnnnnnnnnnnnnnnnnnnnnnnnnnnnnnnnnnnnnnnnnnnnnnnnnnnnnnnnnnnnnnnnnnnnnnnnnnnnnnnnnnnnnnnnnnnnnnnnnnnnnnnnnnnnnnnnnnnnnnnnnnnnnnnnnnnnnnnnnnnnnnnnnnnnnnnnnnnnnnnnnnnnnnnnnnnnnnnnnnnnnnnnnnnnnnnnnnnnnnnnnnnnnnnnnnnnnnnnnnnnnnnnnnnnnnnnnnnnnnnnnnnnnnnnnnnnnnnnnnnnnnnnnnnnnnnnnnnnnnnnnnnnnnnnnnnnnnnnnnnnnnnnnnnnnnnnnnnnnnnnnnnnnnnnnnnnnnnnnnnnnnnnnnnnnnnnnnnnnnnnnnnnnnnnnnnnnnnnnnnnnnnnnnnnnnnnnnnnnnnnnnnnnnnnnnnnnnnnnnnnnnnnnnnnnnnnnnnnnnnnnnnnnnnnnnnnnnnnnnnnnnnnnnnnnnnnnnnnnnnnnnnnnnnnnnnnnnnnnnnnnnnnnnnnnnnnnnnnnnnnnnnnnnnnnnnnnnnnnnnnnnnnnnnnnnnnnnnnnnnnnnnnnnnnnnnnnnnnnnnnnnnnnnnnnnnnnnnnnnnnnnnnnnnnnnnnnnnnnnnnnnnnnnnnnagggaggaggagtcatctcgggtgaaagtccaaatgggtgaatctgctcagttcagatgtatgttgtccaacagtcaactgtgttatccttcttttgattttttttaacccactgtttaaaagatgtggaaatagttttttggtttacaaggtgcacaaaaataggcaaggggctggattttgctagagggctgcagttgaccaaccccgggttagaccattaccattgtcagtgggcacacaaagtaatgaaattattatagaaaacatgaggcgttgtttactggaaaggggtcttgatcctgaccccaagagagggttcttggatcttgtgcaagaaagaatttggggtgagtccatagagtaaagtgaaagcaagttgattaagaaagtaaaggaataaagagtggccactccattggcagagcagcaccgagggctgccagttggtgatttttatggttatttcttgattctgtgcgaaacaagggaaagattattcgtgagttttctgggaagccggtgggcggttctgggaactgagggttcctcccctttttagaccctatagggtaacttcctgacattgccatgacatctgtaaactgccatgaggctgatggaagtgtcttttagcagcgaatgcattagagttagcgtataatgaacagtgaggaagaccagaggtcagtctcgtcgccatcttggtttgcatggggtttggccagcttctttaccacaacctgttttatcaacaaggtccttaggacctgtatcttaatgccgacctcctctcatgccagtggtcatgtgcattcatctggctggaagggtatctttttttttttttgagattgggttgtcactgtgttgcccaggctggagtgcagtggcacagccttgaccttctcagctcaagtgatcctcccacctcagcctcccaagtagctgggactacaggcatgcaccaccatcaccacacccagctgctttttttttttttttttttctgtatttttggtagacacgaggtttcaccatgttgcccaggctggtctcgaactgctaggctcaagcaatcctcctgcctcagcctcccaaagctctggtattacaggcatgagccactgcacctggccttcaggactatcttcagacacttgttgtagcctcttcatttctgcacatccctccccagcggagatgctctcacaaattgctcataaggaaatttcttgtgggctccaaaatctttcccctaaaacagagttctgttgaatttctccctgacaatgtaaattaacaacttgtcttcacaagtgtgggacaaagataagactagaaatgatctctccgcccaccctgagacaaatgcatgtttgacatcttcctcttctgtatgttgactttgtcttatgcaaaagtggatttactgtgcatgaaatgaacgcgtgattgactgttcctctacccgcactttgccatgtaaaatgtgtattcagagagtgccaatcaaagactcacaagaatgtaatcatttgcctcttttatctactctccttcttttttttttctttcctctttccctcctgcctgcttttttccctttctataccaaagccctcaaaaccatccttggaaaaagcacagggccgcacgcagtggctcacgcctgtaatcccagcactttgggaggccgaggcaggtggatcacctgaggtcaggagttcaagaccagcctgccaacatggcaaaaccccgtctgtactgaaaaataaaaaaaatagcagggcgtggcgttgcatgcctgtaatcccagctacttgggacagtgaggcagaagaatcatctgagcccgggaggcggaggtggcagtgagctgagactgcgccactgcactctagcctgggccacagagcaagactctgtctcaaaaaaaaaaaaaaaaaaaaaaaagccaggcgcggtggctcacgcctgtaatcccagcactttgggaagccgaggcgggtggatcacctgaggtcaggagtttgagaccagcctgacaaacgtggtgaaagcccatctctagtaaaaatacaaaaattagccgggcgtggtgacgtgcacttgtaatcccagctactcaggaagctgaggcaggagaatcacttgaacccgggaggcgaagggtgcagtgagccgagatggcgccattgcactccagcctgggcgacagagggagactccgtctcaaaaagaaaagaaaaagcacggagcacaggtcctatggtgactggcgtctgtttttcctggactggggcacattctcaaccgtggcaaaattaacctctaaactaatggaggcttgcctcactcatcttctttgattcaaaactttgagttaatccatttatgcctgaagttgcaagtttttgaatttttgccatcagatcttggcgatgaccttgagcagtaggatataaataactccacatgcttagcattccaataatggaacactaggcatacgtgggtttaatcaaaggagagatcatctgtgctggacctgcctcaaagagggtgagatgaatgagtaattcttcttcttcaaataaacttgagatggtctcagagatccttttcctggtttttgttgttattattgttgttgtttttgaggcagagtcttgctctatcacccaggctggagtgcagtggtgcaatctcggctcactgcaacctccacctcccaggttcaagcgattctcctgccccagcctcccaagtagctgggattacaggcgcccactaccatgcctggctaatttttgtatttttcgtagagacagggtttcacccttttggccaggctggtctcgaactcctgagctcaggtgatcttccccacctcagcctatcacagtgctggaattacaggcgtgagccaccgcagccggccctttttgctggttttgaagaagcagactcccatatgacaagttgctgagggtgtcacagcaagcagagagccaccattgtctgacagccaaaatgaaaatgagacttggccgggcgcggtggctcacgcctgttatcccagcacttttggaggccaaggccggtggatcacctgagatcaggagtttgagaccactctttccaacaaggagaaaacccgtctctactaaaaagacaaaaattagctgggtgtggtggcaggcacctgtaatcccagctactggggaggctgaggcaagagaatcacttgatcttgggaggcggaggttgcagtgagctgagatcgcgaaactgcactccagcctaggcaacagagtgagactctgtctcaaagaaaagagagaaaatgtgactcaatctcacaaccacaagaagctgaattttgcctcccaattcagcatgcctggaagagcatcctaagctacagatgtcatctcagctttgtctgacaccttaattccagccttgtgagactctaaatggagacatcctgttaatctaaacccaatcttctgacttacagaactgtgagatcataaaggggtgttgttttttaarctactacgtttggggcgttttgttacgcagcagagctagctaagatggatggctccttaagcagctcatttgagggcagagggaggcaasttctgcagacagatgggcatctatattcgctaggttcaagctgttaatgctgctatgtatacccaaatgacctcactaccttctcaccaggcagcaagaaacaggatcctcagacgaacagaagtccaacaccttagtctaagtctgtttatgttctcctgataggaaatcttttcatctcataaaaagctgctgatgtaggcctttstcaccctgtaccccacgttactgatgcctgttttgttgccaaactggactggtgtccacttgcctggtgcacttaggtcaaacctccacaatgaggctttgcagcaagagaaaggatagtgtttatttggacagcaccaagccaggagactcaggcagctcacgcttaagacctaaccttttttttttttttattgaaacggagtttcactcttgctgcccaggctggagtgctatggcgtgatctcagctcaccgcaacctccacctcccgggttcaggcaattctcctgcctcagcctgctgagtggctgggattacaggcatgcgccaccacgcctggctagttttgtacttttagtagrgacagcatttctccatgttggtcaggctggtctcttaactcccgacctcaggtgattccctcgctttggcatcccaaggtgctgagattgcaggcgtgagccaccgcacctggcctaagacccaatcttttcaatgacttccgagccatagtgtttcaagtcgggtaaatttcaggacagaagctgctccaggcaaaatcatgaggacgaagttctgatttttttatcttgcccaaattcctatstaaagggtctagggagtcattctttacaaaccatgagttctcattagatgggttttatttaaccctatatatcgtaacttactttccaatgtgactctggcataacataatgagacaaggaaaaacaatgtatttaaccccaaaatatatttccttgccataccttgaaattgccctgagaagtctcttgtgggannnnnnnnnnnnnnnnnnnngcccccttttaggtctgataagaaacattttacaacctgttctctctgaagtctgctatctgagagcttcctgtgcaaaataaaacttggttcccacaatcctttatctccacctggacatttcctttctgttgattccaggtcttcagataaactcaaccaattgtcaaccagaaaatatttaaacttacctatagcctggcagcccccaggttgagttgtcccacctttctgaaccaaaccaatgtatttctgaaatgtatttgattgatgtctcatgccttcctaaaatatataaaatcaagctgcaccccgaccacctggggtacatgttctcgggatctcctgagggctgtgtcacgggccgtggtcactcatatttcgctcagaataaatctcttcaaatattttacagagtttgactcttttcatcaacaattataaatcacggctgggcgtcgtggctcatgcctgtaattctagcactttgggaggccgaggtgggcagatcacgaggtcatgagatcgagaccatcctggccaacatggtgaaaccctgtctctactaaaaatacaaaaattagctgggcatggtggcgcgtgcctgtagtcccagctatttgggaggctgaggcaggagaatcgcttgaacctgggaggcggaggttgcagtgagccgagatggcaccactgcactccagcctgggcgacagagcgagactacatctcaaaaataataagtaaaaaaaaaatcataaatcaatacatggaagctatacgttggtttggcctaaaaagggatatcttgggccaggtacggtggctcatgcctgtaatcccagcacatttgtaggctgaggcaggcagatcacctgaggtctactagtagttcaagaccagcctggccaacatggtgaaaccccgtcttgactaaaaatacaaaaaattacccaggtgtggtggcaagtgcctgtaattccagctacttgggaggctgaggcaagagaatcgcttgaacctgggaggcagaggttgcagcgagccaagatcatgccactgcactccagcctgggcaacaagagcgaaactccatctcaaaaaaaaaaaaaatatatatcttgaagctgggcccgagggtggggttgcttacaggaacaaggtggattcaaagacttttggacttgcaattggttaaggaagtggagctttgtctaagacttgcggtcagcagtaaaagcacattggatctggcccattggcaggacctcctccaggaccctcaggaagaaatttaaaacaaggaacagggatcagagttcagtccctagctctcccacgtctgaggtcttcatgccagaggattccatagggtagaggtggtgagtttcttttattttttttaattatactttaacttctggggtacatgtgcagaatatgcaggtttgttactaggtatacacgtgccatggtagtttgctgccatccatcatctacattaggtatttgtcctaatgctctccctcccctagtcccccagtccccgaaagacccctgtgtgtgatgttcccctccctgtgtccatgtgttctcattgttcaactcccccttatgagtgaaaacatgcagtgtttggttttctgttcctgtgatagtttcctgagaatgatggtttccagcttcatccatgtccctgcaaaggacatgaactcatccttttttatggctgcatagtattccatggtgtctacgtgccacattttctttattagttgctctagggaagcgaacatccctgactctaatttccttggttgttattttaagctactgtgactttcttcttcatcaagttgctcattaacttctcccagccagcgaagtgcctggagtttccttcctggaaggaactcaagatttctcttgatttccatgcttggtcgggggtggagagagtttcctggtttgcccctaagaggggtccctgcccggtctcagttcctcaagctttctctttagcacctttagcagacagatactatcacagcttacagtgcttgcagcatgggtggtggcgtggggattttgatgccgttggattttccccactttttccattttgtgcccagaagcattactcttgaagcatttaaatttgaacacagtgggaaacagcttcttaggaattaagttttaactggtttccagtgtatccaaacagcagacaggtagacccttggtaacttctttttgatgtataaacaactcagaccattaaatcgacgctcattagcaacctatgctgctcatccaagctaccctgaagtttacttttagcccagtcctgtgggtggataatggtttcaacgcattcccaggaggacgatttacctccttggagacagaattgttcttgaaagctcttcacaagtccgcgtttccacggcaacatcaagattgacttctcgcccttgggtagtgccttgtcttcgaaagcctttctttcctctttacttacacaagctctttggggcatctgctctttgcctcgcgggtgggtcaatggtgctttcattttaatcttcttttctagactagacctgggagtcagaggacaactttaattatctgaacactttaccattctgacaacaatatttacagagtttatcctgaaggtggtttctgaggacagctgtgtatccgaggagcattgttttaacttgagttctctcgtagtgatgtatctcaagtgctcaagagggagaggagggccatcgtagtaaacacaatgaaaacaaaggcgtcacccacttatttatcccaccatgccaggcagctctctccccatctctctctttctctctctgtatgtctctctctctttctctccctctctgtgtcacaacctctgtctctctcattctattcctctctgtccctctctgtcactttctctgtgtctctcctctttctctctctctgtctctcgcttattctctctgtctctcagtttctgtgtctctctccttctgtctctcttttttttttttttgacacagagtgttgttcttctcattcagtctggggtgcaatggagtgatctcggctcactacaacctccgcctcccggattcaagcgattctcctgcctcagcctcccgagtagctgggattacaggtgcccgccaccacgctcagctagtttttatatttttagtagagacggggtttcaccatgttggccaggctggtctcraactcctgacatcaggcgatccacccgcctcggcctcccaaactattgggattacaggtgtgagcctgtatctgtctctctgtgtctctctggcacactctctgtctctttcaagctctctttctgtgcttctatttctgtgtcacaatctttctctctgtctctttcctccctctgtctctctctttctctcccattctcaccctctctttctccataactttctctgtgttttgttcttttttcttcctctctcttgcttattttctctctctctccctctctctctctctctcacacacacacacacacatatacacacacacacacagaataatctcgctgcagcgtctttcacagtaggtcttaggggcagatggatagctgcctcatacaaagaaaataggatttcaggtctccagagaggcgctccatacctgcataacgactaagagatactggtatttcacctttatttttaaattgataaatatatagaaatgagagacgcagggggtgacaaccaatctgccctccttcttggcaaattccggcagttcgggcacctgggttccttccctcctgaatgaagagaggccagaagccatcatgagcttcgtccctgctcaagactttgcaggctgtggtcgcatcagctcttggctccaagaactgggctttttgggtagcaggacggctgttgctacccacaagtgcgggaagaactgtcctctggctgcctggatcccggaggttctggcttaccaggacactcgtgaatttattaggatgcgtagggacggggcaggtgcagacggattcaggggctgtgttggctgttggtagatgcttgaaagctgttgctgctctgagctgaacgccttctccacaagcgctgcctcctggtctaaatgatgggtttttattttatattattttgagacagggtcttgctctgttttctaagctggagtgcagaggtgcagaggcataatcatagctcactgcagcctcaacctcctatgctcaagcagtcctgccacctcagcctcccacgtagctgggattgcagacatgcaccaccacactcagataattttttatgacttccttttgtagaggtagggtcttgctatgttgcccaggctgctcttgaactggcctcaagcaatcctcccacctcggcctctcaaaatgctacagtgacagggtgagccaccacacctggccatgatgattttcaaattagcccagttgggttacaaggttgactaagatctgattttcaggtagtggttatggacacacttatcacatttattctaggagctctttaataatatttcagaatggacagcatttctggaaatttttttcttagtattaaatacatttgcttttgtatgtctcagtggaagacttctttaagtttacatttttatgatttttttcttctgtatatataaatgttactcatcaagcaattcctgccctcctagcaaatttcttctgctatgcttttttcagaatttctatcagaacagcataaatttcacaaaacaaaccacctcagactctttttgtccaaccagtcagtatcagggcacttatctgttctttgaaagtctagaagaattttctaaaataccctctgcactcatctaccctttcttcatgccattctttcattattcttctctatttttcttatagctattggtctgattagacctaatttccttgattgaattgggataattagtatctctgagaaaattatttcctcgagattttcacattttacttacaaatgtaacatattatcaggatactaagaaacagaaacctatcattttacagcttttttcatacagtacagtgtttcctatttgtaagtttgcatttcctgcctcattaaatatattattgacagtattttctgggaccttgtttctccttcttccttccttccccgtttccacccatcctttcctccttccctttcttccctcctttctccctccctccctttctttcttccctccttccattcattcttgcttccctcccctcccctccccttccctctttccacccatcctttcctccttcccccacaatgttgattttgttcatttctccctgcctacctaggaattcttgaaaaatatacttggatattgtgttattctgaagaaaatgctgtgaaaatggcacattatagcttcatctcaattcagcatttggtttatgattttcaagttagccctgttgggttacaaggttggttacacagatccaaaccatgccttcataggcgatgatcctccttgttccattaacgttttagacttgaatcattgctgtcttgtgtgactagggccatttctacttggtttttgcttgtttggctgataaatgtgaacgttttaacaattsttgaacaattgttaaaacaattgtcgaacaattgtcgaacagttgttttaacaattgtaattcctcctttttaatactctgtatctttaccatcaagatacagacatcacctttttcasaggctctgagtgtaggaggccaccattttggctttatatcatgaccagtaactgggagcgccctcgttggctgaagctgtacttcctgcttcttttctgttcttgccacatggataactggtatactccatcttattccatgagctacgtggcagacactcatttcgtagctcctaggagtgcgttaaatactcccaaacactctaactttcatttctctaaattatctaaatagaatgaaggtatcgttgaaggtactccaggtggaatgaaaaaacctatctcaagtcttccrgagatcctcctgtgttcggttccctggtccctctcatggtgccctgggaaagggacgcagctcctacatgggttaggttccaggtgaacgcagccactgagctcctagcaagtacgatttcctgtgtcctatgcgcagatcaccctggtgtcttggtccagtgggcttgaagcctcatactcttttgtttttccttgttttttwttttwttttttttatttttattactttttttttttttgagagggagtcttgctctgtcgcccaggctggagtgcagtggcacaatctcggctcactgcaagctccgcctcccaggttcatgccattctcctgcctcagcctcctgagtagctgggactacaggcgcccgccaccacgcctggctaattttttgtagttttagtagagacagggtttcaccatgttagccaggatggtctcgatctcctgacccctcgtgatgcacccgcctcggcctcccaaagtgctgggattacaggcgtgagccacccaccccccggccttgtttgttttcttttaaaaannnnnnnnnnnnnnnnnnnnccccggccttgtttgttttcttttaaaaaaaattcatgaggtacacgtgcagctttgttgtaagatacattgtgtagtgctgcggttcacgcttcagttgaacctgtcactcaaacggtgaacaaaatacctcataggtagagttttagcctttacacccctctccctcccctgctcttggaatgcgcaggtgtgccagcttcccatttttatgcctgattattcaatgtttagctcctatgtataattgagaacaagtggtatttaattttccgtttctgtgttaattcacttaggataatggcctccagctgcatctgtgttgctgctaaaaacatgmtttcattcttttttatggctctatactattctacggtatatatgcascaactacattttcttcatccaacacataattgatggacacctgggctgattccctcatgcctcccaagattgaatcaggaagaaatcaratccagaacagactcatttcatracaagttatgaaattgaatcagtaatttacaaaaacctatcaatcaaaaaaaaaaaaaaaagccccaagaccagacaaattcacagctgaattcgaccagatgtacaaagaagagctggttccaatctgactgaaacgattctaaaaaattgaggcggagggattcctccctaacttattctacaaaacctgtatcatcttgataccaaaatctgacaaggacacgacaaaaatagaaaactacaggccaatatcccagatgaagatagacgcacaaatgctcaaccacatactagcaaacagaatccagcagtgcgtcaaaaagatgactgatcatcgaaaccttgtctctactacaaatacaaaaattagccaggcgtggtggtgcgcgtctgtaatcccagctacttgggaggctgaatcgcttgaacctggcgggtggaggttgcagtgagccaagatcgcaccactgcgctccagcctgggcaacagagcaagactctgcctcaaaaaaaaaaaaaaaagataattgatcgcaatcttaattgtgggcttcattcctgctctgctctttgtccaaagagatttttctgaatgtcaggggtgaagttcaagttctagcacccagtgagcattctgccttcccctgctgcagggcttgatgtatcggctcatcttcccctagtgatgccagccataccctgttccccttacccttcctaccagtgtttcttcttggtgcgaggtagctcctgaatggatgcaaaaaaaaaaagatgctgattgcaagaatgagcaaagcccgttggttgcctgtattactccgttctcacactgctctgaagaaatacctgagactgggtaatttttaaaaattttaagttccgggtacatatgcaggattgtacatagataaacatgtgccgtggtggtttgctgcacctatcaacccatcacttaagtattaagcccagcatgagttagctattctttttattattgtactttaagttctggggtacatgtgcagaacatgcaggtttgttatataggtatagacgtgccatggtggtttgctgcacccatcaactcgttatctacattaggtatttcttttaaagctatctctccccttgccccccaccccccaacaggccccagtgtgtgatgttcccctccctgtgtctctgtgttctcattgctcaactcccacttaagagtgagaacatgtggtgtttagttttctgttcttgtgttagtttgctgagaatgatggtttccagattcatccgtgtccctgcaaagcacatgaactcatcctttttaatgtctgcatagtagtccatggtgtctatgtgccacattttctttattcagtctatcaatgacgggcatttgcgttggttccaagtctttaatattgtgaacagtgctgcagtaaacacacatgtgcatgtgtctttatagtaggatgatttataatcctttgggtatatacccagtcatgggattgctgggtcaaatggtatttctggttctagatccttgaggaatcgccacagtgtcttccacaatggttgaactaacttccactctcaccaacagtgtaaaagcattcctgtttctccacatcctctccagcatctgttgtttcctgattttttaatgatcgcccttctaactgatgtgaggtggtatctcattgtggttttgatttgtacttcactactgagcaggcattagctatttttcctgatgctctccccctccctgacccccacccacaacacgccccagtgtgtgttgttcccctccctggtccatgtgttctcattgttaagcacccacttatgagtgagagtgtacagtgtttggttttctgttcctgcattagtttgccaagaataatggcttctagctccatccatgtccctgcaaaggacatgatctcgttcctttttatggctgcatagtattccacggtgtatatgtaccattttttttaatccagtctatcattcttgggcatttgagttgattccacatccttgctattgtgaatagtgctgcaatgaacatatgtgtgcctgtatctttataatagaatgatttctatttatttggatatatacctagtaatgggattgctgggtcaaatggtgtttctggttctaggtctttgaggaattgctacactgagactgggtaatttataaagaaaagaagtttaattggctcatggatctgcaggctgtacgggaagcagagcagcttctgcttctagggaggcatgaggaaatgcataatcatagtggaaagtgaaggaaagcaggtgtcttacatggccctagcaagagaaggagagaacagaggtgcagttggggtgggctggggagatgctacacacttttcaacaaccagatgccacgagaactcattcactattgcaagcacagcacccaggggatggcactaaannnnnnnnnnnnnnnnnnnnnnnnnnnnnnnnnnnnnnnnnnnnnnnnnnnnnnnnnnnnnnnnnnnnnnnnnnnnnnnnnnnnnnnnnnnnnnnnnnnnnnnnnnnnnnnnnnnnnnnnnnnnnnnnnnnnnnnnnnnnnnnnnnnnnnnnnnnnnnnnnnnnnnnnnnnnnnnnnnnnnnnnnnnnnnnnnnnnnnnnnnnnnnnnnnnnnnnnnnnnnnnnnnnnnnnnnnnnnnnnnnnnnnnnnnnnnnnnnnnnnnnnnnnnnnnnnnnnnnnnnnnnnnnnnnnnnnnnnnnnnnnnnnnnnnnnnnnnnnnnnnnnnnnnnnnnnnnnnnnnnnnnnnnnnnnnnnnnnnnnnnnnnnnnnnnnnnnnnnnnnnnnnnnnnnnnnnnnnnnnnnnnnnnnnnnnnnnnnnnnnnnnnnnnnnnnnnnnnnnnnnnnnnnnnnnnnnnnnnnnnnnnnnnnnnnnnnnnnnnnnnnnnnnnnnnnnnnnnnnnnnnnnnnnnnnnnnnnnnnnnnnnnnnnnnnnnnnnnnnnnnnnnnnnnnnnnnnnnnnnnnnnnnnnnnnnnnnnnnnnnnnnnnnnnnnnnnnnnnnnnnnnnnnnnnnnnnnnnnnnnnnnnnnnnnnnnnnnnnnnnnnnnnnnnnnnnnnnnnnnnnnnnnnnnnnnnnnnnnnnnnnnnnnnnnnnnnnnnnnnnnnnnnnnnnnnnnnnnnnnnnnnnnnnnnnnnnnnnnnnnnnnnnnnnnnnnnnnnnnnnnnnnnnnnnnnnnnnnnnnnnnnnnnnnnnnnnnnnnnnnnnnccatccacccatccatccatccatccatttatccatccatctatccaatccatccatccatccacctatccatccatctacccatccttccacccatccatcaattcatccgtccatccgtccatgcatgcatccatctgtattagtctgttcttgcattgctataaagaagtacctgagactggatgatttataaagaaaagaggtttaattggctcatggttctgcaagctgtacaggaagcagagcagcttctgcttctggggaggcctcaggaaacttacaatcatgatggaaggtgaagtggaagccagcacgtcttaatggctagagcaggagcaagagtggaggggaggtgctgtgcacttttaaacaaccagatcttgcgggaactcattcatggtcacaagaacatcaccaaggggatggcgctaacccattcgtgagaaatccacctccatgatcccatcacctctccccaggccactcctccaacactgcggattacaattcaacatgagatttgggtggggacacagatctaaactatatcaccacctcgcaagccagtgatctcaatagaatgctgatgttcatgttgctagtggctataagccttttttctcaaggagcaagaaaaatgcatcttctagtttttttaaaaaaaatccattcacactgctgtttttggaagctcagcttgtgcttttacccatcctttgatcactggttccaattattagcagtagtatgggttttcctctttcttacatccccacaagtgtttttgtggaaaattacagcagtacctcaggagtttctatccagatgacactgtgctcagaatcagcgcttttaaactctccatggcaaaactgcctctcccctaatctgcagcagattgataactgccgtagatacaataaaaatgaattactaaaaaaaatgcatttaagaaacatggaaactagaagctctcagtgtgttttttttaagtcattggattgaacaaagcttaaatgactgtcattattttttaagtttctaaacatttactttcaatttctgaacatgtctcaccacagacagcttgcagtaacagttcacagagtggcagccgtctgattcaggagtgtgtgtaccatcataccatccaatatattactttatttatttatttatttatttatttattttttgagacagtctggctctgtcacccaggctggagtgcagtggtgcgatctcagctcactgcaacctccacctcccgggtttaagcaattctcctgcctcagccatccaagtagctgggatttcaggtgcctgaccccatgcccggctagtttttgtatttttagtagagatgcrgtttcaccgtgttggccaggctggtcttgagctcctgacctcaagcgatccgcccgctttggcctcccaaagtgctgggataacaggtgtgagccactgcacctgcccacccaactgtatttctcttaaggaaaatattgaaagtacttatttccttttccttgatggcctggtgacttggtacagatgggcttcattctccatgatgaggaagctgttatattatcttaaaacatgccttccaagagaaggttaaagtatatatttcagatcacaaggtcaggagcacttttggctgccacgtttggctgactcttggatgttgagttatttaaagtgtcctagatcagccacaataaaacaaaacctaatcactgtgtctcaacctcaggtgtgtgctgcaggaagcgccagttcttgtgatatcggagccatgtccacctctgttctggggacccgggaccccacgggttggtctgagtatgtcatcaagagctagatgaggccgggtgaggtgcttcacacctgtaatcnnnnnnnnnnnnnnnnnnnnatcccagcactttgggaggccgaggcgggcagatcacaaggtccggagttcaagaacagcctgggcaacatggtgaaaccctgtctctactaaaacacaaaaattagccaggcgtggtggcgggtgcctgtagtcccagctactcaggaggctgaggcaggagaattggttgaatccaggaggtggaggttgcagtgagccgagatcgcaccaccgcacttcagcctgagctacagggtgaaactccatctcaaacaacaacaacaaagaaytaggtgaaaagacctggcgtgctcctgcagcgcaaccagccgtgatcatacaaagaccagaatgctgcaggatggcatgtcatggcccatccctctcatctctgctccacgcagcaataagaccaaagctaacctgcttccagagacacctcgtggaaatgtgcaaggctcagcaaagaaaggctaatatctaatgattcatgtatttacacagctttttttttgagatggagtctggcactgtcaccaggctggagtgcagtggcatggtctcggctcactgcaacctccgcctcccaggttcaagcgattcccctgcctcagtctcccaagtagctgggattacaggcaatgcaccaccatgcccagctaagttttatatttttagtagagacagggttttgccatgttggccaggctggtctcgaattcctgaactcaggtgatcgcccgcctcagcctcccaaagtcctgggattacaggcgtaagccactgcgcccggcctgcttttttatttcttactagcacgagaacttagagtgatacaaatcttctgaatattttggctgcattctgcagacggtgacaccttctgtttccgtggatattatttataaaacatttttgtcacctgctatgaattgttaccctgtccacatgctttaaaagggcagtttttgaaatcaacatgagtttgggcactgggaaattgcatacttaataaaattaaacattaaaaaggggctctttctgctttcctatcaactcaggcagcagggtgatagatatagggggtgagggatgcaccctgtgttggccagggttctctagagggatataactaacaggataaatagctatatataaaggggggtttattcagtattaactcacaggatcacaaggtcctacaataagctgtctgcgagctgaggagcaaggaagccagcccgagtgctaaagctgaagaacttggagtccaatttttgagggcaggaagcatccagcacgggagaaagctgtagcatgggaggctaggccagtctaaccttttcacattcttttgcctgctttttgaatgtgctgtgctggcagctgattagatggtgcccaccccgattaagggtgggtctgcctttcccaccccactaactcaaatgttaaacttgtttggccacaccctcacagacacacccaggatcaatactttgcatccttcaatccaatcaggttgacactcggcattaaccatcacacctggtgtgtgtttctctgattataaggacaccagtcctactggacgagggcctcacccttttgagctcctacaggccctgtctgcaaataaagtcacattggagtttaagggttctgatgatgagtgagggagggcacggctcagtctataaygatgtcctatatctattgcaaagaaaaaatgaaggcactattcaattcctccaaattaggaggtttgccagagcctcagacaaaaggattttttagggaggtacagttcattccataatgatgttctctatcgcaaagaagaaggggtaattcagttcctccaaaccaggcgatttgccagaactccaaacaaaaggaatttttttttcttcttgatccctatttatcaacacatgcctctgtgtctttccagttgacttcatctcttgggyagcattaatttcagaaatctgtatttctgacttgccctcaggaaacccctttagatgttagaaattcttctgtggatgaagttatctttttttttttttgagacatagtcttgctctgtcgcccaggctggagtgcagtggtgtgatctcggcttactgcaacctccacctcccaggttcaaacgattgtcctgcctcagcctcccgagtatctgggattacaggcgtgcaccaccacacctggctaatttttgtatttttagtagagaccggatttcaccatgttggccaggctggtctcgaactcctgacctcaggtgatccacccatctcagcctcccaaagtgctggggttataggcatgagccaccacacccggccagatgaggttatcttcttgagtctcagggtttactgtctgtcactgagttgcaaataaaagaaaagttggatgagttattggcagcctcaagagcaacagtgagaattgtagactcactttctgcattggagggtgtggtgtgtgggctacgggaagcgtggacatcattcaccatgctaggtgccgagaggggcatcagacacagcaggtgcgtgaatctcccgtcttcatatgatactgtctcactgtcagaatcacagtgacagaaggcatttgttactgtggattcacactccgttagggttaagatttttattctgtgtgagttccttagggttactgtgaaaagcacatcttatcttctctcgataagttttaagtgacatttaaaaatattcaagcatgtgacttgaccgaattgcttagcatttgagttgttgcattaaatggagcatctcgtcactttcaagtatttgatactggcagttgctaagagttaaaaggcagctggatttgtcgcagacaatgagttaaggaatccttccacatttttcccaattttttttttttttttttgagacagagtttcactcttgttgcccaggctggagtgcaatggcacgagctcggctcaccgcaacctctgcctcccaggttcaagtgattctcctgccttagcctccctggtagctgggattacaggcatgtgccaccacacccggctaattttgtatttttagtagagacggggtttctccatgttggccaggctggtcttgaactcccgacctcaggtgatccgcccacctcggcctcccaaagtgctgggaatacaggcgtgagctgccgcgcccggcccgtttttcccaactttaaaagtaagggttctcaggaccctgtgtagagcagtgaaaataagacctcgtgtgtgtgtgtgtgtgtgtgtgtacacacgcgcctgcaggagaactgctgttccacttaggtgagaggatgggctgtgtgcttcagaccaggaaatgtgccatcttgccaagcaacctggctgagtgtgctggagtcaggatcttgaacagaaacttccttttctggtattgttcactacagagctaaaatggccaaatatatactgtgaaaattgtttttttttttttttaacaaaagaccagatccctccttcagctgtatacatttttgaataaaatcatattgaactaacaaaaaaaaaaaaaacaccaaaactggggaacttgcacaatagaaatatatcctctcccaggtctggaggacaagactttaaatccaaggtgtctcagggctgagctccatccagacgctctaggggaggatccttttggcctcccccggctcctgggggctccaggcatcccacggcttgtggctgtatcactccagtctctgcctctgtcttcacatcatcattttctctcatctgtctcaagcatgcctgttcctcctcctcataaaaaccccaggctaggcgtggtagctcatgcctgtcatcccagcactttgggaggccgaggcgggcagatcacctgaggtcaggagtttgagaccagcccggccaacatggtgaaaccccatctttactaaaaatacaaaaataagccgggcgtggtggcgggtgcctgtaatcccagctacttgggagactgaggaagggaggatcacttgaactcgggaagtggaggttgcagtcagccaagatctgtccgctgtattccagcctgggtgacagagcaagactttgtcaaaaaaaaaaaaactcaaaaagacaaaacaaaaaaaactccgcacgcctgtcatcctagcattttgggcagcagtatgataacaaggccaggagtttgagacctaccttggcaacatagagagaccccctgtctctataaaagctaacaaacaaaaaacaaaaatctttgtcattatatttaggctaatacaggataatttcctcatttgaaaacctttaatgtctaaacaccctattttcatacaaggtaatcttttcacaggttctagagattaggaccaggagatttttagggacggagtggaggataccgtcatttagcctaccacattcttactaccttaggaaaggatggccaggcaaggtggctcacgacggtaatcccagcactttgagaggccaaggcgggcggatcgcttgagcccaggagttcgagtccagcttgggcaatattgcaaaatccgatctctacaacaactacaaaaagtagccaggcgtggtgctgcgcacctgtggtcccagctactcaggaggctaaggagggagaatcgcttgaattcgggaggtggaggctgcagtgagcccagatcacacctttgcactccagcctgggtgacagaacgagaccctgtctcaataaatgcataaataattttaaaaaggaaagtaattcagcacaaacatttgcatattcccaagatgatgctcacagcttgcagtgcctgcctgggtcctattcctatctgcctgggtctatctgcctgggtcctattcctatctgcctgggtcctattcctgtctgcctggggtctatctgcctgggtcctattcctatctgcctgggtcctattcctatctgcctggggtctatctgcctgggtcctattcctatctgcctgggtcctattcctgtctgcctggggtctatctgcctgggtcctattcctatctgcctgggtcctattcctatctgcctggggtctatctgcctgggtcctattcctgtctgcctgggtctatctgcctgggtcctattcctatctgcctgggtcctattcctgtctgcctcgggtctatgcatttcctttttgtctgaggacacatttttgcttcatgctgatatttttcacttcacctttctccccttttcttcttttctctttttccctctccttccctcccctccctctggggcagaagctggcatgcggcagagcgccagcagaggacgtggcccaagctcccatacatcttccctttacctcttccgctgacttttttctgggtgtgcccagagagcctagctctggacactcaaagatgcatcatttcaatgtatgttccaaagttacgtagcatccaaggcatatgagacatgcttaaaaacatactggtcatgcaagtgaggaggtgcaatgatgggtactgtcgttgcgattgcggaagcnnnnnnnnnnnnnnnnnnnnnnnnnnnnnnnnnnnnnnnnnnnnnnnnnnnnnnnnnnnnnnnnnnngaaaacttcctgaaggaggtgacacatttgcgtttacgatccccaagtgaggcacacaagcatctctcggcgagaaccccacagtccatcccagaaaaggaaagtcaagagaatgggctacgtatgggaggaagggaactatttatggtcttcgatgagaaaataaatgtgcgtatgcgccccagctttgtgcttcggtattgccacatgccggaaccgcgtgaaaatacaagccgtcaatacaagcaagtgctagccctcttttattattctactgcagaagaaggaagtccttgcttctgagtcattttgtgtattagttacacatgccgtgtaacaaaataacacagactcagcagcgtgtcctaacagcctggtaatattttatccagaatgacgtgttttagaaagttatgtcctgtcaaagtaatccagataccatttccttttcttcttgtttttttggtattattatactttaagttctggatacatgtacagaacgtgcaagtttgttacataggtatacacgtgccatggtggtttgctgcacccatcgacccgtcatctacattaggtatttgtcctaaagctatcccttccctaaccctccaccccccagcaagccctggtgtgtgatgttcccctccctgtgtccatgtgttctcattgttcaacttccactgatgagtgagaacatgcagtgtttggttttctgttcctgtgatagtttgctgagaatgatggtttccagcttcatccatgtccctgcaaaggacatgaactcatccttttttatggctgcatagtattccatggtgtctatgtgccacattttctttatccagtctatcattgatgggcatttgggttggtttcaagtttttgctattgttaatagttccgcaataaacgtatgtgtgcatgtgtctttatagtagaatgatttataaacctttggtatatacccagtaacgggattgatgggtcaaatggtatttytggttctagatccttgaggaatcgccacactgtcttccacaatggttgaactaatttacactcctaccaacggtgtaaaaatgttcctatttctccaaatcctctccatttccttttcttctccttatacagtaaggaatatgaaactaacacacrctttctctcatttcattctctttctttttctgtctgctctctttgtctttctccctctctctctccctctctttttcctctctctctctccctctctttttcctctctctctctctctttctctgtctctctctttgtcttcttttctctatttctctctgtctctcagtgtttgtcacgctctctctctttgcctctttctgtctcttttttttttttttgagacagagtcttgctctgtcacccaggctggagtgcagtggcgcgacctcggcttactgcaacctccacctcccaggttcatgcgattctcctgccttagcctcccaagtagctgggattacaggcgtgcaccaccacagtcgcctaatttttgtatttttagtagagatggagtttgaccacaatggccaggctggtctcgaactcctgacctctgcccaccttccaaagtgctgagattacaggtgtgcaccaccacagctggctaatttttgtatttttagtagagacgaggtttcaacatgttagccaagctggtctcaaagtcctgacctcacgtgatctgcctgccttcgcctcctaaagtgctgggattacaggcatgagccatcgtgcccggcctctttctttgtatctctctgtctgcctttctctctttgtcccttttactgtctcccgtccctctctctctttctgtttctctctctcactgtgtctctttgtctttatctctgtgtgttttttctctcttccccttttcctccccctccttttttctctttctctcttagcctttctttctttctctctttctctctctctctctgcttctatctttctatctctctctttctcattcttacactccatctctgtctcttctctctctctgatggtgagtggagagtcatttcgttttggaatgatgatgagcattccagtaatagttttggagagtaaggctcatagagcttattaagcaaggtgtgtctgtyataaaattgattgctggcattttacacatcagtgcagacatggggggcacaggcagacccctccccccaccacacacacacactgcttatcctctgaaagctatgtggccttcataaaaatattaacagttcttttacagtaatgattttcccctatgaggctccccagtgaggaggctgtaaatgacactgaccaccagcagccctgcagatcaaggctgttctcttctcggccagcccagaaccagcctctgctcgctccctccctgaggactcctgtctctgacctctgcacacatgctgtgatttgctcttccacctcacaccattccccatcctcacctttcagaactcactggcagtgtcccccaataccttccacctctctccagaaattaccttcccatctcaatgtaagggaacttgcttcttccctcagagatctgctgtctctgctgcaagtaatagctagttttcatgcattttgttctgtctgactttaggttgttgcattgttctcccaacctccttgaacccatggacctggaggcagaattatatacctgtgaatttgcttttctttctagttcctctccctccaaaacctcagtccttctgggaaaaaaaaaaaaaaaacagctttaacacaatcaaacacatcacttttagcgatggagacccactgggaatttagagagaaagagcgaagttgatatactgaatacaatagacataagtctacctctctacctatgtgatgttataaagctgtccctgagtcattcactctctaaaaatgtcatctttggctggacacagctgctcacgcctgtaatccaacactttgggaggctgatgtgggaggctcacttgagcttaggagttcgagaccagccatggggacatagtgagaccctgtctccaaaaacataaatgtaataaaaaataaaatgctttcttttattattcttctgcagaagaaggaagtccttgcttctgagtcattttgtgtattagttacatatactgtgtaacaaaataacagactgagcagcgtggaagagctcatacttactatctgtagcaagggatccataaatggcgtccttttttattattatataaaattctatattctcctgtggaagaaggaagtccttgcttctgagccattttgtgtattagttacatatgccctgtaacaaaataacacagattcagcaacgtggaagggctcgtacttcttactatctgtagcaggggatgcataaattgcttcctgtttgattattatataaaattctatattctatattcctctactgcagaagaaggaagtccttgcttctgagtcattttgtgtatcagttacatatgcygtgtaacaaaataacccacagactcagcagcgtggaagggctcatacttactatcccacagctgctgcgggtcaggaatctgggcaggtgtaactgcattctctcttcggggtctcactgggctataagcaaagtgtcatctggcctgaggtcctctctggagctcaggatcttcgaaattcacatggttatacgcagaatccaattcctggaagctgcagatctggggatctgagtatcttgctggcttttggccaggggctgctgtcagctcctagagaggccatgcccaggttctggccccaaggcgctctcacaaaacatcagctcacatcaaggtcaggaggagaatgacaggtcccacacagactcaaggaaaggggactatacaaggatgggactcattgatctccctagagtatgagctcctcattgtaccctactgacatgtccaattcagtgttacttcctggacaggcgtggtggctcacgcctgtaatcccagcactttgggaggctgaggcgggcggatcacctgaggtcaagagtttgagaccagcctggccaacatggtgaaacattgtctctactaaaaaaaaaaaaaaaaaaaaaaatacaaaaatacaaaaattagctgggcctggtggcatgtgcctgtaatcccagctacctgggaggctgaggcaggagaatcactggaacccaggaagcagaggctgcagtgagctgagatcctgccacagcactccagcccggtcaacagagcgagactccatctcaaaaannnnnnnnnnnnnnnnnnnntgagtttgacctgtttagaaattttcttaatctctgaaataggttgggagataaccacgtattttttgttgttgtccttttccagtggaatttttatactgtgacttggcttccatgacttccatccggcagtttgtgcagaagttcaagatgaagaagattcctctccatgtcctgatcaacaatggtgagtcctggtgaaattgcagcaagccaggggttaatttgaatgcaaacaggaactctagctttcatgcgggagaagtgtctcagcaaaacaggatatccatgggaattattgaacatacctgctatttctagtcagtgcttcatttcacggatagctttggaagagcatcattcttgttagcatgttactttgaaataatggtaaacgcgataacatgttgtatggagttgacacgttgacttgtccacttggactaaagggtatgaggcacatgctaagggttggtgttttcccaaatgttatcttacaaaaccatcaccacattcccctgagagtcattatttgggcactagaarctcattaccatttatctcttgattttaccccctgttcaacattctcacccagataggtggagtcaatatctccccttccccaccttcaatctgcccatctgccaatcttcaacacaaactacccttgaccttgagcccttctttgagcctcgctgagtgcttaaggtcattgcaacgcttactgttgaccttgagcccttctttgggccacgctgagcgcttaagatcattgcaacacttaatgtttctcctcgtaacactgatgcccattactctcatcccctgctgcagtccattttattttttataaaagttaacctgaaccctccacactgaggaggtacagttattgacatctccaaactaagtaaatacatagaactaaaggtctcagaaatacaccaacaaacatgtgtgctagtagaatttaacgcatcactttcacagatggagaccaaatgcaaattcagagaggaaataaatagtgacattaatacagcggatagaacagacgtacgtcaaacagtgagcccataaagacagcacattcctttcaaatacatgaaatatttatcaagttattgacacttcagattgcagacaaaaaaatcagcaaaaggatcttgtgattacccaatgtaattactccattacccacctagaccattaaagattcttaattctgcaaaaccccttgtgctacctaacgtaccrttttcataaattctggagattaggatatggacatgtctgtaaggagggagaaagcattattctttgtactaaagttgtaatacctgtctgtttccagctgccaagatgtggtagcttctatctaatttttttttctttttgtcttgatgtgtttcgtgtttttgtataacattaatgggattggaggataggaaagtggatgagatacccacggttccccctcaacccacttgtttaattggaaattattatgctagagtttaaaggagaagcatgggatataaaactatacatagagtgtgatgccaatttatgcataaaaatttgtacagacatagctatgtgtgagtgcatatgtatttgtatatgtatttgatgtatgatgtatatgtatttatgcataaaaatacgtgcagacatagctatgatgtgtgagtgccactcaaatagctacagacaacaccatttccatgtacttagcctggtaagaaacatcgtattatcagtgctagtggctccctgttggaaggtccggaatgattttaactttgtgtgtcttctttggagatcaataacacttttcagatttgccatcctggtgggatctgaagtttctacgcaggcataaatgatttcccagtcagcagccatttggaatcttctgtctcagcactgggtgtggacttcctttgctgaagacctatcagtattagaagtgattagaattatagcattataagtcaccaaatgtggagaccacttagaggcactgtggagatcctacacgacccgacgtctcatttcctcgttctgtgtaacacccttactcattagtaatgggagcactttatcacagagcagttggagatggaaatacatacatgacatggtgcccttgcacagagacacacaaaacagaactgtccatcctcttaggacttttgtgcgactacttccatccatttggtatgggcttgcatccaccagtaagcagaaaaaattaggaatctcaggccgggcgcggtggctcacccctgtaatcccaacactttgggaggctgaggtgagtggatcacctgaggtcaggggttccagaccagcctgaccaatatggtgaaaccctgtctctactaaaaatacaaatattagccaggcgtggtggcgggcatctgtagtcccagctactcaggaggctgaggcaggagaatcgcttgaacctgggaggtggaggctgcagtgagccgagaccacaccattgcactccagcctgagcaacagagcaagactgtttcaaaaaaaaaaaaaaattaggaatgtcagatatgatatgtttctccagcagaatcttactgtgttctggggggagcagaattttactgagcaatgtgtatatgaaccacatctgtgacagtggatacaggctaacaccagttgacacaggctaaccagcgtatactccatcactcaaccaccacgtttaccttttgaaatggctattgcattcctaggattctcctctgttccttttctcaacagattttaaacaaggcacacagggctctcagaaacaaacaaaaatattctggaaactgggacagggttgaatttgaatcaaaagggtcttgttgttggattgtctctgtaccctatctcttctgtagaaaatctcatgcacatattgggtttacttcttcctagacttatctagacctttcttccatgctaagaccttttaccttcgctcaatgcctcagaggcacctcaagccagtaagtccagtgtgaaattcctgagtctatggctgacactggttctagaggagagtatttccttccccagtttttagaagactgtcagcgtttcttcacccatggcctccaacccggccttaaagccagcaatgatagtggctcacgcctgtaacctcagcactttgggaggccgaggcaggtggattacgtgaggtcaggagttcgagaccaacgtggacaacatcgtgaaaccctgtctctactaaaaatacaaaattagctgggcatggtggcgcatgcctgtaatcccagctactcgggaggctgaggcaggagaattgcttgaacccgggnnnnnnnnnnnnnnnnnnnnnnnnnnnnnnnnnnnnnnnnnnnnnnnnnnnnnnnnnnnnnnnnnnnnnnnnnnnnnnnnnnnnnnnnnnnnnnnnnnnnnnnnnnnnnaacaaagccagcaatgagacacctttgaatctctctttcttgttctctctctctccctctcttcccttctctctctttctctctctcatcttgccttctctttttttttatctccttcacttacttttgttcttctgcctgccttgtagaagaaccattgtgattatttggggcccaccaggatcatctcagataatcacctcatctcaagatcttccactaattcacatctacaaaggcccttttgccgtgaaagtcacattttcatgtgttccagagatgaggacatggacattttttcatcttttgagttattactcttccaaattgggaataggttgtgggcatctctggggtcattattgtgtcgaccacatgagaattagtctgtggacatctttagagccattattcagtcttccacatgaggattaggatgtggacatctttggggccattattctgtttcccacatgaggattagaatgtgaacatctttggggctattattctatctaccacatgggaattaacatatggacatctttggggccattgttcggcttccacatggggattaggatgtggacatctttggggccattattctgtcttccacatggggatttggatatggacatcttcggggccattattctgtctcccacatggggattcggatatggacatcttcggggccattattctgtgtaccacatggggattgggatgtggacatctttggggccattattctgtctaccacatggggattaggatgtggacatcttcagggccattattttgtcttccacatgaggattgggatgtggacatctttgggtcattattctgtcttccacatgaggattaggatgtggacatttttggggccattattctgtcttccacctgaggattaggatgtggacatctttggggccattattgtgtctcccacatggggattacagtgtgggcatttttggggtcatgattctgtctcccacatgaataatgtggacctggacatcttgagttgtgcattatttaacctgccatacctacctactctgcccttcacatacttcgcttgcaggaaaaataaaataataagcaagattcttgacctcatagaaatcatactttagcaacggaaacaaacattggaccaataatcattctgtgaaatgttctgccttagaaaacacacctcttgcaatgtgacaacacagtcttgtaaagtacagagaagattgcaccccaagtcacacgcctccctggaattccccagcctgtgctgctcagaacaccatttccaggaggtgataatgagaatccatttgttacaagatgatggcttgaaataacactttgcactttcttccttttatctttttgttctacatctttcaagaggttgctcaggctgtggctttcctggactccctataggtttttgtggctgactaaggttcatcttgtccctggggtcactgttgagaagagctcagttgcagaggatctggattttttttttttttcctctgtgggtacagacagaagcttctagaaaagagctggagacttcgcttttggaggctgtgttgaatacccattgcccactcttcacaagaagacagaaatgcagagaggcagtctcttgttgacaaatcctcttggttctcttggaaatgcaacagaaccatggagcttcgtgaagcccatgggcttggaaaggggcctcccgaggtacccagggtggatggaaagctgcagggataagtgctcctcaagccagaagtagcccagatggcacagtctatgctgagaatggattcatcaccagcctgtgtgctggaggcttgggccagatgaaccttgatttagagaggaagtaaagcattttttgccttggtttgtgcatcagaattcatcttcatggtgtgcaaatgacgaggctggattctatacagtcagcactgagaatggattcagcacaagcccgtgtgctggaggcctgggtctgatgtacctggatttagggaagaagcaaagtatttttctcatttattgcatgccttagtttgtgcatcagaattcatcttcgtggtgtgcaaatgagaaggctggattctacacagtcagcgttgagaatggattcatcaccagctcttgtgctggaggcttgagccagatgtacgttgatttagagaagaagtaaaggatttttctcatttgttgcatgccttggtttatgcatcagaattcatcttcgttgtgtgcaaatgagaaggctggattctatacagtcaacgctgagaatgggttcatcaccagctggtgtgctgaagcttgggccagatgtaccttgacttagagaagaaatcaaggatttttctcgttggtttgtgcatcagaattcttcttcgttgtgtgcaaatgagattgctggattgtatgtttgggatattgctggtgtcaacttatgtaaatagagtttctatttataggcagcctcagggaaggactccagtggtggtacttttagtgtctaagaggctagtagggggtctgcagacccctaaaccagggctgtccaacccccaggtcatagtaccagtccatggcctgttaggacaccggccgcacagcagaaggtgagtggcaagtgaacaagcaaagcttcatctgtatttacagccactccccattgttcacatgactgcctgagctctgcctcctgtcagatcagcagcagcattagattcttataggagcacaaaccctactgtgaactgtgcatgtgagggacttaggttgtgcactccttatgaaaagctaaagcctgatgatctgtgcatgggaaggatctaggttgtgtgctccttatggaatctaattcctgatgatctgtcactgtctcccatcacccccagatgggactgtctagtcacaggaaaacaagctcagggctcccactgattctatatgatggcgacttgtagaattatttcattatatagtacaatgtaataataatacaaataaagtgtacaataaatgtcatgccccggaatcatcccaaaaccatccccacattccacctccaccttctgtcttcagaaaattgtctttcacaaaagtggtccctggtgccaaaaaggttggagactgctgccctaaactatttccccagaaccttccctccaaaactcctgctagtcaaccacgtgcctcaagtctcatggaaaacagccccagctgagctcagccagggtgacttccaaggcaagaaggagctacacttcgtgcttttctttttttattcttagagcaatcaaggttttgcaaacattaaatacttcagacatagaatatctttttcatttgctagtgggttgaaaatagaacctgactgcctctgtctggctgctgtgggaagctcagaggcaacgcgatgatttatcaagcacaagaataaatcaatcatagacctcctgcagagccggtatttatggtttattcacttcaaaattgtatttatctagcttcccatccccatgtctgaaaattgatagatttttaataatgcagaggatttatagatttatccttgtcagccatcttcccataactctaatggatgaatttctttctgagataatgaattactaagcattatttttcctaccaccaaagaaatacgtccacgatacagggtgaccctgaaaaataacaatgattcttccctggccagagacctaaagactctgttttttggtacagttcttcattcacccattcattcattcattcattcattcaaattcattcattcacttgaatgaattcaaatgagtgaatttgaatgaatgaaagaattcaaatgaatgaatgaattcagaggaatgaatgaatgcaaatgaattcaaaggaatgaacaaatgaattcaaatgaattaattctaaggaatgaatgaattctaatgaatgaacaaatgaattcaaaggaacgaatgaattcaaaggactaaatgaaaggaatgtatgaattcaaaggaatgaattcaaaggaatgaatgaatgaattcaaatgagtgaatctgaatgaattcaagggaatgaataaattcaaatgaaggaatgaattcaaatgaatgaacaaatgaagtcaaaggaacgaatgaattcaaaggaatgaataaattcagaggaatgaatgaatgaattcaaaggaatgagtgaattcaaaggaatgagtgaattcaaaggaatgagtgaattcaaaggaatgaacgaattcaaaggaatgaatgaatgaattcaaatgagtgaatttaaatgaataaattcaagtgaatgaatgaattcaaaggaacaagtgaattcaaaagaaggaatgaattcaaatgatgcaaatgaatgaatggaatcaaatgaatgaatgaattctaatgagttcattcaaatgagcaaatgggcacagggcacctacaagacccatgagagttaaggaagattcattcggggaagcccaggtgtgcagttctgcatcaacagaagactgaggtgcagtggagccggtccttactgaggacccactttttggtggacggacacctgagcagccatctcctgtctttgtgggcgcctggcattttctatgtgactcgggctccacagtcatctggtctccctcccgggaagacggaaagtgttgcatcgcggcgcatgcattcgtcagcggatccttgagtctgcacaggtgtagaccatttattctgcgtgccttctgtttgcttctcttccagagctgctctcctgtggatagagtagctttctgttccgtagtggtttcctctgnnnnnnnnnnnnnnnnnnnnnnnnnnnnnnnnnnnnnnnnnnnnnnnnnnnnnnnnnnnnnnnnnnnnnnnnnnnnnnnnnnnnnnnnnnnnnnnnnnnnnnnnnnnnnnnnnnnnnnnnnnnnnnnnnnnnnnnnnnnnnnnnnnnnnnnnnnnnnnnnnnnnnnnnnnnnnnnnnnnnnnnnnnnnnnnnnnnnnnnnnnnnnnnnnnnnnnnnnnnnnnnnnnnnnnnnnnnnnnnnnnnnnnnnnnnnnnnnnnnnnnnnnnnnnnnnnnnnnnnnnnnnnnnnnnnnnnnnnnnnnnnnnnnnnnnnnnnnnnnnnnnnnnnnnnnnnnnnnnnnnnnnnnnnnnnnnnnnnnnnnnnnnnnnnnnnnnnnnnnnnnnnnnnnnnnnnnnnnnnnnnnnnnnnnnnnnnnnnnnnnnnnnnnnnnnnnnnnnnnnnnnnnnnnnnnnnnnnnnnnnnnnnnnnnnnnnnnnnnnnnnnnnnnnnnnnnnnnnnnnnnnnnnnnnnnnnnnnnnnnnnnnnnnnnnnnnnnnnnnnnnnnnnnnnnnnnnnnnnnnnnnnnnnnnnnnnnnnnnnnnnnnnnnnnnnnnnnnnnnnnnnnnnnnnnnnnnnnnnnnnnnnnnnnnnnnnnnnnnnnnnnnnnnnnnnnnnnnnnnnnnnnnnnnnnnnnnnnnnnnnnnnnnnnnnnnnnnnnnnnnnnnnnnnnnnnnnnnnnnnnnnnnnnnnnnnnnnnnnnnnnnnnnnnnnnnnnnnnnnnnnnnnnnnnnnnnnnnnnnnnnnnnnnnnnnnnnnnnnnnnnnnnnnnnnnnnnnnnnnnnnnnnnnnnnnnnnnnnnnnnnnnnnnnnnnnnnnnnnnnnnnnnnnnnnnnnnnnnnnnnnnnnnnnnnnnnnnnnnnnnnnnnnnnnnnnnnnnnnnnnnnnnnnnnnnnnnnnnnnnnnnnnnnnnnnnnnnnnnnnnnnnnnnnnnnnnnnnnnnnnnnnnnnnnnnnnnnnnnnnnnnnnnnnnnnnnnnnnnnnnnnnnnnnnnnnnnnnnnnnnnnnnnnnnnnnnnnnnnnnnnnnnnnnnnnnnnnnnnnnnnnnnnnnnnnnnnnnnnnnnnnnnnnnnnnnnnnnnnnnnnnnnnnnnnnnnnnnnnnnnnnnnnnnnnnnnnnnnnnnnnnnnnnnnnnnnnnnnnnnnnnnnnnnnnnnnnnnnnnnnnnnnnnnnnnnnnnnnnnnnnnnnnnnnnnnnnnnnnnnnnnnnnnnnnnnnnnnnnnnnnnnnnnnnnnnnnnnnnnnnnnnnnnnnnnnnnnnnnnnnnnnnnnnnnnnnnnnnnnnnnnnnnnnnnnnnnnnnnnnnnnnnnnnnnnnnnnnnnnnnnnnnnnnnnnnnnnnnnctctttctctctgtctctttctctgtctctccccttatttcctccctctccttctctcttcctctctcgtttgccctccctctctctccctgttccctctccatctctctttctctctctttcccccatttcctcctcttccttctctctccctctctcgtttgccctccctctctctccctgttccctctccatctctctttctctctttccccctatttcctccctctcctcctctctccctctcgtttgccctccctctctctccctgttccctctccatctctctttgtctctctttctccctatttcctccctctccttctctcttccttctttgccctccctctctctctcctctctctctctctgattgccctttcatccccatcactctcctttctctggagttctccgcttggagagcggagaactctcccttctcctcccgttcaggatacacctcacctgtgttcactgcttcaggcacaatatgtgattgtgaccctgagcgttcactccccagtaaaatgccattaggtgcacagaccaatgaacgataattgtattgcgtattttccacctttgaattggcagatcaatggacgataattttactgtttattttccacctttgaattggcagatcgatggacgatagttttattctgtattttccacctttcgattcgcagatcaatgaacgatagttctattgtgtattctccacctttgaattggcgaagagacagattccgtgaatgctcctaacgtggacggcacccgatacactgacgtggccacagggttttcttattccttacaaaattcgcaatgaaacatcagtatatttgctgatgattaaaacttgtgcaacaaaatctcagaagtcaccacaaaagaatgtatccatgtagcccaaaaccactggtttcccaaaaattattgaaattttaagaaacaggccgggcgcgatggcccacgcctgtaatcccagcactttgggaggccgacgtggatggatcacgaggtcaggagttcgagaccatcctggccaacacggtgaaatcccgtctctactaaaaatacagaaattagctgggcatagtagcatacacctgtaatcccagctactcaggagcctgaggcaggagaatttctggaacccgggaggcagaggctgcagtgggccgagattgtgccactgcactccagcctagcgacagagtgagactccatctcaaaaataaaattaaattaaaatttaaaaaaaaaggcaaattattnnnnnnnnnnnnnnnnnnnncaaattattattttattttattcatttatttccttttttgagacagagccttgctctgtcgcccaggctggagtgcagtggcacaacctcttctcactgcaatctccgcctcccagaaaaaaacaggcaaattaaatctatggtaatggaaattggaattgtagttaccttagaagaatgtgataattaattttggatcaaaaaagggcttaggggtgcagatgtgggaggcggttacctgagaggggagagtgctcgctttggatgattccattgagatttccctcatgatctctgcacctttttttttttgttttgaaacatagtctcgctgttgtcggccggggctggagtgcagtgcacgatatcagctcactgcaacctctgcctcctgagttccagaaattctcctgcctcagcctcccaagcagctgaaattacaggtgcccgccaccacactcagctaattttttttttttttttgtatttttagtagagacggggtttcaccaagttggccaggctggtctcaaactcctgacctcaggtcatccgcctgcctcggcctcccagagtgctgggattacaggtgtgagtcaccgtgcccagccctgtgcaccttttttatactttcctttgatttaaaagaaaataataacttgacaaaaataaataaatagaattttactgatgccgaaaaaaacatgattatggaaaatttaaaacacatacaaaagcctacaggcatttgaatttgccgtcgattgtctaactagtactcaattctgcatttcggacttccgtcaatccctcctctggggtaccatcatctcttcctaggccatgataatggcctcctaacaggcatctcaggcacccatccaatctctctacctggcaccaatctggtctttcaatgctctgcttacataggaagaggaaaattaatacctaaagccactggcaaagaactcaacaacaaaacaatttctccttcagaatatgtcaggctttcgttccgtaaatatcagcgtttcaggtgggtttgctgcctagaaacgtctccgtgacactgtggtttaaaatacgggtgcgtggccgggcgcggtggctcacacctgggatcccagcactttgggaggctgaggcgggcagatcacttggggtcaggagttcgagaccagactggtcaacatgacaaaaccccatctctactaaaaatacaaaaaaaaaaaaaaaaagtttagccgggtgttgtggtgcacacctgtaatcccagctacttgggaggctgaggcagaagaatcacttcaacccgggaggcggaggttgcagtgagccgagttcaacccactgcaatccagcctgggcaacagagtgagactccatctcaaaaaaaatgaaataaaaaataaaatacggacacactgcactccagcttggttgacagagcgagactctgtctccaaaaaaataataatattagtagggctgggtgcagtggctcacacctgtagtcccagcactttgggaggccaaggcgggaggatcagttgagattaggagttcaagagcagcctggccaacatggtgaaaccccgtctctactaaaaatacaaaaaatagctggccatcggggcaggtgcctgtaatcccatgtactcgggaggctgaggcagaagaatcgcttgaacccaggtaggcagaggttgcagtgagccgacatcacaacactgcactccagtctgggtgacacagcaagagtttacctcaaagtaataataataataataaaataggaataaacgtaattactcgcagtagctcactaacgatgaattatcagcatccagggcccctgcgcgtggctgctgcattcaccacggcgcaggaattcgcacgcagcttccccgccaggcgagtccctagcacggctcggattcatctggagcacaggtcaccacctgcctgcacagaagcactgtcccctctgctcttgcaaaagataccttccccaacgatgctgttgtcaccaagaatttgctcagagctgcaagccattatcctaagagaaccagcacagaaacagaaaaccaaatactgcatgttctgacttacacctggaaggtacacagcgggtactcatggacacaaagatgggaagagcagaaactcttgactgctagaaggtagggggagggaggcaggggatgaaaaaccacctgttgggtacagtggccatttcctgggtgacaggttcactcacagccccaccctcagtctctaatgtgtattcctctattccgtatgccccttcaatgccagaagcatacccagagcttagtgcccacttacaagtgagaacgtgtatttgcttttctgttcttgagtgactccacgtagaataataacctccagttctatccaagttactgccaatgacacgattccactctttttaatggcttagtagtattccattccattttctttatccagtactccacggaggggtacttaggttgattccgtatgtttgcaattgtgagttgtgctgcaagaaacagacaggtgcaggtattttgttttgtattgttttgtttgattattttattttattkatttatttatttttgagatggagtcttgctctgtcacccaggctggagtgcagtggtgcgatctcggctcactgcaacctccacctcctgggttcaagcaattctggggtttctccatgttgcccaggctgctctcgaactcctgacctcaggtgatctgcccgccttggtctcccaaagtgctgggatgacaggcgtgagccaccatgcctggcctgcaggtgtctttttgatataaggacttcttttcctttgggtagatacccaggagtgggattgctggatcgaacaaatgatctgcttttagttctttgagaggaacatccgtgctgttttctatacagcttgtatgaattcactttctttcggggcacaggaatgtaggcagttctgcctggggggtctcctgtggggctgcagctggggctgactttatctgaaggcttgaccaggttggatgtccaggatagctttctctggtgkcaagaagctggtacagcctgtcacctgggcttagctgggagggccaacaagaacaggtacctggggcctctccagcatgtcaggctgaaggtgctcagtctttttaaaccaaagctggctcctcccagactcagcattcccaagaaccaagcaggggccacgtgaccttattgacccaactttggaagtcacacagtgtttacaccactgtrgcattctacaaaagaattaacgagaaagttaatgagcatggccgagattcaagggaaggggcgtagactctagctcccaaggagacgagtgtcaaaagaatttgcaggcctgctttacagccccctgaagctgcctttcaaaaccatgcatgcataagccaggtgttcatgataagctcgtctctcctaagctgggaatttatgacacttcaggcacggattgagctgtgtgtctccagattcttcacatcaaataaaatatgaggaaaatggcatcgtgaaaaagatgtttatagttcatcaaaatgcaaagcttcccatccacccacagcaacctattctggtgtttttgtttttttgttgttggtttttttttgtttttgagacaaaaatcaacttaggttgattccgtatgtttgcagttgtgagttgtgctgcaagaaacagacaggtgcaggtatgtttttttgtttcgttttgtctcactctttcgcccaggctggagtgcagtggtgtgatctcggctcactgcaacctctgcctcccaggttcaagcgattctcctgcctcagcttcccgagtagctgggattacaggcatgcaccaccacgcccggctaattttgtatttttagtagagacaaggtttctccatgttggccaagctggtctcgaactcctgacctgaactgatctgcccgcttcgccctctgaaagtgctgggaggattacaggcatgacccaccgggccgggctttttttctggataactcctgaggtgaattctgacatacttctcagaagtgttttgttagatgggctttgaggactgtaggagtgttgaatgtttaatacacatgtgtcttgtgactgattgatactggaccctgattgatattggatccctcccagttggtttatactcctgatgttttacaggcataagctcagggaataaattctctgtatcctggaagtttttttgaaagctagatattcacgtaggagggggaagcactgagtctggctgtaaagtgtgtgcaggtgagaagcaaggactgcacctgaacagtctgctcatttctccctgaggatttcagcaggccacaggcctggaatggcatggtggtgcctctcccctgccaccattctctgtgagagtgtgtccagaatttattccttcttgtgggttcttggtctcgctgacttcaagaatgaagccgcagaccctcacggtgagtgttagggcttttaaagatggtgcgtcccgagtttgttccttcagatgttcagatgtgcctggagttttttccttctggtgggttcgcagactcgctgacttcaggagtgaagctgcggaccttggcagtgagtcttacagctcatacaggtagtgtagacccaaagagtgagcagcagcaagatttatggtgaagagtgaaacaacaaagtttccacaacgtggaaggggacacaagctggctcaggtggccagcttttattcccttatttggccccgcccacatcctgctgactggtccattttacagagtgctgattggtccattttacagagtgctgattggtccattttacagagtgctgattggtccattttatagagcaytgattggtccattttacagagcactgattggtccattttacagactgctgaatggtccattttagagtgctgattggtgcctttacaattctttagctagacaaaagttctccgggtctccactcgacccaggaagtccaggtggcttcacgtctcaaaagcagcagatctccatccacgtttattttttatttcccccttgctgtacccaaagcactacaaccgcactgtggaggctacagccagaataagacgttggtttttcctcaaggacctcacaattgtcaagcctccactggggccagggacgtgtagagccgcgggacccactgctgagtctwmygtgggccctccgcgcaatggggcatccagtgcggcctgtgcatccacagttttgaaaggcgggttggagaggctgtaaaacaggcctgcaaattcttttcacacttgtctcttcgggagctggagtccctgctccgtctcttgaatctcggctgtcctcattaactgtctcgtaattcctagaatggggcagtggtgacaactctgtaggagttccaaagttgggtcgataaggccacgtggctcctgcttggttctttgggaatgctgagccggcgaggagccagctttggttttgagtgttcataaagtacaactggaaagactgtgtacacaaacacaggcaggtacacaaatgcacacgcatcaaaaatttatagggaaatgggtccatgtaccgaggcacaaataacatacagatattacagtacacacagaagcaagcacatatacaaatgcatgtacctcaaaaaatgtatacacctacggatacacctctacatatacaaacacatagagaaatgctagacctacatatatgtatagatagctccatataagatacacacaaacacaagcacgtgtacaaatgcatatgcatagaaaaagatgtacgctatgcagatgtacatatacatacacaaatacatasagaaaygctagacctatagatatatacatatctccatataaaatacacacacggccgggtgcagtgtctcacgcctgtaatcccagcacttagggaggccgaggtgggcggatcccctgaggtcaggagtttgagagcagcctggccaacatggcaaaaccccgtctctactgaaaatacagaaaaatttagccacgtgtggtggtgggtgcctgtaatcccagctactcgggaggctaaggcaggaaaattgcttgaacctgggaggcggaggttgcagtgaggcgagactgcctcattgcactccagcctggacgacaagagcgaaactcctcctcaaaaaataaataaatacatacatataaaatacacacacacatacaagcacataaacaaatgcatgtacctaggaaaatgtattcatgtacagatacacgtatacatatacaaataagtagagaaatgctaggcctatatatgtgtagatatctccatataaaatacacacaaatacaagcacatatacaaatacatgtacatataaaaaatgtgtgcacttgcagatgcatgtatacatgtacaaatacacagagaaatgctagacctctatatatttgtgtgtagatataaaatacatacacactaatacaagcatatatacaaatgcatatgcataggaaaatatgtacacatgcagatatacatatacaaatatgtagacaaatgctagacctacatatatgtatagatagctccatataaaatacacacaaacacatatacaaatgcatatgcatagaaagatatgtacacatgcagatgcaaacacatatatatacaaatacagaaatagatctacaaatatcaatatagctccatattgaaatacatctttgaacacaaacgtgtccatatgcaaatggataggtgtgtgtgtgtattaatcatacacctcaaatgcatttgcaaatgcaaacgtgcacaaatgcaaaagctatgggattccacagatgaatcaaaatgcatattcatgcgtgcaatacacgtagatgttccaatgtacaaataatgacaaatgctgtgtgtttgtaggtgtatgaacacatgcaaatacttgcgattgtacaattccaaatagaaacatataatatatacatacactgtatgcagatacacatgcaaagatgtaaatgtgtatggacatgtatatacatgtgaataaatgtgtacacatgcaaactcatgcacatgtgcatacaacacatatgtaaaagaaaatatgcacaaatttataggcatttgaaaatgaatctgcatgtaaagacgtgaacacatatgtacatgctaacatatatctctataggcatatatctttgaattatgcatacatgcagttatatacccaagtgtatagctatataaacacatttacaaatgcgtatgcatatatgtatatgaatagacgtgcctgtatttgcgttacgtgtagatagatacagaactccaggtacatatataacatgcctatgtatacacatctacattatccatgtacatacaaatacatatctacattggcattaatatccaagcaaactggtctgctctaagtacaaggcagtatggttcgtgcgtgtttctaggacaagtcacctttgagatcaggcctccacagcaaggacttcagggcaggcgctcagccgggcttggcctgacaggggtgggctgttctgtgtctggtagatagaacatgtcaagcacagaacctgcggtgatgatgatgtctatagaatgatgaccgacagggctgccctgtggtctaggggtgaggacaggccatgtttatactgaggtcggcatttctcaaaggacatctgagcagtttgtttgtgggatactcagtgaagagggggtgccatagcagctatacttgtccagaattctggggggagacaggatctctgttgcccaggctggggtgcagtagcacaatctcggctcactgcaacctccacctcttgggctcaaacaatcctcccgcctcaacctccccgagtagctgggactacaggcacgcaccaccacacccactaattttttgtatttttggtaaagatggagtttcactgtggtgcacagcctggtctcgaactcctgacgtcaagcagtctgccctactcacctacccaaaggctgggattacatgtatgagccatcacacctagccgcccagaataattaattgtccaggggactctgtttggtgacttggatgattctcactctcttgtgtgtgttgctgtgttatcattgtggttattatttttcttttcctttttttttttttttgagatggagtctcgctctgtcaccaggctggagtgcagtggcatgatctcagctcactgcaacctccgcctcccaggttcaagcaattctcctgcctcagcctcctgagtagctggaactacaggaccctgccaccaaacctggctaatttttgtatttttactagagacaagggtttcaccatgttgggcaggctggtcttgaagtcctgacctcagatgatccacccgccttggcctcccaaagtgctgggatgacaggcatgaacttctgacctcaggtgatccacccgcctcagcctcccaaagtgctgggatgacaggcgtgagccaccgcgcccggcctgtggttattatttttaaactcaaggcacagaggtgcagagacagaaggcaggaagggacttcagtgatcttctagaatcttctccatcacacctaaagcaggaaacagaggcccaggaggaagacatggccgccagctctacaccccaccctccgatgtcctgggccatttgcgcatctggggaatccatctgtgagatttctccactgtcttccccagtctaactccttctgatattctcttttgtccagctggggtgatgatggtccctcagaggaaaaccagagatggattcgaagaacatttcggcctgaactacctagggcacttcctgctgaccaaccttctcttggatacgctgaaagagtctgggtcccctggccacagtgcgagggtggtcaccgtctcctctgccacccattacgtcgctgagctgaacatggatgaccttcagagcaggtaggtgcaccctgtgaataatcataacagcatctcaggtgggttaaaggttattcatctccctctgtctgtgcggtgtggcgctccctgcatctgctggacgctggtgctctgggaacagtgctccctgcgtctgccgagcactggtgctttggggacagtgctccctgcatctgccggacactggtgctctggggacagtgctccctgcatctgctgagcactggtgctctggggacagtgctccctgcgtctgccgagcactggtgctctgggaacagtgcttcctgcgtctgccgagcactggtgctctgggaacagtgctccctgcatctgctgtacactggtgctctggggacagtgctccctgcatctgccgagcactggtgctctggggacagtgctccctgtgtctgccgagcattggtgctctggggacggtgctccctgtgtctgctgtacaccggtgctctgaggacagtgctccctgcgtctgctggacaccggtgctctggggacagtgctccctgcgtctgccaagcactggtgctctggggacagtgctccctgcatctgctgtacactggtgctctgggtacagtgctccctgtgtctgccgtacactggtgctctgggtacagtgctccctgcgtctgccgagcactggtgctctggggacagtgctccctgcgtctgctgtacactggtgctctgggaacagtgcttcctgcgtctgccgagcactggtgctctgggaacagtgctccctgcatctgctgtacactggtgctctggggacagtgctccctgcatctgccgagcactggtgctctggggacagtgctccctgtgtccgccgagcattggtgctctggggacggtgctccctgtgtctgctgtatactggtgctctgaggacagtgctccctgcgtctgctggacaccggtgctctggggacagtgctccctgcgtctgccaagcactggtgctctggggacaatgctccctgcatctgctatacactggtgctctggggacagtgctccctgcgtctgccgagcactggtgctctgggtacagtgctccctgcgtctgctgtacactggtgctctgggtacagtgctccctgcgtctgctgtacactggtgctctggggacagtgctccctgcatctgctgagcactggtgctctggggacagtgctccctgcatctgctggacactggtgctctggggacagtgctccctgcttctgctggacactggtgctctggggacagtgctccctgcgtctgctggacactggtgctctggggacagtgctccctgcgtctgctgtacactggtgctctggggacagtgctccctgcgtctgctgagcactggtgctctggggacagtgctccctgcgtctgctgagcactggtgctctggggacagtgctccctgcgtctgctgagcactggtgctctggggacagtgctccctgcgtctgctgagcactggtgctctggggacagtgctccctgcgtctgctgagcactggtgctctggggacagtgctccctgcgtctgctgagcactggtgctctggggacagtgctccctgtgtctgctggacactggtgctctggggacagtgctccctgcgtctgctgagcactggtgcttcctgcatctgctgggcacaggtgctctggctacggtgctccctggagtctgctgggcatgggtgctctgggcacagtgcccccgcatttgctgcacattggtgcccggcatagtgctccctgcatctgctgggcatgggtgctctgagaacggtgctccttgcatctcctgagcattgtgctctgggcacggtgctccctgtgtctgctgagcacaggtgctctgggcacggtactccctgtgtctgcggggcacaggtgttctgggcacactgctctctgtgtctactgnnnnnnnnnnnnnnnnnnnnnnnnnnnnnnnnnnnnnnnnnnnnnnnnnnnnnnnnnnnnnnnnnnnnnnnnnnnnnnnnnnnnnnnnnnnnnnnnnnnnnnnnnnnnnnnnnnnnnnnnnnnnnnnnnnnnnnnnnnnnnnnnnnnnnnnnnnnnnnnnnnnnnnnnnnnnnnnnnnnnnnnnnnnnnnnnnnnnnnnnnnnnnnnnnnnnnnnnnnnnnnnnnnnnnnnnnnnnnnnnnnnnnnnnnnnnnnnnnnnnnnnnnctccctgcatctgctgggcatggtcctctgggaacagtgctccctgcatctggtgggcactggtgctctgggcattgtgctctctgcgtctgctgagcacaggtgctctgggcacagtgctccctgagtctgctggacacaggtgctctgggcacggtgctctctgcgtctgctgagcacaggtgctctgggcacagtgctccctgagtctgctggacacaggtgctctgggcatggtgctccctgcatctgctgggtagaggtgctctgggcatggtgctccctgagtctgctggacacaggtgctctgggcacgatgctccctgagtctgctgggtagaggtgctctgggcacggtgctccctgcttctgctgggtagcggtgctctgggcacactgctacctgtatctgctgggcacatgtgctctggaaatggtgctgcctgcatctgccgggcacaggtgctcctggcgctgtgttgtgggatatgtacatccccagccatttgctgtccttgggcaacttagcaatgtgcgatggtattgttactttattttttagaagggacaagaaacacagaggtgagacatagaaaaggaaaacggatctatttaaaccttctcttgtgcccccatgggaatgtcaggcactgcatctgcaggtggcattggtgtggactcctgtcgacacgcaatgtactgtctgtccatcagcaggtctctcttgtgaattcctcctaaccccgccttaaggataaaaacgattcctctgtgggaataatcatcttagtttgtttaagctgatataagaaaaaatccagcagtccgggtgtggtggctcacgcctgtcatcccagcactttgggaggctgaggcaggtagatcacgaggtcaggagatcgagaccatcctgaccaacatggtgaaaccccatctctattaaaaatacaaaattagccaggcgtggtggtggacgcctgtaatcccagctactcgggaggctgaggcaggagaatcgcttgaacccgggaggcggaggttgtggtgagccaagatcacgccactgcactccagccggagtaacaacagcaaaattccgtctcaaaaaaaaaaaaaaaaaaagaaagaaaaattccatagtttgggtggcttataaataacacacatttatgtctcacggttctggaggctggaagtccaagatcaaagtgtgccagcgtctggcgagaacccgcttcctggttcacacatggcaccttctcactgtgtcatcaagcagtggaaggggcaagggagctctctggggtcccctttataaaggcactgattccatacttgagtctcccccatcgtgacctcatcacctcccaagggcctcacctcctaacaccatctcacgggggatgaggatttccatgtaggaatttggagacagacacagtcagagcacacagtcggactcgcctttgaatttctctgcagccctaagatcacaaagcgttaatgccacactcggaaagaactggctgcttggctgtgccagcatcagactttggggccagcctctgtaatgtacagcagggtgggcgccctccccacccccaggccctggagtaccctcaggactacgaggagggtgagcccaggggcacaggccctgccagctcctaacagtttgcatttccctgcacagcgaggggcaggatgtaacgaagggagggccgtgggggcctcctaggataccttggcccatctgttttgtcgaatcgagctcctgtgtctgtgagcctctctgctgaagggtgtgggatgagggagtcggcctcgatgggatcctgcatgaagtgtgaaccctgccggttgtgggagggaaggagcgaggctggccaggacttcatcttctccgggcagctgaagaagcaccgggctgtgcagggaagggcgggtgagaggaatgcagggagagcagggcctgtggccgggaggggctgcttctccttcatggtgccctgaggaagcaagggcatgtgtgcgtgcctgtgtgtacagctgagatgtgtgtgccaatgtgcacaggtgaggtgtgtaccagtatgcacaggtgaggtgcatgcgtgcccatatgcacaggtgagttgtgtgtacctgtgggcacagatgaggtctttgtgcccgtgggcacacatgagatgtgcatgcctgtgtacacaggtgaggtgcgtgccagtgtgcacagataaggtgcgtgagtgctcgtgtgcacaggtgagtcatgtgcgtgccagtgtgcgcaggtgacgtgtgtatgctggctggggcatttcctgttttcacacccatgcatgacagcacccagaggaagacatgcgtgtttctcaggcttcttctcagctcagggctcactgcaggattgtgtaggcctcctgcctcgggctccatgctgaagggtttgcctggacccactggcaagaacagccctgccatgactggcttccctaactccaggcctgaggctgggctgggtgtgtgggggccagccttccctgatgcccactcggggctccacacacggagcctgctgtatgagagggcctgggagaagggaggagggaacgaggagtcttggcacagccagcagcacttgctgcagacacgactcactgagcaaggcaaggcatgggttggggaacctggggaatgtgagctgcttggcaggcattaccgctcgccaaagacacacaggaacaccccttcctcgtacagcactggtggagggccgcctgtctgttattctgagagctcactttggggttgatactgttgatcaaagcaatctctgttgtatttactcattttttttttcagatggagtctcactctgtctcccaggctggagtgcagtggtgtgatctcggctcactgcaacctccgcctcccgggttcaagcaattctcttgcctcgactcccaagcagctgggactacaggcacccgccaccacgtccagttgatttttgtatttttagtagagacaggattttgccacgttggccaggctggtctcgaactcctgacctcaggtaatcctcccatgtcggcctcccaaagtgcgtggattacaggcatgagccaccgtgcccagccacgatctctgttttgaataatgaagataagcagatcacatccagaacaaccccacccgacagaaatgacagctacttcctagagactttaggtgctacagagcagattcatgcgcttaataagaattgagcctcattatcacctaagaaagctgaggaagcatatattaccaagtgcaattaacaagagagtttttattcctataaaaacacatattaaagaaaggctttgacggtattgcttatatgccattaactattattttattttattttttgaaagagacaaatgtcactctgttgcccaggctggagtgcagtggtgctatcttggctcacggcaacctccgcctcccgggttccaatgattctcccacctcagcctcccgagtagctgggattacaggcatgcaccaccacacccagctaatttttgtatttttagtagaaacagggcttcaccatgttggccaggctgtaatcaaactcctgacctcaagtgatctgcctgccttgacctcacaaagtgctgggattacaggcatgagccaccacacccgaccaccattaactcttatctgaagagttatgtccacatcctaactccaaatatgtataattgagacctaatttagaaataggtctttgcagatggaattaagtgaagatgagatgattagggtagacccttgatccaatatgatgggtggccttacaagaagtagaaaatacctgggcacactggctcatgcctgtcatcccagcactttgggaggccaaggtgagcagatcacctgaggtcaggagttcaagaccagcctgaccaatatgatgaaaccctgtctctactaaaaatacaaaaaattagccgggcgtggtgctgcgcgtctgtaatcccaggtactcgggaggctgaggcaggagaattccttgaacctgggaggtggaggttgcagtgagctgagatcgtgccattgcactccagcctgggcaacaagagcgaaactctgtctcaaaaaaaaaaaaaaaatgaagtagaaaatttggagacagagagacacagagaaggccacatggagatggagatggaggtggagactggagtgatgcggccacacacccagggatgcctggagcccccaggagctgggagaggcaggaaggaccctcccctccaccctcacagataccccagagtaacattcaatcaaacatctaggtgccccatgatccagtcaggttaacacataatattaactattccgaccccactctacatataagaagggccctaaatggaatgacaggtgttcttggaaagagacagaagaggagacacagacacagaggagaaggccacgtggagatggaggcagagactggagtgatgcagccacagggtcagggatgcccggagcccccaggagctgggagaggcaggaagggccctcccctagagcctctggagggaactggatacaattgtagtggattgaatggtggttcacagaaagatctgtccacatcccgaagcccagaacctagaatgagactttatttgaaaataaagaactttgcaggtgtaattagttagagatctagagatgagatcatcctggagtagggtaggtcctaaatccactgaccggtatccttctaaaagacagaagaggagacacagacacagaggagaagtccacgtggagacggaggcagagactggagtgatctgaccacggggtcagggactccccgagcccccagaagctgggaaaggcaggaagggttcctgccctagaagaccgtccagagagagcacgaccctgtccactcctgaatttcagacttctggtctccagaaggtatcaattcactggatgaatttctgtgactttgaagcatccagtctgtgctcatttgtttggacaatcccaggaaagtaatacagattgcaaagcagatcaaggaacttcaaagtcaaagggcttgagagccagagccagctcagagccggctctaacattttttgtttatttatttgtattgtattgtttttattttaatttattgtatatatctatatctatatatatatatctatatatctatatatatatatctatatatatctatatctatctatatatctatatctatatatatctatatctatctatatatctatatctatatctatatatctatctatatattttttttttgagacagagtcttgctctgtcgcccaggctgcaatgcagtggtgcgatctcggctcactgcaacctctacctcctgggttcaagcgattctcctgcctcagcctcctgagtagctgggattacaggcatgcgccatcacgcccagataatttttatatttttagtagagacgggggttcaccatgttggccaggatgatctccatctcctgacctcgtgatcctctcgcctcggcctcccaaagtgctgggattacaggcgtgagccactgcgcccggccacttccccctattttttcgagacttacaattcaacttacactgcttttcttttcctgttctcctcttttgcttcaccagtttgattatgtaaaatgaatattgatgacaggcattcacctgagccatgtttcatttctccatgattcctctgcaggggataatgagagagtgttaacagatgcctcctctgagctttctggaaactgttcttcgttgacggcactgactctttccaaataggcccctttttcatcgttcatagcttaggagtgatctcttaaaggagagaacattgctttgctggggctgccataataaaataccacggacctagtggcttaaacagcagacattgagcgtcccacagtcctggaggctggaggtcccagatcaaggtgtgggtgtggctgactcctcctgaggcctctctccttgggttgtagacaccgtcttctccctgtgtcctcacaggatcatccctctgtgtgtgtctgtgtcctcatctcctcctcttatgaggtgtcttagcccatttcaggctgctatcacagaataccatagactgggtagattataaacaacagacattattctctcacagtcctggacgctagaagtttgagatccaggtatgggcagggctggttcctcctgaggcctctctgctggacttgtagacgccatcttctctctgtgtcctcacagggtcgtccctttgtgtgtgtgtgtgtcctcatctcctcttcttatgcaatgccttactccatctcaggctgctatcacagaataccatagactgtgtagcttataacagcagacattgattctcccacagtcctggaggctggaggtctgagatcaaggtgtgagcagggctggttcctcctcaggcctctctcctgggcttggagatgtcatcatcgccctgtgtcctcacttggttgtccctctgtgtgtgtctgtgtcctcatctcctcttcttataaggacctcagtcctattggatcagtacctaccctagtgacctcattttacctgaatcgcatctttaaagaccccatgtccggccgggcatggtggctcatgcctgtaatcccagcactttgggaggctgaggcaggtggatcacctgaggtcaggagttcaagaccagcctggacaacacggtgaaaccccgtctctacttaaaaaatacaaaattagccaagcgccatggcaggtgcctataaccccagctactggggaggctgaggcaggagaatcgcttgaacccgggaggcggaggttgcagtgagccaagattgcaccattgcactccagccttggtgacaagaccgaaactctgtctcaaaaaataaataaaataaaaggaccctatctccaaataaggtcatctttctgagttcctcagagttagaacttcataggaatctggggagacgtaattcagtccatgagatacgcccaggtccccttggtagaatagaacacgcctcagccggcgtcttctgtattactgtaggagcccctagatgaccagatggtggtaggacagccaggtattcccagtcaggtgcagttgcctggatgtgtgttccccgaattattgtgcattgggccatctggccgacgaacttcagcttccgtggttagctccgtctccatctccctgatttttctgttcttgtgtcatccctgcgtcacatatgactgaagttcagtaaatatatggtgagtgggccgggcatggtggctcacgcctgtcatcccagcacttcgggaggccgaggcaggtggatcacaaggtcaggagttcaagaccagcctggccaacatggagaaaccccatctctactaaaaatacaaaaattagctgggcgtgggggtgcacacctgtaatccctgctactcggaaggctgaggcaggataattgcttcaactgggactcgaaaggcagaggttgcagtgagccaagatcgcaccactgcactccagcctgggctgcaaagcaagattctgtcttaaaaaagaaaaagaaaaaagaaatgaagatgctcccattctcagaccatcctccagatctcctaaacccgaagtttggagaacaggggttggcaaggagaaggtctttggggaattctgatgcatgctaaaatatgagaaccacttgaatttaaaatatactgctttttttttttggatgaaagatgtggttcttggcttttgcctgatataatcattgccagtaattagtgttaattgccaagattgatttactggcttggaaaattagcgttcttgtaaaggaataaatcacagtgttgtaacatattccaaaaatccaagagtttttacacatgagagaacatgtctcctcaacttggctgtaccgaatcatccccatggtgaaataaatttcaatagaaagcactttgggaggccgaggcgggcgtatcacctgaggtcaggagttcgagaccagcctggtcaacatggggaaaccccgtctgtactaaaaatgcaaaagttagccaggcatggtggcatgtgcctgtaatctcagctgctttggaggctgaagcaggagaattgtttgaacccgggaggtggaggttgcagtgggccaagatcatgctactgcactccagcccagcttgcactccagagcaagactccctctcaaaaaaagaaaaaaaagggcaggcacagtggcttaagtctgtcatcccagcactttgggaggctgagaggggtggatcgcaaggtcaggagatcaagaccatcctggccaacatggtgaaaccccgtctctactaaaatataaaaaattagccaggcatggtggcatgtccctgtagtcccagctactggggaggctgaggcaggagaattgcttgaaccggggaggtggaggttgcaatgagccaagatcgcaccactgcactccagcctggagagaaaaaaaaaaaaaaaagagggacacataccttccaaaatcattttctattctttaagatttctttcctgtgagacccttaaatttgttttgttttattttattttatttgagacagagtttcgcttttgtcacccaggcatcgaggctggagtgcagtggcgcaatctcagctcactacaacctctgcctcgtgggttcaagtgattctcctgtctcagcctcccgggtagctgggactacaggcaccgccaccatgcccacctaatttttgtgttttttttttgtagagctgggttttcaccatgttggtcaggctggtctcgaactcctgacctcgaatgatctgcccacttcgacttcccaatgtgctgggattacaggtgtgacccaccgtgcctggccatgatagattctctacctatttaagaaattctttatttcactctgacgtccctcagtcatggagttgttataggcatgggcgtgcctcactgtgaacatggctgtcttggtttgagtttctcaacttatgtaactttgggtgacttcttcattattttattcctaaccatgaattcacatcccgtgaaatcatccagtatagactaagttgtgtaacgtgttttgagtgtggtatcccatctcgattcggatttcactcaaggtttcacatgttccccctgtgttctgagatatgtcggacagctgacacactcactatgtgtctatgagcgaaagtatcagggtgtttggatgcagctggaattcacaagatacctgcaatgtcctgtgttgttctggttgttttctcttagcggaaaaagtcaaagacctctctttgagatcgacaccatccaggccaatgtggtaaaaacccgtctctactaaaaatacaaaaattagctgggtgtggtgacgggtgactgtagtcccagctactcaggaggctgaggcaggagaatcacttgaacccgggaggtggaagttgcagcaagccaagatcatagcactgcactccagcccggcctgggcaacagagcaagactccctctcaaaaaaaaaaaaagaaaaaaaagggggggggcgtggggcaggcacagtggctcacacctgtaatcccaccacttatgggaggcctagggggtggatcacaaaggtcaggagatcaagaccatcctggccaatgtggtgaaaccccactgtgctaaaaataccaaaattagctgagtgtggtggcgggcacctgtagtcccagctactcggaaggctaagacaggagaatcacttgaatccgggaggcggagattgcagtgagccgagatcacaccactgcactccaccctagcaacagagcgagaccctgtttcaaaaaaacaaacaaacaaaaaaaacctctctttattcgcagtattttctgagttcctggtaggcggatcgttatcaagaatattaaatgtagatgatagttatcaagaatattaagcgtagatatcctagaaagaatgtaatggagttgtttgtactgccaaagggaaaattcaatttagacatgaaggattgttataatacttataaatatattgaatgccacccatacttactcattaaaacagtgattgtcatcaggtttaatgagcactggaaaaatagctccagtcaactaggttatgagcagtcgattgagtttccctaattgcattggcaatttgattatgcaacaatgtcctgcaatggaaatacgttgcaatgcaacggattcgtaggaagttaacataaaaactcagttgtccttgcttctacacaagtacctctcaaagtggataaataatcaatgcaaaaactgcctgttgatccatataaaaggacaccgcctacggagactggctgttgggagaccgagatatgacacgtttacatcctacagtatccatcacaataacttataaagggctcctttctttttgtttttttttgagacagagtcttgctttgttgcccaggctggagtgcagggtgtgatctcagctcactgcaagctccgccttccgggttcacgccattctcctgcctcaacctcccgagtagctgggactacaggcgtctgccaccacacccggctaatttttttgtatttttattagagacggggtttcaccctgttagccaggatggtctcgatattctgacctcgtgatccgcccgcctcggcctcccaaagtgctgggattacaggcgtgagccaccgcgcccggtcttataaacactcaaaagtatgttcagtcttcacgatttttaataacaagaagagagtaatgctttaatcagcaaaaaatggagaactcaaatacccttttataaggtccagatttagtagcaggtggcttttgttcagtttcttattcaacaagaaagctcattgaatgattttttgtttcattttgttttttggcagtctccctgtctcacccagactggagtgcagtggcgccatctttgctgattggctcacggccatgtccgcctcccaggctggagtgtggtggcgccatcttggctcactgccatgtccacctcccaggctgcagtgcggccgcgacatcttggctcacggccatgtccgcctcctaggctggagtgccgtggcgccatcttggctcacggccatgtccgcctcccaggctgcagtgcggccacgccatcttggctcacgaccatgtccgcctcctaggctggagtgccgtggcgccatcttggctcaaggccatgtccgcctcctaggctgcagtgcggccacaccatcttggctcacggccatgtccgcctcctaggctggagtgccgtggcgccatcttggctcacggccatgtccgcctcccaggctgcagtgcggccacgccatcttggctcaaggccatgtccacctcccaggctgcagtgccgtggcgccatcttggctcacgaccacgtccgcctcctaggctggagtgccgtggcgccatcttggctcaaggccatgtccgcctcccaggccgtgcagtggcgccatcttggctcactgccatatctgcctcccaggccgtgcagtgacgctatcttggcttgctgccatgtgcgcctcccaggctcaaatgatctgctcccacctcagcctcacaattagctgggactacaggtgtgctttaccacacccaggtactttttgtattttttgtagagataaggtcttactatactccccagtctggtcttgaactcctgggctcaagcgacctgcctgccttagtgtcccctaagtgctcagattacatgcgcgagccaccactcccggcctaataccaacgacttttgtcagagtccttagggtttcatttacagaccttaatgggcatttcctcctacgtatttgctttcattctttcccatttctggggtggatatttcttcatccctaacccccaccccagggaatctctcctgaaactacgtgcccctcttggattcatttcttcacctcctgtagagaaatgtattggcttttcgcctgcccccacaccgtatttttaaacaatcttagttctctcttctccacgctactgtgtaaaaccataattacagaaccaacccctccatttactctggaaaaatctgcctttggatgatgcattttctgctttttcaagtaaccattcctcttacccatcaatcaaatgctggagattcagaaccgaatgcttgtagctgatatttaaaaaacgatcatgccagcaggaaagccagtctttgcctctctgcacttaataactatctgtttcctggactcttctcttcccctggggtgaggagattggagaagtttgccttaaaaagatatcttgacagtaattggaggtttacagtttatcttggatcagagatgggacttcagctctgaactactcaatttccctgtcttaattcttccagtctcttagatttctttttatttatttatttttgagacagagttttgctcttgtcacccaggctggagtgcaatggcgtgatatcagctcactgcaacctctacctcccgggttcaaggattctcctgcctcagcctcccgagtagctgggattacaggcacctgccaccacgccctgctaatttttgtatttttagtagagacggggtttcaccatgttggccaggctagtctcgaactcctggcctcaggtgatccacccacctcagcatcccaaagtgctgggattacagacataagccaccatacccagccaattcttccaatctctttattatgcagtcagcctttccagtcccctcctaccccaccccaacccccaaaaagttatgttttgattgttcattattttgcaaagtctccatggctaaggacccccttgtcaccctttctgtcctgcccttatttatttctaaggcagcagacctgaggtttcttttccagcagaaatcgggtaaacctcaggtctgtttgaaatgcttgttccccagtgccataaagaaatagcacttgaacattaatttcctcagcaaggccattttttttactttctgcagaaagggtacactctccagcagttttgccaggagagtacagcgaacaaaggggacagggtcatttatcacttgatgcgtccgccctactgctgtgtccagtttccagggctggaatgggacctcacattctgtatttgtcccgattggccagcaccttggaactatttaaaagaggcaaaggcagaggagaacaaaggaaggaggaagtaacttgtggaatgctgagaaaggaaaaagcacttttagataaagaagaggaacaggctgtgacgtaatgcttgcttggaccagtataagcatgccagggctgatacttaggttaaattgtgggagctaagagcataaagtacattgatttctttatcacggctagcagatatttaggaatgttagcacaagtctttgaatgaagtttgcttctcagagaagttactatttattcctaattagatggggaggaaagtctttgaacaggaacctttattttttacaggcccgatgtcagattttggcatgtggctttctgctacccatggctgcgtgatgagacagtggctggaggcagaactgagcccctggaggtgttaatgggggagtcacttgtcctcatgcaagcattcaaacatgccttttgcacaacggcaaggcacatctcagaacatgtcagctgcaggctgcgatttcccgggtacgagctttccaagctctgtgatccactctgtctttggttacatgaaggtgggaaaattgctcagttgctaagatcacagtgttggggctcagaaaacaatcccctaaatttttcagaggcattagaaccagagcaactctgccatcttgaataggggctgcgtaacatgaggctgagacctgcttgggctgccttctctggaggtggatgaggcattctaagtcacaggatgacagaggaggtcagcacaagacacaggtcacaaaggccctgctgataaaccaggttgtggtaaagccagccaaatcccaccgaaaccaagatggtgacgactgacctctggtcatcctctctggtcatgatacgctaattctaatgcattagctgataagagacggtttacagatgccatgacatggtctaaaagggggatgaaccttcagctccgggaattggtcacccctgtcccagaaaactcatgagtaatccacccgttgtttagcatatgatagagaaataaccataaaaataggccaccagcagctctcgggatgctccatctatggagtacacattctttattcttctactttcataataaacttgctttcactttactctatggacccactcggagttctttctcacgagatccaagaaccctttcaaacccctgaaaggatcaggtgatccgcccacctctgcctcccaaagttctgctgggattacagatgtgagccactgcacccagccagaaaagactttttgaatcaatgcttaatttttttttttttttttttttgagatggagtctcactctgttgcccaggctggagtgcagtggcgtgatctcggctcactgcaatcttcacctcccgggttcaagcgattctcctgcctcagcacccaagtagctgggattacaggcatgcgccaccactcctggctaactttttgtatttttaatagagacggggtttcaccgtgttagccaggatggtctcgatctcctgacctcgtgatctgccagccttggcctcccaaagtcctgggattacagacgtgagccaccatgcctggcccaaggtttatttttttaagatcaatttcaagtagtgatgttactaaaagatattcataggccaggtgcagttggctcacgcttgtaatcccagcactttgggaggccaaggcgggcggttcacttgaagtcaggagttcgagactggcctggccaacacagtgacaccccatctctactgcaaatacaaaaattagctgggcgtgatggtaggcgcctgtagtcccagctacttgggaggctgaggcaggagaatcacttgaacccgggaggtggaggtcgcagtgagctgagaattgcgccaccgcactccagcctgggctacagagcgagactctgtctcaaaaaaaaaaaaaaaaaaaaaaaaaaaaaggcacaaaaagggctgagcgtggtggctcacgtcacgtctgtcattccagcactttgggaggccgaggtgggcagatcacgaggtcaggagatcgagaccatcctggctaacacggtgaaaccccgtctctactaaaaatacaaaaaaaaaaaaaaagccgggcatggtggcaggtgcctgtagtcccagctactcaggaggttaaggcaggagaatggtgtgaacccaggagggggtggttgcagtgagccaggattgtgccactgtactctagcctgggcgacagaacaagactctgtctcaaaaaaaaaaaaaaaaaaaaagatttatgattttaaagattgagttgcatgttgtgaagttgctctcccaaaagatgtgcaaatgtatgtgcacgcccttcctttggttgtctggccagttttccccatgttcttcgcagtggaaatgatgacagtgtgataggagaacagatggagggtcattccctctgattttgcaagctgaaaaatcaacttgcaaaagcagatgaataggagaaaaggcatacaaagtttactcgatggatacatacagcagccttcagagggaagacccaaagatgcaggggaaaccgtctatttttatgcttaggttcaacgacgtctgaacgaaatccgtgtaggaataggattggaggaagagggtgtgatctaaggctgacggtctgagtggggaaacagacaggcctgtctagatttttttggcctctgagcagtgcgccttccttctgggggtggggtgggaccctctctgggaagggggtcgtagaacctacattcaaacaaggcaggtcaaggaatttccttttccttttccttttcttttctttctttttcttttcttttcttttcttttttttttttttttgagacagagtcttgctcttgtcgccctggctggagtgcaatggcgcaatcttggctcattgcagcctccaccttctgggttcaagcaattttcctgcctcagcctcccgagtagctgggactacaggtgcccgccaccacacttggctaatgtttgtattttcttttttctttttttttttttttttgagacagagtctcgctctgtcgcccaggctggaatgcagtggcgcaatctccactcactgcaagctccgcctcctgggttcacaccattctcctgcctcagcctcccaagtagctaggactacgggcgcccaccaccacgcccagttgattttttgtatttttagtagagaccgggtttcaccgtattagccaagatagtctcgatctcctgaccttgtggtctgcccaccttggcctcccagagtgctgggattacagacgtgagccaccgtgcccggcctaatgtttgtattttcagtagagatgatgtttccctgtgttgggcaggctggtctcgaactcctgatctcaagtgatccacctgccttggcctcccaaagtgccgggattatagccgtgagccactgcacgatgataggaaatttctttatggcgagtttttatatactcagggtgtagggaaagttagagtcctatttatagggtttctggctggccttgggggaaaggtgctttggttttcgggacccaccttggggaagaaggattccagtttccgtggtgcccttggggcgaaatgggtctgagagacaggagggtaggagaaggtcagcaagaaaggtttgcttctgatgctgcttctgaggtcttcattttaggttactgttctctgagccccagcataggcatgcattattggttttgttcatttattttatgaaaaaatgaatacatgaatatagagggtatctaatttttttttttttttttttttgtgagacggagtttcactctatcaccaaggctggagtgcagtggcgcaatctcggctcactgcaagctccgcctcccgggttcacgccattctcctgcctcagcttcccgagtagcggggactacaggcgcccgccaccatgcccgggtaattttttgtttttttagtagagacgaggtttcaccatgttagccaggatggtctcgatctcctgacctcgggatctgcccatctcggcctcccaaagtgctgggattagaggtgtgagccactgcacccagccctaattttttttttatagtttcagggtctgctctgtaattgtaatattctacttttcatctgcaaaatatagtgtatattggacattttataacagggagaggaggtttagaaaccaacaccagggccatgtacagtggctcacacctgtaatcccagcactttggaaggccaaggtgggtggatcacttggggtcagaagttccagaccagcctggctaacctgatgaaaccccgtctctactaaaaatgcaaaaattatctgggcatggtggtgtatgcctgtannnnnnnnnnnnnnnnnnnnnnnnnnnnnnnnnnnnnnnnnnnnnnnnnnnnnnnnnnnnnnnnnnnnnnnnnnnnnnnnnnnnnnnnnnnnnnnnnnnnnnnnnnnnnnnnnnnnnnnnnnnnnnnnnnnnnnnnnnnnnnnnnnnnnnnnnnnnnnnnnnnnnnnnnnnnnnnnnnnnnnnnnnnnnnnnnnnnnnnnnnnnnnnnnnnnnnnnnnnnnnnnnnnnnnnnnnnnnnnnnnnnnnnnnnnnnnnnnnnnnnnnnnnnnnnnnnnnnnnnnnncctggggtgacagagcaagactccttctcaaacaacaacaacaaaaaccaacatcagtctctgttccccagtggtatcatttatgtttacactgttttctytctgtatttctcatttgctttgatctttttggttttcttttatgtgttttccttaggaaagcattttcatttttcttctccagatccttargtcaaagtttacttcatttatttcaattttctattcttttattttctttctttttttctttctttctttctttctttctttctttctttctttctttctttctttctctttctttcttttcttttctttttctttctttcttttctttcttttctttctttctctctttctgtctttctttctttctttttttgacagactttcactctgttgcccaggctggagtacaatggcgtgatctcgtgtcactgcaacctccacctcccgggttcaagtgattctcctgcctcagcctcccaagtagttgggtctacaggcacccgccagcacgtccagctaattttttgtatttttagtagagatggggtttcaccatgttaaccaggatggtctcaaactcatgacctggtgatctgcccacctcagcctcccaaagcgctgggattacaagcatgagccaacgcacccagccctcaatattgtattcttatttaggaacagcttttgttggtaagaggcattggattttcagaagctttttctgaaacgcatatgatgacggatgtctttcttttgatcttttgaatgtgttaaacattcttttaggctttttgatcttatctttagttttttagcataaatatcatgctgatattcaaactatatctgagatggctttgtgaaccctgaaaatttgagacaggtctcagttaatttagagtttgttttgccaaatttaaggacgtgagcctgtgacatagcctcagaaagtcctgatgacgtgtgcaacgtggtcaggtcacagcttgttttttttttgtttgtgtgtttttttgttttttttttttttttgagatggagtctcactctcttgcccaggctggagtgcagtggtacaatctcagctcactgcaccctttgcctcccaggttcaagcaattatcctgcctcagcctccggagtagctgggactacaggcacatgccaccatgcctggctaattttttaatttttttttttagtagagacagggtttcaccatgtggccaannnnnnnnnnnnnnnnnnnnnnnnnnnnnnnnnnnnnnnnnnnnnnnnnnnnnnnnnnnnnnnnnnnnnnnnnnnnnnnnnnnnnnnnnnnnnnnnnnnnnnnnnnnnnnnnnnnnnnnnnnnnnnnnnnnnnnnnnnnnnnnnnnnnnnnnnnnnnnnnnnnnnnnnnnnnnnnnnnnnnnnnnnnnnnnnnnnnnnnnnnnnnnnnnnnnnnnnnccaacatggtgaaaccccatgtctactaaaaatacaaaaaattagccgggcgtggtggcgggcgctggtaatcccagctactcgggaggctgaggcaggagaatggcttgaacccaggaggtagaggttgcagtgagccaagattgtgccactgcactccagcctgggcaatatgagcaaaactctgtctcaaaaaaataagaagtatagtccttgaaaagcagggacaactggaagcagggagggggcttccagctcacaggtaggtgagacacagatggttacattcttttgggtttgtgatgagccttcccaaaggaggtgatcagatatgcatctatctcagtgagcacaggggtgactttgaacagagtgggaggcaggtttgccttcagcaggttccagctggacttttcctttgagcttcccgcttttggggtgcccagatattttcygttcacagcttccatcaggatacatataccatgtggttaattcagaaaattaggccgggcacagtggctcatgcctgtaatcccagcactttgggaggccgaggtgggcagatcacgaggtcaggagatcgagaccatcctagctaacatggtgaaacctcgtctctactaaaaatacaaaaaattagccaggcaggtggcaggcgcctatagtcccagctacttgggaggctgaggcaggagaatgacttgaacccgagaggaggagcttgcagtgagccgagatcacgccactgtactccagctgggttgacagagcaagactctgtctcaaaaataaataaataaaaataaaatttaaaaatatatatatataaaagaagcaagcgatatgaaccttcagccaccttgaaatgttgttacgataattgtgtagcaaattgatcgcctctgggcatctttggagccccagaggaaagaaaaacattattgctcaaatacttctccttgtcttattgaaaagaactatgaggccaattctaaggctaatgatctgtgcctagcattaaattctaaaaggagtctatggtggttgtgtgccttcaagggacgttatgtaacaccgcaaataacatctctttaaaaagtgtttctaaggcatacatagaaaaagtagaacatatttacaggagcaaagctggaaacatccagttttctgtgtttctggtgattgaggttaccagagagagagagagagagagagaggcacgttactcactttaccgcggttatcggatcgatttttatcactatgtcctgtgatactaaaacatttctctaaactgcttgaaccaaggtgcaaagagtttaacatgtgcttagcacactacagagcttgcagtagatgtgaggaaaatttatgatagcttgggaagtttgccaaattgcttgtgtggttgtcttttatgatttgagactcatcaagaagaccacatgtggccaggcgcggtggctcatgcctgtcatcccagcactttgggaggccaaggagggtggatcacccgaggtcaggagttcaagaccagcctggccaacatggtgaaaccctgttcccactaaaaatacaaaaaattagccgggcgtggtgacaggagcctgtaatcccagctactctggaggctgaggcacgagattcgcttgaacccgggaggctgcagcctgggtgacagagtgagaatctgtctcaaaaaaaaaaaaacaaaaaaaaacaaaacaaaacaaaaaaaaaacagggagcatagtggctcctgcctgtaatcccagcactttgggaggctgaagcgggtggataatttgaggtcaggagttcgagagcagcctggccaacatggtaaaacttccatctttgctgaaaatacaaaaaattagcagggtgtggtggcgggcacctgtagtcccagctactggggaggctgaggtaggagaatcacttgaaccgggcaggtggaggttgcagtgagccaagattgcaccactgcactccagcctgggcgacagaggggggactctgtctccaaaataaataaataaataattaaaaaattagtaacataatttaacatatctgaccccaatacaattaagggatgagtttataataaaaaggtgaactagaaaaatccacacgcgttggaaaactggccaacagatggcatgatcacacatgggtctaggggaggtggctgcgtatagacgtggccgtggccgcaggtacagatgctgctgggatgaagcacttaggcgtgaacgccgtcagcctcttacaccttctcctgcttgccccacagtgcctgctactcaccccacgcagcctacgcccagagcaagctggcccttgtcctgttcacctaccacctccagcggctgctggcggctgagggaagccacgtgaccgccaacgtggtggaycccggggtggtcaacacggacstctacaagcacgtgttctgggccacccgtctggcgaagaagcttctcggctggttgcttttcaaggtaagccccttctgcttctctgattcacggctgcacctgaagatgctacaggaaagggggtccccagtccagaccccaagggagggttcttggatctcgtgcaagaaagaattcaggacggctcagtggtggaaagagaagcaagttattgagaaggtagaggagtaaatgaatggctcctccgcagacaaagcatccccggcggccgctggttggccatttttacggtgatttcttgatgatatgctaaacgagggggggattattcatgcctcccctttttagaccgtagagggtaacttcctgacattgccgtggcatttgtaactgtcctggcgctggtgggaatgtagccgtcacgacagccggaggtcactcttgtcgccattttgctttttgtgggttttggcccgcttctttactgcaagctgttgtatcagcaaggtttttatgacctgtaccttgtagcaacctcttatctcatcctgcgacttagcataccttaaccgcctgggaatgcagcccagcaggtctcagcctcgtgttacccagcccctattcaagatggagtcacgctggttcacacagctctgacacaaccacttccaggctgcgtgtgcggtgttgggggcttggattccgtgatgtatttgtacattctcaccccaaagccttggttgtgtgcgagctcggtgggtgacgctgtgtagctaggtagtgcccataaatgaatcttcttaggagctggagaccgtttggggatgctgtggtaggggccaagggaaaaacatccccctttgccatttgaaggtttgctgaaaaatcaacgcacaaaatacaattgccctttttgaaacatgaataaaggaaatgacaggcaaatgtattctcatccatggaggagaatgtcagaggaattgccccattacacaaaggggtacagacgcttgtgtcctcttcttcttagcggaaggggagtggggaattgggggtgaatataggattccaaatagtaaatgattttaaagagaagtcaatgggtttgaacaatgtacagtggcccgaaaacagataatgttttttgttattgttgtttgtttgcttgttttttttgagacggagtttcgttctgtgttgcccagagtggagtgcagtggcgggacctctgcccagtgcaacctctgcctcctgggttcaagcgattctcctgcctcagcttcccgagtagctgggattacaggcatgtgacaccacgcctggctaattttgtatttttagtagagacggggtttcatcacgctgaccaggctggtcacgaactctggacctcaggtgatccacccgcctcgggctcccaaagtgctgggatgataggtgtgagccactgcgcctggcctcagataatggtttatgacgagtctctgcagggacagaggctgtggaaccctcagaacagacagtggtttatgaggagtctctgcagggctgttgacagacatcagtctttcctccgcgatgtgggttcagaaactcagggaaggggacactggtcatttttccttctttgacatgtccagacttcaggaaacttcagagaacaacttcatcctgtgcatcgggagacacagaggaagcaggagggggaagttagagagatcttgaggcttcttcagttcagcaggacaaagcaccgtactttggggtgttggtttttaagacccagcagctgaaagctcccacatttctgcaatgatcttcgttgtcgtgatgcattaacttcttaagcactgcaagatttcatgccccagccattcccttgggtttttttgtttgtttgtttgagatggagtctagctctatcaccaggctggagtgccgtggtgtgatctcggctcgctgcagcctctgcctcccgggttcaagtgattctcctgcctcagcctcctgagtagctgggattgcaggtgtgcgccaccatgcccggctagtttttgtatttttagtaaagacagggtttcaccatgttggccaagctggtctcgaactcctgacctacctcaagtaatctgcccgcctcggtctcccgaagtgctgggatacagtagtgagccaccgtgcctgtcctccttgaggtcttttgaagtgatatgtatctgggagctatagatttactttctttcctatctatctcaagtcgggatactaaagttttaataatttgtttacaaaacaaagaaagaaccttgagaagcttttctatttctccctttacattgcagaatcgtctaattagcatttttaaaagtgtctgcttttgaaacaccgccacgattcaccttcaaaaccgcatgggttgaggaattttcggaagagcgattctaactcagctttcaaaattccttgggcgtctactgcttgttgaagtttcccacctctttctgagtcagtttagacagcttttccctttaggtaattgtctgtttcatcaagctttggaattaatgagcttggttacaaattctcttttctccctgttggactcctggcattgctcttgatttcgtctgaaagtctctcatgatatgagctgcccgcccccaatgtggactttttgaggggattaattacttcccttattttgcagtttgctttcttatcagttgttcttcgaatctctcattcctcaagcaaaggaatttctttttttctttttctttttctttttttttttgagatagagtctcgctctgtcaccaggctgcagtgcactggcgcgatctcagctcactgcaacctccgcctcctgggttcaagtgattctcctgcctcagcctcctgagtagctgggactgcaggcacctgccatcaagcctggctaagtgttgtgtttttagtagggacggggtttyattatgttgcccaggctggtctcgaactcctgacttcgggtgatccgcccacctcggccttcctaagtgatgggattacaggcgtgagccaccgcgcccagctgtacatcccttattttgcagtttgctttctgatctgttgttcttcacatctctaattcctcaagcaaaggaatttcaaaatattagttattttattaagcactaagtattcgctagcaatacaccaacactaggatacatttcatccttataaaacccccatgaatccctcagagagtgacttcagtatccaaggagagcatttgctgtttttttattttatttaattwatttattttttttgagactgagtctygctctgttgcccaggctggagtgcgttggcgcgatctcagctcactgcaagctccgcctcccaggttcatgccgttctcctgcctcagcctcccgagtaaatgggaccacaggtgcccgccaccacgtctggctaattttttttttattttttatttttttttagtagagayggggtttcaccatgttggccaggatggtcttgatctcctgacctcgtgatccacctgcctcggcctctcaaagtgttgggattacaggcgtgagccaccacgcccggcctcttttaaattttttagagaccaggtcttgctctgtcaccctggctgctgtgcattttttttttttttttgtagaaacggcatcttgctgttcrcccaggttggtcttgtgcgctggaattatgacacaatcactggctgcaaccttgaaatcctggcctcaagtgattctcccacctctgcctcccaaagtgctgggatgacaggcatgagccaccatggctggccttgacattatttctttctaaatatttaacaagcaaactgcaactttagccacatgaatcattctttaatcctttgatcatcatctgcaaatttggattaaaaataaccrcggggcattgctcgagtgatactgcctttatataagagacaacattgtggaaactttaaaattatagagcagaagaatatgcattagcctggaaatgaaattaaaataatgtaagaattttaaagaaaaggctatacagctgcagtagcttgatgctgtctttgtaatgataattctgtattgctgtgtatgtattatttactagtgtgtatgcatgcatgcatgcatgcattgtatattaagacttggaagatcagctgggtgccgtgtctcatgcctgtaatcccagcactttgggaggccaaggtgagtggattacttgaggtcaggagttcgagaccagactgtcaaacatggtgaaacaccatctctattaaaaaaaaaaaaaattagccgagtgtggtggcgcgtgtgtgtcattccagctactcgggaggctgaggcaggggaatcgcttgaacctgggaggcggaggttgcagtaagccgagatggcgccattgcactccagcctgggtgaaaagagtgaaactccgtctcaaaaaaaaaaaaaagaaagaagaaaaaccttgcaggatctgtccagggtccctggggagaatctgtgtgacatacatatctctgtgatgtttcatatcatctgagggcatggttgtatgtcactctgaaacctctatcctctgtctcatcagaacacatggactcgattccaaattcacggccagtaacctgggcgaccagtcggtaccagaagaaaaactaggaggttgattggtttgtttttgagatggggtctcgccctgtcacccaggctggagtgcagtggtacaatcacagctcacagcagcctcgacctgctggactgaaacgatcaccccacctccacctcccgagtagctgggactacacgaatgcaccagcatgcctggctaattttttaaaattttttggtagagccgaggtcttgctatgttgtccagccgggtctccagttcctagccccaagcgatcctcctgctgtggcctcccaaagtgttgggattatgatttgtgcatttataaagatgagaggtttgatttgtcctgtatacaaatgcatcaggccattcttcatgctgagacatgcagatggtctcagcctccgtaggagagtagcttagtatttcagagggcatgtgtgctcttcagacctctaggaagctcctcgcagcttcatcagtgaaactcagtaccccctacaatgtatacccctcctagggagcaaatgaacgtggctattacctctcttcccaccccagttgtctcaagatcaatgggtgttacaaaaaagagctatcggctgggagtggtggctcatgcctgtaatcccaacactttgggaggctgagggggaggatcatgtgaggttaggagttcaagaccagcctaaccaacatggagaaacccagtctctactaaaaatacagaaattagccaggcgtggtggcagtcacctgtaatcccagctactcaggaggctgaggcaggagaatcgcttgaacccgggggcggaaattgtggtgagcccagatcatgccactgcactccagcctggacgacaagagcgaaactccatctcaaaaaaaaaaaaaaatagaaagctattgtaaatgctgagtgtatcagctccaccattcagggctcatgtccagcaagtcctgaccactttgaaatcatgtgatcaggcctgccatcaaaatgaacaaatttgcagtgtagactgcgcccacttcaccatgaagtagaccactcgtatcattgcttgtcttaagcatgtatttgtatccgccatgcagtctaatgaaagtctgtcttagggttgattggaacttggattgatgtgccgagagggtgacaggttaattaatcaagtcaaggatgcaggtactgggaatttttttatttttattttttttaagatggaacctctctctgttgcccaggctggagtgcagtggtgcgatctcggctcactgcaacctccgcctcctgggttcaagcaattcggcctcatcctcctgggtagctgggacctcagctacctcccagcacgcctggctaatttttacattttcagtagagacgggktttcgatatgttactcaggctgatctcgaactcacagtctcgagtgagccgcctgcctcggcctgccgaagtgctgggattacaggcatgagacaccctacccagcccccccatttctttttttttttttattaataaacaaatctaaccaccctctctggaccttctatttcccctggggactgtccctgactacagtctccgctgcagcaaatccccatacaggaattgctcatacaattcacttccagtcccccatgctccactgaaaatgctccaggtggccgggcgcagtggctcacgcctgtcatcccagcactttgggaggctgaggcgggtggatcacatgaggccaggagttcgagaccagcctggccaacgtggtgaaaccccgtctctactaaaaatacagaaattagccaggcatggtggcggacgcctgtaatcccagctactcgggaggctgaggcaggagaatcgcttgaacccgggaccaggaggttgcagtgagccgagatcgcgccactgcactccagcctgggtgacaagagtgaaactccatctcaaaaaaagaaaaaataagaagaaattgctccaggtagagccaccagggacttcaccctttccctgcaatgtgcaggcctcagccctggctgtttcctcctccacgcacgcccttcccccaggtatccaatccctctccttcccttcattcaggcctgcgccaaaacctccgaagacagggcttctcctgggcgcttgctttcccctcacaaagctttgtttgtctttatgggtcatctcaccaattggcttatgtatttatcgattcacttatttattataaatttaaggagtacaggtgcggatttatttattttatttatttaggctatgtatttattgatttgcttatttattataaatttaaagagtacaggtgcggatttctttttttgttcccttttttttttttttcccctgcagatgtctgttgcccaggctggagtgtagtggcatgattttggctcactgcaacacctgcctcccgggttcaagccattctcctgcctcagcctcccgagtagctgggattataggcatgtctcaccacacccagctaatttttatatttttaatagaggtggggtttcaccatgttggccgggatggtcttgatctcttgaccttgtgatccgccggcctcggcctcccagagtgctgggatgacaggtgtgagccaccgtacccagcccggcttatgtatttattgattcacttatttattataaatttaaggagtacaggtgcggatttcttgcatggagacattgcacagcggtgaagtcccggcttctagtgaacccctcaccccagctgtgaatactatacctgtaggtgatttttttcatcctccacctcctgccaacctcccacctttcagggtcctcatcgtcaatccaccctctgtgtctgtgtagacccactggtgaactcccacttgcaagtgagaacatggcaggatcagtgtttgactttcagtatctgagttgtttgttaggagaacggcctgcttttcaaactgaagctctgtttccattaaaatacaacttccaatttccctgctgttcctagctcctagcaacaccattctgccttctgtcttgatgaatctgatgactctagggaccttagaaagtggaaacaggctgggcatggtggatcatgcctgtaatcccagcactttgggaggctgaggcgggtggatcacctgaggtcatgagttcaagaccagcctgaccaatatggtgaaaccccgtctctactaaaaatacaaaaattagctcagcatggtggcacacgcctgtagtcccagctactcgggaagctgaggcaggagaatcgcttgaacatgggaggtagagactgcagtaagccgggatcgtgccactgcactccagcctgggcaacagagtgagactccgtctcaaaaaataaaaagtaaaataataaaataaaaagtggaaacgtgcagtgtttgtccatgtcactgcaaaagacatgatttcattctttgatatgactgcataatattccatggtgtgtatatactatactgtactttctttatattagccagtcctctgctgacagacacttaggttgattgcatatctttgctgttctgaatactactgcaaaaaacctacaacagctgtgtgcgtggatcagggctctgtgcctggaaggcagggaaggaggtactgaatgtgtgtgtgtgggtctagctgtgtgcatggatctgggctgtgtgcatggatcagggctgtgtgcatggatgaaggcagggagggaaatattgaatgcatgtgcatggatcagggctgtgtgcatgggtgaaggcagggagggagatattgaatgcacatgcatggagccagctgtgtgcgtggatcagggctgtgtgcatggatgcaggcagggaggcagctgcagaatgcatgtgtatggagccagctgtgtgcatggatcagggctgtgtgcatgggtgaaggcagggagggagatattgaatgcatgtgcatggatccagctgtgtgcatggatcagggctcatgatagcaaagcagagaaagaagggagatgacgagggaggggtccctggaagaatcaggcagtggctatttcctgcaacagctcccttctcctctccttccctgctatgcctctcatttttctaatttgttaattctggataataatatcacataagagtgttgtgaacattgccgacagaatatatgggaaaccattttctccactgtaaagctctgtgtaattatgtaattatgagccattcattcctctctctgactatattgcttgtggctctattttgtacacttgaaactctatcttctattttgtgtgtgtttcatcttttttttttcctgcacttgtgcctcaccatccacccactgcccatgtctattggaagctcctgggcagcaggggttatttctgaaattctcttcctttgccccaagagctggcaaaatacgggtgagcatttaataaacattcattggactgaatgaagttgaaatggtttctgtagcttgcagctccaacactctccaggactcaagagtggcttgatgcagattttaccataaatggtgctgcaccgtctccccagcgccccccagccgggcgtctggaacttcaaagatgctcttgtgtctgttaaaagggaacacactgcgttcttggatttgggttcacatttatacatcttctgtcctcttgccagtctctaaagattgtcatttaaaaaaaaaaaaagctgtagataaaacaggatgtgttatttaagccacagggagcatgatttacaggaccgtcttgtgtattcagaagacaactttcatttccctgcacaaggcgtcaccaagcaagcccacttcatcattccgagaatgtgtggaagacagcgtctgtcagccacagctgcacagcggcagataatgaaattctgccgcgaagccacagttccttgctctacacaggaggtcggccagataggaagtgtcttagtcttcgtgggccacctctagtctctttggcatatttctttctttctttctttctttctttttcttaacaacactttaagagtataaaaccattcttagctagtagcctgtacagaaacaggtacaggctgaattttgcccatggtgtatagtttgcagagctgcataagaagctagaatgagtggggttcccagcgtggtgtctgagaccaccagcctctgggagctcgttagaaatgcagattcttgggtcgggcacgatggctcatgcctgtnnnnnnnnnnnnnnnnnnnncacttttggaggctgacatgggcgaatcatgagatcaggagttcgagaccagcctggccaacatggtgaaatcctgtctctactaaaaatacaaaaaattagctggatgtagtggcaggcacctgtaatcccagctactcgggaggctgaggcaggagaattgcttgaacttgggaggcggaggttgcagtgagccaagatcatgccactgcactccagccctgacatctcaaataaataaataaataataaaaaataaaaaaaaatgctgattcttgggcctcctaagatccactgagttagaaataccaggggtgcagttgtttttacaagctctctggcccattctcttgagtgctaagcgtgaggaccccagaccccaggactgcaggggattgagccccagctttggggctgtggacaaaagaagatagttctcggtaattccatatgaatgctctatatgaatcctaaaggaagttgtgttgctttagttgttgttgttgttgttttcaaaacaagtggatacaagttcattcaggaatcccccagcctcacacaagtgaacaagagtgatttcgattcagaggaagacttttagaaacagaagagtgtagtgtgaaggttgtctagttttttttaaggaaaagctggattatactgtaaattgataatagagggggcagagagagaggaggagaaagaggaaggggaagaggaggaagggaagggagagagagaaaaaggaagatgaggaaaaggagaaaaaataaaaggaggaagacagagggatagaaagagaaaaaggagaagtaagggaggaggagaaggaagaaggaggagaagatgaaggaggaggaaaaagggaggaatagagaaaaggaaagggcatgaaagaaaagaagagaaggaggagagaagaggaagagaaagatagaggaaaagaagaagataagagaaagaggaggaggaggaagaagttggagaagatggaggaggaagaagagggagaaaatgagaaaagaggagaaagaaaggaagaggaagggagagagagggatagagagaaaaacaggaggaggataaggcagaaaggaggaagaggacgaggtggaggaggaagaagagaagatggaggagaaaaaaagaggaatagagagcgaaaaggcaagaagagaaaagaggagaaagaaaaaaagagaaaggcagagagagaagagaaagggagaaagagatgggaaaggagaataagggaaaaaagaaaaaggaggaggatacgatggaggaggaagaagagagaaaaaggaagaggaagggatagaagaataggaggagggtaagggggaaagagaaggagaaggaagaaatgaaagaggaggaggataagatgggggaggaagagaaagaggaatagagagagaaaaagagaaaaaggaagaggaagcaaaggaggaaggagaagggtgtgagagagagggagggaaagagggaggttctctcaggctcagaggtgatgccacccagatcagtttgaggtacacattggaaatgccacagaagttacagaactgggaagggccgttttgtccaaggagatgccatctctcctttccacagggtatgtctgtgatggactctctggtggctctaacagactccccaggaacaaagacatcatatgctctgaggctgccaccctaaaaagaagtgtcctctttggatgggaaacttcttcccttgagtggataaatgccctcctttggtttagccttaaaagccagccagcagtctctgtgcttttgattgaaggtctctgtgcgagaccttccagtgactcaagctaagagatgagccaagtatcattcctggagcccggcatttcttcctggtttcagaatgcccagactctctgccattgagaccgttcaattttgtattagtcgcagttctcaagaaaaacaggaccaataggatctatgcatagagaaagatttagtttaattgactcttgggattgtaggggcgggcaagtccaaaattggtaggctggctggcaggctggagacctggccaagatttgacattgcagccttgagcctaaaatctgcagggcaggctggacactcaggcaggattgccctgtcacagtctggagtggaattccttttctagtaagtgtcagtgtttgctgtgaaggccttctcctgatgaggtgaggcccacccacattgtgaagcgtcctctccttcgcttaaatgcaactgatttgtaaatgttaatgatatccacaaactacccagtctggtgcttgaccaaatgtctgggcaccatagcccagccaattgatacgtgaactcaatcatcacagagcccacttaagacctgtgttacctgacattaaacagcacaagccatctcctctctgttgtctgtcaggtgagtgtttattcctggtaagagcaggtttgtgtgtgtgtcttacgagattgtagttaaaggaaggttttcttaatcctctctgcttcaggtggtcactgaggccatgaaacatccctagaagtttagcacaacccacagctctcattggggagttgagagcacgtgtgtgcacgtacacatgtgcacactcatgcacacatacatgcacacatgtacaaatacacacatatagatgcaaacacatgcgcgcacctgcacccctcccacacatgcatagtatgtgcacacatgctcacgtgcataaatgcacacacaccttcacatgcatagacacacatgcacatatacacgtgcaaacccatgcacacagacatgcgtatatccacacatctgtgcccacatgcatgtgtgcacatatgcatgagcaaacacacatgcacacatttatgcaaatgtatattcctatcgacacatgcacatattcacgtgtgcattcatgcacatgcatgtacgtacatgtactcacacatatccatatacatacagacatgcacatacactcatacaatacacatccctcaagtacacattcacatgcatgcatacatatacacatgtgcaaacacacgcaggcccatacccgcacatctgcgcccccacacacatgcatgcacatatatttatccaaacacatgcatgaatacacacacgtacccattaacgtgtgcattcatgcacgtgcacatacatatacatatacatacagacatgcacatacaatcatacaatacacatctacccacaagtacacacacatccacataaatgcgtacctatgcatatctgtgcacacacacacatgcacacattatgtcaccctatgatttgcgtgtgagtcagcatcccagaaaacatccagccccgaaacctattttccagaacattccagaaggagcaagcagcaggtacagagaggcaagaggcaggggacatcgtggcagaagcagcaggatccctgggtggctggagcagaggtatggagaggaagtgttgcctttgtagaatgttcagaacattcttccaggaaggcagctgagcctgggcagaagtctctgaatttctctttgaccacagcattactccgtcccctcttccacaactttggggcgtggaaactctccttgggaagctcagctaggagtctctttacttgccagccacttccctgagtgtgagtttctgccctaagatgtggacggtgctaaaataaatacatgtgccctcagatctctctcagcacaactcaaggatctactaacagcgtctgcattcaaatagcaacatttccagaaggcgaacgagcctctgcgtgccttgcagagagctgagcgtttgccgcccaagccctgctagcctcctccctaggagacatcccgggtgatgccattcctgctgccctctgctcctggcagtggagcgttaggtagtttccttgcagacagcacaggggatccgtcccaaggacaaagggaagccctgtgtgtgtctcttctgcaaagcccagcatgtctaatacaagttaagtgtggagttcagagggaacagctttctgaagctctttgaagagtcacaggcaaatatctctgtgtgccctgggtgctatctggagaacaggagctctaacaaaaaggaaatcgtggtttgaatgacacaaaagggatttgctatttcaaattcgcaatatctgccttatcttagaaatcagaattctcagagtcaccacagatatttggtcaaataggggcagaaccagaattnnnnnnnnnnnnnnnnnnnnnnnnnnnnnnnnnnnnnnnnnnnnnnnnnnnnnnnnnnnnnnnnnnnnnnnnnnnnnnnnnnnnnnnnnnnnnnnnnnnnnnnnnnnnnnnnnnnnnnnnnnnnnnnnnnnnnnnnnnnnnnnnnnnnnnnnnnnnnnnnnnnnnnnnnnnnnnnnnnnnnnnnnnnnnnnnnnnnnnnnnnnnnnnnnnnnnnnnnnnnnnnnnnnnnnnnnnnnnnnnnnnnnnnnnnnnnnnnnnnnnnnnnnnnnnnnnnnnnnnnnnnnnnnnnnnnnnnnnnnnnnnnnnnnnnnnnnnnnnnnnnnnnnnnnnnnnnnnnnnnnnnnnnnnnnnnnnnnnnnnnnnnnnnnnnnnnnnnnnnnnnnnnnnnnnnnnnnnnnnnnnnnnnnnnnnnnnnnnnnnnnnnnnnnnnnnnnnnnnnnnnnnnnnnnnnnnnnnnnnnnnnnnnnnnnnnnnnnnnnnnnnnnnnnnnnnnnnnnnnnnnnnnnnnnnnnnnnnnnnnnnnnnnnnnnnnnnnnnnnnnnnnnnnnnnnnnnnnnnnnnnnnnnnnnnnnnnnnnnnnnnnnnnnnnnnnnnnnnnnnnnnnnnnnnnnnnnnnnnnnnnnnnnnnnnnnnnnnnnnnnnnnnnnnnnnnnnnnnnnnnnnnnnnnnnnnnnnnnnnnnnnnnnnnnnnnnnnnnnnnnnnnnnnnnnnnnnnnnnnnnnnnnnnnnnnnnnnnnnnnnnnnnnnnnnnnnnnnnnnnnnnnnnnnnnnnnnnnnnnnnnnnnnnnnnnnnnnnnnnnnnnnnnnnnnnnnnnnnnnnnnnnnnnnnnnnnnnnnnnnnnnnnnnnnnnnnnnnnnnnnnnnnnnnnnnnnnnnnnnnnnnnnnnnnnnnnnnnnnnnnnnnnnnnnnnnnnnnnnnnnnnnnnnnnnnnnnnnnnnnnnnnnnnnnnnnnnnnnnnnnnnnnnnnnnnnnnnnnnnnnnnnnnnnnnnnnnnnnnnnnnnnnnnnnnnnnnnnnnnnnnnnnnnnnnnnnnnnnnnnnnnnnnnnnnnnnnnnnnnnnnnnnnnnnnnnnnnnnnnnnnnnnnnnnnnnnnnnnnnnnnnnnnnnnnnnnnnnnnnnnnnnnnnnnnnnnnnnnnnnnnnnnnnnnnnnnnnnnnnnnnnnnnnnnnnnnnnnnnnnnnnnnnnnnnnnnnnnnnnnnnnnnnnnnnnnnnnnnnnnnnnnnnnnnnnnnnnnnnnnnnnnnnnnnnnnnnnnnnnnnnnnnnnnnnnnnnnnnnnnnnnnnnnnnnnnnnnnnnnnnnnnnnnnnnnnnnnnnnnnnnnnnnnnnnnnnnnnnnnnnnnnnnnnnnnnnnnnnnnnnnnnnnnnnnnnnnnnnnnnnnnnnnnnnnnnnnnnnnnnnnnnnnnnnnnnnnnnnnnnnnnnnnnnnnnnnnnnnnnnnnnnnnnnnnnnnnnnnnnnnnnnnnnnnnnnnnnnnnnnnnnnnnnnnnnnnnnnnnnnnnnnnnnnnnnnnnnnnnnnnnnnnnnnnnnnnnnnnnnnnnnnnnnnnnnnnnnnnnnnnnnnnnnnnnnnnnnnnnnnnnnnnnnnnnnnnnnnnnnnnnnnnnnnnnnnnnnnnnnnnnnnnnnnnnnnnnnnnnnnnnnnnnnnnnnnnnnnnnnnnnnnnnnnnnnnnnnnnnnnnnnnnnnnnnnnnnnnnnnnnnnnnnnnnnnnnnnnnnnnnnnnnnnnnnnnnnnnnnnnnnnnnnnnnnnnnnnnnntccctcccatccttccttctctttggttctttgtttctcttctttttttttctttctgtctcttttccttccttcctcctttccttctttgcttcctgcctcccttccttctttgcttccttcctgttttttttcttttttcatccttcccttcctcccttcttccctcctttctcccttttttcttcctccctcctttcttctctgcttcctttctctctccttccttccctcttttctgtcttgttctctgcttccttcctttcttactgcctccctccctctctctctgtgtcactccttccttccctcccattatgcttccttctttccttccttaattcctttctctatttcctcctttcttctttctctttttctttttccttctctttcttccttccattgattttttttgtttctctgtctttctccttccctttcactcaacccttcactgacctttgaatacccaaaacaaaggtgctttgacccaggccatagctgatgacactgagttgttcccagcaggtgcaggattctgtgcagacacgtctgtcccctcccttcctgcccggttctcagcactgcctggcatgtacagatgtgggtgcagggctggctggggtgcaggtgcagggtgctccagctgcaccttccggaaagacatttcatggagttaggaggaaaaggggctgcctccggagggaaaactgaggtattcattgtcagcaggaggaaggctgactcgaacccttcttattctgcagcagctctgagacaggtcccagagcttcccctctaacaaaagcgactctgagaacgatgagttgctttgctgttttccctacctgtcacattctctgtgctgccctaacacgagaaaccgtgcccatggtctgggtgttttcttttttttctttcttttttttttgagatggcatctcgctctgtcgcccaggctggagtgcagtggcgccatctcggctcactgcaagccccgcctcccgggttcacgccattctcctgcctcagcttcccgagtagctgggactacaggcgctcgccaccatgcccggctaattttttgtgttttttagtagagacggggtttcactgtgttagccaggatggtcttgatctcctgacctcgcgatccgcctgcctcggcctcccaaagtgctggggtgacaggcgtgagctaccgcgcctgtgttttctttggggaaaaagatcacaaagggctgggccagtccaaggtctgctttgcagaacgtggcattagagagacaaatgctggcaggaacccttggtgttcttgaacagtcccatgaacacagagggctctgtttgcaatagagctgtggggcagactgaatgagccaggtaaccaacaggagattgaaatgacttgggaggggaactcgagtaattgctcatgctcctgaagtctctcccctccctgactcttgaggtagcaggtaagtgtgggtataattgcctgtttcctggaaaagaggctttcttgacatatgcacacagcagcctgcgccgatcccagtcaggagagaagtcacctgggcttggtctccatctgccggggttgccagcctgaagtcccatagactgggcagcttagacaacagacactgattttcccaccgtcctggaggctggaagtccaagatgaaggtgtgggctgggcgggctcctcccgaggcctctctccttgggttgtagatgctgtcttctcactgtgtcctcacagggtcgtccctctgtgcatgtctgttttctcctcatctcctcttcttatgagctgtctcagtccatttcaggctgctatcacagaataccatagactgggtggcttataaacaacagacgttgactctcccacagtcctggagactggaagtctgacatcaaggtgtgggcagggctggttcctcctgaggtctctctcctgggcttggagacgccgtcttttccctgtgtcctcacagggttgtccctctgtgtgtgtctgtgtcctcatctccttttcttatgacatgtcttagtccagttctggctgctgtcacagaataccatagactgggtggcttagaaacgacatacattgattctcccacagtcctggaggctggaggtctaagatcaaggtgtgggcagggctggttcctcctgaggcctctctccttggtttcatattttgcaatattaggataaataatctgtgcatgtgtatgagtgtgtgcatgcaaatgaatatataagcatgtttgcatgtgtataagtatgcatgtgaatgagtatgtgaatgtacacgtggatgagcatgtgtgcatgtgaatgagtgtgagcatgtgtgcatgtgtatgtgcgtacttgtgaatgagggtgcgtgcatgtgtatgtgtgcatgtgaagtgtacatgtgaaagtgcatgtgtgtgagctgtgtgcatgtgaatgagtgtgagcatgtgtgactgcatgtgaatgtgtgtacatgtgaatgtgcatgcaaatgtgtgcatgtgtgagctgtgtgcgtgtgagtgcatgtgaatgtgtgtacatgtgaatgagtgcatgtgaatgagtgtgtgcatgtgtgtgagctgtgtgcatgtgaatgagtgagcatgtgagtgcatgtgaatatgtaaatgtgaatgcatgtgtgaatgtgagctgtgtgcatgtgaatgagtgtgagcatgtgtgtgtgcatgtgaattagtgtgcatgtgaatgtatgtgagcatgtgtgtgagctgtgtacatgtgaatgagtgcatgtgaatgtgtgtgtacgtgtgtgtgtgcgagtgtgagcatgtgtgcgtgtgagctgtgtgcgtgcgaatttgtgtgcatgtgaatgagtatatgtgagcatgtgttcatgtgagtttgtgtacatgtaaatgagcatgtgtgcatgtgaatgagtgtgagtatgcatgtgcaagtaggtgtgcatgtgtgtgcgcgtatgcatgagtatgtgtgtgtccatatgtgtatatatatttgtgtgcatgtgagtacataagaatgtatgtgtgcatgtcagcatgtaagtgaccatgcgcacatgaatatgtgtgtgcgtgtgtttttcttacagaaaaaaaatcatccaatagaacttcatcacgtcgtcatctctgtgtccccagaaatacctacattttcagcacaatgcgcttgctgtcttctagaaatcacaagctcattttcaacatagcacaggtggtatcttgccccctaaaatggtagtacttgtgtcgcaattgaatatgcatagcccaagaactcttactcagataagaggatttttcaaaatatggtagaaacagaagcccccagacactgcccacaggggaaccacaaagaggaagcctccttccagagagtgctgagtttgttcaacaatagggacgatgcaggagaacccaggagcagttaagctgcagctgcagaacacaggggcctctccgggtggaggcatcatactacatggtcaagacacaggtcgggtatttggggcatgagcccctgaatcctcagtgtcaatgatggcagacaacaacacaaaacttgttccaggagctgatttaaggatttgtttgcaaagaaggcacagcactaaatataacacagtgtgggtgaacatctcaggcaccagcgtgaggtgtaaatgctcatttctgcgcagcaggaaccatggtctctcctggggacccagggtggcccccatctggcctctctgatcactttgtccagagcagcagtgtgggaaggggcaccatgttggattcacagctgcagtgcttggtgtccctgccttttatatggaagtgggctgggccccagaaagactccgtattttccagctacaagatgatggagaaggaagaagaatgccggctttgggagcagatcctgcctggaaattgggcagaacacagccgcaaaagagagaagcatgaaacagatcaataaaacctctttctgcgttgaaggctgccccagagaaagaccctcaaacaccatgggtgccttcacttggcccctgccttccctctccctttcctcctgctctgttctgtccttcctcccttcctctttccatccctttcgcctttacttttggtctttagatgcccagggcaagacacgggacacagggctcccctgcaagagccaagccatggcgcctgcatccgcccccgagatgttttcagatacagtctctctattagtctgttctcatgctgctaataaagacatgcccaagactgggtgatttatagaggaaagaggcttaatggactcagttccacgtggctggggaggcctgacaatcatggcggaaggtgaaggaggagcaaaggcatgtcttacatggcagcaggcaagagagtgtgtgcaggggagcggccttttataaaaccatcagatgtcatgggacttattcattatcatgagaacagcacgagaaagatctcccatgattcaattacctcccactggctccctcccttgacacatgggaattatgggagctacagttcaagatgaaatttgggtggggacacagccaaaccgtatcagcctccaagtctcccaggacactttgggtttgcaagatctccgggcacccctaggtgatttccagacttgggaagttctctagctccatccatttctttttaggcagcagaagagcagaggcaagtcagtgggaaacaatctcaggagtctggcagctctgttcctctactggggtccagccttcctgttccccttgctcggcacccagaggatgggctggtgggcacactggattgtctaccatgcctttccacgtcacactggctgctgaagtcaagaccaggaggcagtgaactgacagcagcagaatttctgaagtgactgggtgtcacaggccaccccacagagtccacccttttcctttttggagggtgtgtgcctgaactctcaccagtgctaggttttgccatgtggcccacactcatcttgaactcctggactcaagcagtcctcctgccttgttctcccaaagcactgggattacaggcctgagccactgcagtgctaggggcactggtgagaggtgaaatcagttcgggcaaatggatcatcactcccagaagactagaggggacataacaaaggcaatatctggtctttattcctggttctgtaacaaggaggagcttctaaaactctcgcartttcacaaatgctagcaattccctggttgtataatgaggtgatatttgctgtttcctaaatggcttcaagatggggctggccaccagaaacaccaaccatgtcattaggaggttggaatttcaggccagcctgacctctggggaggaaagaggaactggaggttgaatctgattatgtggccaatgacttaatcatacctatgcaatgagaccccagtaaaaactctggacatcaaatgtcttagtctgtttgtgttgctatcacaaaacaacataggctgggcaaccggtaaacatttgttgctcacagttctggaggctggaagttcaagatcaatgcatggcagattctgtgtctggaagggacctgctttctggttcacagacggtgcctcattactgtgtccccacatggtggatacgttcaccagattcccagaagcttattacaagagacaacttctgaaacatcttcattgtgacagaagttaagatgcactgtgttggttcctggattattgcatcctagctctgaaggttctcaggtcccacaacttctaattcctctgagaatcctacatttcttccatcccactgaccatgaccaagggccaactcccactgcagaaaaccagggtgtgctgtgtttcaagattatcgccttccactagggtaaaatccccagtctttgaaaaacctttttctgcatctcaagttcctttttgaaacgtctgtttccatgaaacatacgatcacagctcataaatgcctcaattctccgatgtagcatgccttgctgaattgaaaacaagaacctttttgatgtcctgatgtttcatctaattgctaaatattgtttattaaatacagaagccaagcactcactcatctgcttctagtcaaytaataagcatttcggtcccataaagagtgcgtgattaaatacgtacatcagggattttaatatgcatctgcctagtgagatggattaacccaccactgaaatgcaacccacttgggtacgttattgtcagtgcctgttgtaaagaaacccaacagcagaaaagctgtggttcagattgatcacccaacctcgctttttgcatacatttctcagtgcagctgatgagtatattccacctgtccctgcagcatccatgtgagtcctgagactcctgtttcctgctcagaaatttgactcatcgtagccttcttttcttcttccaccagacccccgatgaaggagcgtggacttccatctacgcagcagtcaccccagagctggaaggagttggtggccrttacctatacaatragaaagagaccaagtccctccacgtcacctacaaccagaaactgcagcagcagctgtggtctaagagttgtgagatgactggggtccttgatgtgaccctgtgatatcctgtctcaggatagctgctgccccaagaaacacattgcacctgccaatagcttgtgggtctgtgaagactgcagtgtttgagtttctcacacccacctgcccacagggctctgtcctctagttttgagacagctgcctcaacctctgcagaacttcaagaagccaaataaacattttggaggataatcaccccaagtggtcttcaaccataaactttgtgattccaaagtgcccagttgtcacaggtgccataaataattacattttccaacataaatgtgccattttccttgccgcgttaatacaactgagtacaaaagttccaagagagatgctctcttttcaggggctgcaatgtcctctctgagacctagtggtggatgaggtctcctgtttgattttgttcctgcactcactcatttttccagagacccagctgtgattcacaggtgtcagacatggggaggtgtgagccttgcttgctacagcctgtaggatgagtttgacgtggccagcagcaccatctggtcaacctcattccagaatggcacagtcacaagtgaagcatgccactgtcaaatccgagaatgtaaaccgctgaacagctatggatcaaatggtagccctcaaaagatatgttcatgccctaaccctcagaacctataaatattactttatttggaaaagaatctttgcagatagaattaagaattttgagatgggtcattatggatcatcccagtgaacctaatgccatcacgagggttcttatcagagacaggtagagggagatttgagtacagaagacaagatattcatgtgatgatgcagacagagactggagtgatgccaccacaagccaagcaatgcctggagccaccaggagctgggacaggcaggaaggattctcccttatacccctcagagcaatcttggcccctctgacgtcttgactttagacttctggtccccagaacggagagagaataaatctttcttgttttaaggctccaacaaattggtagtcacttgttacagcaaccacaggaaatgtatacagcttctgatacttctgaaaacctcacacagccaaagggtacatccttggtatagaggctcactcttactcaccagccaggcaaggaaggctcaatcctttggtgttagagagatagatgttgggttttcaaatttcaacatagagaaatcagtcatttgcaatgcttttgagaaagtactgtgtataccctacgagcctgcactccttatgtgtgagactgatgaccattggttggcttattatccattcccctaagtgacaaaatcccactgactattcaaatccaggctcctggcatgcctgtaccttagaatcacaaccagctgcaattccaggatggagttcaaactaattgtgggggcatgtgcttcttacatgactgctagattgttcccagatggggaaggttgccctgataagcaacttaaatgaaaataataaatgtattgtttggcctctttaaaaaaaaaatcattcatcctccgggaatgggtttgtcaccacagatggtgattttccttggtagataaccaggatgcctggatttctgttgttcctttacagaaaaccaggaattttatgtcatggacccactagacaggggaccttccttggtacaaaaggataagaaatgtggatttgttccctgggatattcacgttagatgcttactacatcatcggtgtaaggtcagccgagagagaggatgaggagacctaaagtcaggcaagcaaactttactgagctgcttggctgctccaccacagttagtggaggcagccccacttacagactatagcagggttttatagggccagaaccaggtcggggtgggggagctgagtcgagggtgcaggaggattgggttggggtgggggagctgagtagggggtgcaagtgtcttgaccgcatcctggagatgtttttcaccagctttgttatgcaaggttcacagacatgctaaccacatcctgtaactgtctggacaaacagttactggaggggtcagtgaaggcggggggcgtttgtctttagccctgggggagctgtgtggagagtgcaagggactgtattgtaaggcctgtggaaggggaagggaacggtctggttggggtgaccctaacaatcggtatgcttctgtttcgggcagagctcagacctcaatacccaggactctcagtgcagaaagaatgagctcaagccccttctgcagaaagatgcagtctctgtgcagaatgtctgcttatatcctgagacccttcataggaaaaccatgaatgatacaaccagactaacaggccaggaaacagcctccgggaaggagaggttgccagaggttacaaggaacaatgaaacttgcaggaaacatgcatgatattcacctccctagtgtagctggattcatggtgctgcagggagacgtgaagcccaacggtgaaaacttgcaacaagatttatggtgcaggggtctgtcccacagaccctgaccaagtgatgggtgaatgaagtacattgacacacagctattctgctttgccagtttggctgagcatccaagccacttagtagcagccgtggcctcgatcagtcagcaagacttgcatttattcagtaaagattaattgacaaaggttgtgagtcaacaccactagagggaaattgacattgcggacttccctaagtagaaagcaatgaagcacctgcgatacataaaaggttagtcttaggaccacatgagtaaacaagttagttagagacattccccacattcctttgcttctactctaatttatttaactaaaggtaaggggactaggctgccttcagccaggtttattactgaagttatacaaacgctcaggccttcccagagggtttgtgtctactataactaaaattttccccaccagcctgactaaacccccacatctggatctgtagaggccccaacatcacatctgccaagcttcccatggggcttaggtctctgtgtgaagatgatgtagatggtcccatgagatggctgtgtgttcagacagcccattgcaggttatgacattgatcagttttccaggcctgctgtaacaagtaaccacaactagggacctcatgacaaaaggaattatttctcctctcccagctctggagaccagaagattgagatcaagatgtctcagggctctgctccatccggaggttctagggaaggatcaattcctgcctctcttagttcctaggggctccaggcatccctttgacttgtggttgcatgactccagtgtcacatgcgtgtaatcccagctacttgggaggctgagacaggagaattgcttgaacccaggaggtggaggttgcggtgagccgagatcatgccattgcaatccagcctgggaaacgagtgaaactccgtctcaaaaaaaaaaaaaaatccttatttccaaataaagtcttattcccaggctctgggtattatgatataggcagatctttttgggagaccacagttcagtccactacagttgcgtccagttccatccagaggctcgaggagaggatccttcctgcctctcccggctcctgggggctccaggcatccctgggcttgtggccgcatcactgcagtctctgcctctgtctccacgtggccttctcctctgtgtgtgtgtgtcttcttctgtctcttagaaggaagcctgtcattggatttagggcccaccctactccagaatgatctcacctcaagatcttaactcattgcatcttcaaagatccttatttccagccaggcacagtggctcacacctgtaatctcagcactttgggagggtgaggtgggcaaatcacctgaggtcaggagttcgacaccagcctgaccaacatggagaaaccccatctctaccccatcattacaaaaatttttaaccccatcattacaaaattctgtaattttgtaaaaatacaaaattagccagacatggtgtcacatgcctgtaatcacagctactcgggagactgagacaggagaattgcttgaacccaggaggtggaggttgcggtgagccgagatctcgccatcgcaacccagcctgggcaacaagagtgaaactctgtctcaaaaaaaaatccttatttccaaatgaagtctcattcccaggctctggatattaggatatagacagatctttgtgggagaccacagttcagtccactacaattgtgtccagttccatccagaggctctaggagaggatgcttcctgcctctcccagctcctggggtctccaggtgtccctgagcttgtgcccgcatcactgtagtctctgcctctgtctccacgtggccttctcctctgtgtctgtgtgtcttcttctgtctcttagaaggacacctgtcattggatttagggcctaccctactccaggatgatctcatctcaagatctttaattcactgcatcttcaaagatccttatttccaaataagttctcattcccaggctctgggtattagggtatagacagatctttttgggagaccacagttcagtccactacaattgtgtccagttccctccagaggctctaagagaagaacattcctgcccctcccatctcctgggggctccagacattccttgggcttgtggccacatcactccagtctctgcctctgtctccacatggtcttctcctctgtgtctgtgtgtcttctgtctcttagaaggacacctctcagccgggcacggtggctcacacctgtaatcccagcactttgggaggccgaggcgggtggatcacgaggtcgggagatcgagaccatcctggctaacatggtgaaaccccatttctactaaaaatacaaaaaattagccaggcacggttgcaggcacctgtagtcccagctacccaggaagctgagacaggagaatggcgtgaacctgggaggcagagcttgcagtgagccgagatagcaccactgcagtccggcctgggcgaaagagtgagactccgtctcaaaagaaaaaaaagacatctctcattggatttagggcccaccctactccaggatgatctcgtctcaagatctttaactcattgcaccttcaaagatccttattcccaaatgaagtctcattcccaggctctggatattaggatatagacagatctttgtgggagaccacagttcagtccactacaattgtgtccagttccatccagaggctctaggagaggatccttcctgcctctcccagctcctggggtctccaggtgtccctgagcttgtggccgcatcactgcagtctctgcctctgtctccacgtggccttctcctctgtgtctgtgtgtcttctgtctcttagaaggacacctgtcattggatttagggcctaccctactccaggatgatctcatctcaagatctttaattcactgcatcttcaaagatccttatttccaaataacttctcattcccaggctctgggtattagggtatagatagatctttttgggagaccacagttcagtccactacaattgggtgcagttccctccagaggctctaggagaggatcttttctgcctctcccagctcctgggggctgcaggcatccctaggcttgtggccgcatcactgcactctctgcctccatctccacgtggccttctccctgtatctgtgtctcttcctgtttctaataaggacacttgatactggatttatggcccacctggataatccagatgatctcatttcaagatcctttactcaatgacacctggcaagaccctttctgtgaataaggtcccattcacggataccagggattaggccttagtcatatctttttgggagacagtattcaatctactattggccacagggaccagatgccatgtgagtgcggaaaatattctttccatttctagagacccggaaagcctcggaggtggatagcttctgttatctacacctcaagtttcatgagtccgcaccttgcgtaactcacacagggtccccacgcacggaagggcgccatattgctttaactgtctgctgcccccgcctggaaattgttaattaggtttgaacaaggagtccttcttctcattttgcactgagcttgcaattggtgtagccatctctgttcatgcgtcttccctcttcaaggacaggcagcaggtctgaaactggacatccccaatccccaatgagccttgtgtaaaaccactggtgagctcaggcctctcattatctgtgacggtctccccaaatatccaggaaagctagtgggcttttgatgctcactgggccaacctctgaaaatgactgacggtcagcccc

SEQ ID NO: 94328 - DNA, 45776 bp, Homo sapiens
aatagttgccattttggcctgccccacctgctatcctgtgtccataaaaaccagacttcagctggcagagcaacacaagtggttggggatacaagctgctgaaggctgggatacaagtggctgagcattggagactacagatagacatggctaacttcagacagtgcagcttctgagaacagcccggccagagacagctggacttcagggaaagctaaccatcttcccacaccatcccctttccaaccccctattccgctggcagccacatccattgccaataaaatcttccacatacactacctttcaatctgctcgtgtgaccagatttttcctggatgctgaaaaagaatgcaggtgtcaagaagggcaggtgcaggaggctgtcaccctgacccttcactgggctattaacacttagctgtccaggaatggcaggctgagtgaaacaagccactccagttcctgcccacaaagggggtcaagggaacaatcctatctcatctggaggctcgtctgggatacaacaaagggtgggttaaaatgcggaattgttggatctgtctcttttctgagaccctgcttcctctctcttttcttcaggaaaaaggaatgttggctctgtttcccttcatgaaagtctagctggtctgaaccgggggagggatgcagtggttaaaggaacccatttccacagagcaagaggctctttccccagcttcccccgccaccatgcactttaagttgtttttcttcttttccaagtaagagagttctctgtctacgtcagcactctgcttatgatggggaaacgacagaggggcattgtctgcaggctgttagctgtaaatttggcaaggcctgtttgggacttaatctaaataaatctatgcagcccctgaaatactttttttttttttttttttttggtctcaaactcgattccaagctgcaggtcgaggcactagaaaggaaaaccagatctgagccaggcaacaggcacagtgtaaataggcaggacaaattcctgtccattaaacccctgctttacggaaggaggccatactccatggcataaatgaggcccaggaaactcaaaggttgttgatggtaggggaggtagaggcataggtgagtgcagataattcccattctctgggtcttccctgcttcacaggtggaagctgcattgatagccatgggtggcacctgccaaggaactcaaaggttgtcaacagcaggggaggtagaggcataggtgagtgtgaatcattcctattctctaggctcccccggcttcatgggtgcaagccacattggcacccatgggtggcacctgtcaaggttgctgggacttggggatgaaaagatagaagaggaaaggaggatgcccacttcctctctccctcataccccaggttatcactgaaaggagaaagagaattgagggaagcctaattccctgtcttcagaatgggcaaccaacacaattttccacctccagtttatactcagaaacagaccctgggaccagatagtactttagaggacatcctgaaaacgaccaccttggtcttttagacacaagaaagaggcagaaactttactgcccgccggcaagcccataagcctcagaattcctaagattcacctgttaactccgacagatgtggcgagagcacttctctggctcataaagtttaactgctcccatacgaggtttaatttctttcaccagggtgaggcagcttggggtacagtgttgttttatttcttgtttctgagatgttttgcactacattctttctttgtataatacacatgtttgatccatgcctacttaaccttgtaaagcttgtttattctttcacctagaggccatcaaggctccaaatgggcaggcagccggagcctcggatgatggctcgcctttgccggggactcttgggagacctctgggaggaatctaactgccattttccccaaacaacgccctctttcagcaggaagtagctcagactggtcgtcatccattttctaagggcagttagatgtgcctctccagagggggaaaatggtacagaacaactgggctcctggctaaacttcacccccaagcctggaaccttagtcctaagtgaaaacagctgaacccatatttcaacccaaatgattgcccttttggcctgccctgccccctgtcctgtgcccataaaaaccagacttctgctggcagagcaacacaagcagctgatgcaagcagtcagggatgcaagctgctgagcgtcgggtatacaagtggctgagcaagggagactacaaatagaagctaacttcagatggtgcagcttcagatgggagcccagtcagagatggctgggcttcagggaaagatcaccttcttcccacgccgtcccctttccaactccccattctgctgagagcacatccatctgagagccacatccatcgcccagtaaaatcctccgcatacactacccttcaatccatttctgtgaccacctggatgccaaacaagaactcgggtgtcaaaaagggcaggtgcagaaggctgtcactctgaccctttgctgggctgttaacacttagtcatccatggactgcaggctgagtgaaatgagccactccagttccggcccatgaagggggtcaagggaaaaatctcatctcattttttaaaattaatatatcatcattgtacatttttttcatgagaaagggcctcactcttttgtccaggctaaagtgcagtggcacaatcacagctcactgtggcctcgaccttttagtcttaagcgatcctcctgcctcggcctcatgggtagctgggactacaggtgtgcaccaccatgcctggctgtgtacatatttggggggtataggtaatcttttgaaacattcaaacaatgtgtcatgatccaatcagggaatttggggtatccatcacatcaaacattcatactttcttggtgtttggagcattacaattcttttctagctgttttgaaacataaaacaaatcattattttgttttgttttcattttaacttttgagacagggtcataggctggacaaatcattgttcactataatttccctactgtactatcaaatactagaacttatcccttctatccaatggtatttttgtagctcttcaccgacttctcttgatttatgacatgcaatataagtgcaacataagaaatgttttgctatttaaaattagatgcatgctgacatgcacatcttcagaatgggtgagggattaggagtccaaagagattagaaaagatttgatacttatgagacacaatagtaacagcaacatttttattaaaaaaaaaaattattagagaccaggtctcactatgttccaaggctggtttcgaactcctaggctcaagcaatcttctcacatcagcctcccaaagttctgggattacaggcacgagccactgcacccacctaactttttgttaagtcaggttctgttcaaagtagatgatgatagttgagataaaaatagcttttcatagattttcttaaaaatacatcaccgtatataagacattttctcatgtggacaaaccatccattttacccccatgggcgtttctttttcttcataatgtcaaagctgaagcaactagtttagaaacatggatttccagattgtcttcttgtatgcaacccatatgaaaatgttaagttatgtctgaatattttcaagtattacctgtgcaaggaatatggaaaatggtggccaggtagagaaggaatttgaggtagagaaggaattctgcccaaaaggagtggctccttatgtcaccctttacagtgacactttaaaccatagcccaggataaataaattccagctagagtggaatatgaagtggttgtttgggaaagatggatgaaaccacctttacagaattataaataatgagagaaatcgaacatgactgattccatgttgcttctaacctcacaggctacattgttgttgttcttgttgttgttgttgtcttgtatttgtcttgcttcttctagcatatggtgcccaagatgacaatgagaccactttagttcgtagttcaacttggagtcaagggaaagcgaacgtccgccttgttcagagacgaaagctccgtgcagaagacaaggttaggatgacggtggggatctgaactttgctaaagaatatgtattgttaggatgggcacagtggctcatacctgtaatcccagcattctgggaggctgaagcaggaggattgcttgaggccaggagttagcgattagagggggcaacatagcaagaccccatttttacaaaaaaaaaaaaagcgatccacctgtggtggcgtgtgcttgtggtcccagctattcagggggctgaggtgggaggatcatttgagtcaggaggtcgaggctgcagtgacagtgattgtgccactgcactgcagtctgggtaacagagcgaacccctgtctcaaaaaaaaaacaaaaaacaaaaaaagagtaaatgactttacttgatgctaagagagtatctcttttgggatgctagtattggaaatgcagctgacaagtactgttgtataacgttcgtgctaagagtttcaggtgtggagcttgattctgctaccagctctgaaggacgtgggagtatgagaaacaaattgaaatggctcacccagcatgatcgtaattaagtgttctccagtcacctgcaaagtacgtccttaacaccagtgttttcaaccggagtgattctgcccccccgggagacattgtgccacggctggagatatttccggttgtcacaactggggaggaggtggtgatcactacctgcttctagggagtggagcccagggattcttttcaacattgtacaatgtacaggacggcccctacaataaagaatcatcctcctcagaggtcaatagtagggtagtggcgtaaccatgcctcatcccagaacatagaaagtcaggctgaagttcagccaacctgggagttccaatttggatcccggttttatctccttgatgttcaacttgtgcaaaaaataactgcatgagtgttgacagccttccctcaagagcaacataacctagtagacttggcctagagcggtaggtgttcctcagcccgtcgagcctatgctttgttctttctgatgtgttaaactcatgaagaatgtaggcagctgcagatttataagagggcttatttggcaagcgggagtctcaaatcaaaactctgcaatgttcaggctatagagactataaatgcattaggatgaatatttttgtgattcaacacgtagaagtgtgcagacagctcttatttgaaaaaaaaaaaaagtccttgaagtgattcgttttacacctaacgttgcctgcaatgtatgctctgcttcaatatgaaaaaagaaatgcgctccctggcaaatagatgagaaaacacattggtgcacagagctaaacggaagtgatagtgacagagtcacataggtgagcagctatatacatatggtaatagttgcggctgtgtacacacagtcatagttgcaactgtaacctgaattgtttcctgtcttctttttatgtttgaggcaaatagcaaaaggaaagaaaaaggcgtgaaattgaagggctacggagtgatgattcaagatgagttttaagaaaaccacttttccactttgggaaatgcactctgcctacatcaaaagcccgaagggattccaccttcctgccattgaaaaaccccgcgttcagcaccagatgtctgggctccttccgcgagagtgaggttctgcaaatagaacagaaggtcttttgtggacgcctgaaagacccagcagtacattccttggggacttgcctgatctgtttctgggacaacctaacttggtttctgcggaattcctgtttttgcttttcagagtgaatcagctacgcacatgcgtgagccagccgttcagtgccgccgagacagccagtgcgtgtctgttttggcaggaagaagacgtttcttccaaggagcagcctccccgctacatccagccagtgtcgcccttacacagctgcatgtcaggtaactggccttcctggggcttcttcttacaggccggcttttgcacgtgcagagacgctccaggggatattcttttatgctaaactgcgtcttttcaaacaagtccctgtcaatgttttaaaagtaatttgctttcaaaaaataataataatcatcagtgaaaatctcaagtacagattttacatgggagatttccaaacgtaatgcgtaaaaaaaaagcaacgagggaagatgcaccaaatgggagacattgcatccacactagattcttatcttagagatgctgaaggcacgtgcactgaacatcgaagagacaccggaggtgaaaagcgaaactgggtttgggaacagggcccaggcgaagcgttgaacacaggctcgcagcccggggctgaagctcagggcgggaaaggagggctgggattccttctccccggaagagaatcaaaggctatattgtcagtcttgcatgggtgtttcctcgtctgcttcttttatctttatttctattgcattgtattatattttactgtattctatattttattattttgttttattttaaattcagacaggatcttgccgtgttgtccaggctggtctcaaactcctggcctcaagtgatcttcccatctcggcctcccaaaggccagagtgtgccagctgggattacaagtgtgagccaccgcgcccagcctcttgtctctttctaaagataccttgtgtctttagaataaaaaagtagaaagttttattcagtagtaaaaattaaatctggaccaaaatgtttaacattccaagggttaaagtgcagagttctttggaaaagaaaaatctgcttttattgtgtcactaaatacataaatacatcagttcagaggtaggccacagacttgatatctaaccgtacgtcatatgactgttcaamcatgwttgagggtcctatatttagacaccaatataaccagcccgataaaacaaacacaaccagtcatgttccccaggcaagtcagaagcagcccataatatgctttttccttgaaaaatcatgtacatatatatgttatatgcatatatgtacttgttttatatgtatatatgtactatacatacacacataaacatttttactttaaaaagtacatatattaacgttacatgtatatacgtacatgttttataggtatatatgttatgtatacatatatgtatgtatatatacatgcatgtacatgtatacattatatacatataagcatacatatatgaacacataaacatgtatgtagatgtctataggtacatgtttatatgttatatgtttatatttatacgtgcatattataacatgtatttatatgtagatgtgtacgtatatgtacatgttttatgtatctatacatatatgtacatatatattttaaagtatatattatttttgtaaagaaaagcatgcatattttaataaagaaaaattatgctttattatatatttatatattatatttatatattttattgttttgttttttttttctagagataggctctcactttgttgctcagacttaacttgaactcctgggctcaagcaatcctcccacctcggcctccctaagtgctgggattataggcgtgagccaccacacccagccttatttacatattttatgtgatacatttatactatgtatgatgtacaaaagttatactatattatatataataattatgaatatataaattaaaatataggtgaaaatattcctttaggccccctacgaggaaatgacttaagatttgttgccaaaaatcacaaagtgaaagcaattaccattagggcacacacctgtggcaggaaaagaaaacatttctgacacccctcctaatactcgttttgagacatgccaccaaaaccgtccacttgtaaaaatgagtcaggctggagtgtgccagcgtgtcagctcctcatcccagaagtagggtggtttccacccccacataaggaggaagtgagatcaggtaggctatgtgacttctcacagacccagcatgtggctgcatatgaagttgcgaagagacagcaggtggaactctatgaaaccccgtccttgtaggtcaaggatggttgaataatagggaccattgcgtagggttccattctacagagtaacttcccagcaatgatcatgcagtgcctcagaaactgcttcctgccctcttggtcttgtcttgtcttttcttttttgagacggagtctcactctgccgcccaggctggagtgcagcggcacagtctcggctcactgcaagctccgtctcccgggttcaagcgattctcctatctcagcctcccaagtagctgggattacaggtgcacgccaccacatccagctaatttttgtatttttagtacagacggggttttgccatgttggccaggctagtctcaaacacctgacctcaggtgatcagcccacctcagcctcccaaagcgctgggattacaggcgtgagccaccgtgcccagcccgtcttttctatgtttttaaaccaagcattgcttgaaaataatcctttttttacttttttttttgcttattttttttctttttatcttatgtttattattattattactataatttttgagacagagtctctctccgttgctgaggctggagtacaatgctgcgatcttgcctcactgtaacctccgactccggggttcaagcaattttcttgcctcagcctcccgagtagctgggattacaggcatgtgacaccatgcctggctaatttttctatttttagcagagacagggtttcaccatgttggccaggctagtctcgagctcttgggttcaagtgatcggcccacctcgtcctcccaaagtgctggaattacaggcatgagccactgcgcctggcctttttacttcttttgtttgtttgtttatttactttaagaaatgttttcttttttatttttatcttatctttattatttcttatttacttcatttaccactcaacaaataacttctttaaaacatttttttttgaggcagggtcttgctctgtcactcaggctggagtgaaactgcagcttcaacctcccaggctcaaacaatctttccacctcagcctcctgagtagctggcagtagagacacatgccaccatgcctggctaattgttttattatttatagagacagggtcttgctatgatgcccgggctggtctcgaagtcctgggctcaagcgatcttcctgcctcaacctccccaagtgctaggattatgggcataagccacactgcccagcctaatattttttatttttgaagagacagcatctcactttgctgcccaggctgctctgaaactcctggcctcaagcaatcttcctgcctcgtcctcccaaagcgctgggattacaggcatgagccaccatgccaggttggatatgatcatattatagccagcaccctgtgtaacagcacaggcaatcacttaaaaacctaaggacactggcagaatacggtgactcacatctgtaatcccagcacttcgggaggccaaggagggcagatcactggagctcaggactttgagaccagcctaggccacatggcaaaaccccgtctctacaaaaaataaaacaaaataaaaacctaaggaaactgaccactggtttggtagacgtgggcgtggctttgagattcccccatgctgcgatgtggggggagtctgctctgtctgtcctaactctctctgatcttctgacttgggaaaaacaaactcgaagtyaatcattcccagctcaaagccttgtgcaagtgctctctgccttcacgcttgcttcctttgggagagaaccttcctcttcttgatcggggattcaggaaggagcccaggagcagaggtgagtcctgtgaatgttcatttgtgctggatttgggctccgtgaccaggcatgaatagcgtggtgaacaaagagctccccgttcccttttctgtctctgaataattgcccagtttgttttgataaagcagaaacgtacccgtgacttacaggcctaggaatgcagctctttcctggagaagggggatctgttttctaatctgcaggagaggccttgggcaggccccatgctctgggtcacctcaatgtcacagtttccaaaattaaactcattcaaggctgttatcaccatctctttatttatttaacgtttttctccaagaaaaaatattcatatttttacttataaatacataacattgcgggagaaagaaaaattaggtcgggcacggtggctcacgtctgtaatcccagcactttgggaggtcgaggcgggtggattgcttgagcccaggagtttgagaccagcctgagcaaaagaggaaaccccmcctctacttaaaaaaaaaaaaatcaatagccaggcatagtggcatgtgcctgtagtttcagctacttgggaggctgaggtaggaggatcgcttgagcccaagaatttgaggctgcagtgaactatggtcgcaccattgctctccagcctgggtgaaacagccagaccctatctcaaaaaaaaaaaaaaaaaaaaaaaaaggaaaagaaaagaaaaattagaaaaagagcacttttcctaaatctccacacccagagataaaccactgctgggcaggattgctgcaaaaaccatcttcccctagtttgtggtggtttggggttttctcattacatttgtacagtattttgcttttattccgttttctgaccattggcagcatgtcattgtaggtcagaaagcaatgctgagggtattaaaatgctcattttggttttctctccatgtacaattttaaatcaatctctttcccggtgaagatgctattaggttggtgaaacgtaattgcgtcttttgctattacttttagaatatgagaattgtgtgtgctctctagggtaaaacaaacgaacaaataaacaaaaaaacctcacgagcacggcgtacaccttatcccttccttctgtgttctaaacaaagcacaaatgatatctaaggtctttttctcttcgacagacagaaaattattggagatgtagcaattcagtgttagacatccatcaataatgtaagaagtgcattgattcggtctggaaaggccggaaaacttgaagcaaaggcaggaagactgtaagcagggagggggcttccaggtcacagataggtgagagaggaacagttgccttcttttgagtttctgatgagcctttccaaaggaggcratcagatacgcatctatctcagtgagcaaaggggggactttgactagaatgggaggcagaggccctaagcagttccccgcttgacttttccctttagcttattgacttgcgggccttgagatttattttccyttcacaaagctcattgtctttctcagaagactggttttgtgcctgaatcctgctaggagcaaacacccctcccagcatccccgaaaaggcgttgaggggaaatccctcaaccaatcgcttctctcccactcacaccctggggtttcgcagccctgcggaccttgcccacccctcctctctgccctccccgctcccacaccagctgtgtctatccttggtcaggtttcacctggacagacaccacggccacttctaggctctcagtgcctgctggctccagtgtgtcctcactcactggccgctcggcccttctaaaagtggccaggtcactcccctggttactcagaggcagaaacccaacacatctgcatgctcctgtctctttatcttctatgcatgcccatgtcctgtcaacgaaaagaagcgaactctgtagaatatttgaagagatttattctgagccaaataagagtgaccatggcccatgacacagccctcaggaggacccaagaacgtgtgcccaaggtggtcagggtgcagcttgttttatacattttagggaggcatgaggtgtcaatcaaatacatttaagatacacattggtttggtccagaaaggtggaacaactcaaagtcagggggcttccagcttatacatagatttaaacatttcctggttgacaattggttgagttcatctaaagacctgggatcctaggaggctgaggcaggagaatcacttgaacccgggaggcggagcttgcagtgagccaagatcgcgccattgcactccagcctgggcaacagagcaagactccgtctcaaaaaaataaaaaagaaagattaaaaaaaaaaaaaaaaaaccctgggatccctagaaaagaaatcttcaggttaagagaaaagattgtggagaccaaggttattttgaagtcttgtagcggctgcccttagagacaatagatgacaattgtttcctattcagacttttaaaaggtgctagagtcttagtcaatcttttcaggattggaagggtccggtagaaaaagatgtgaatatctatgtgaatagagattctttacatctttacagatgcaaatttttccccacaaaggacagctttgcagggccatttcaagatatggcaaagaaacatgtttttgggtaaaatattttgattttcttattggtctcatgttatgccagagtcagattggaaagtaagtcacaatatatagttaaatgaaacccttctgatgagaatttttggtttgtagggcatgactctccagaccccttagataggaatttgggcaagataaaaagaaaaatcagagcttcgtcctcagtcccatgcacaagccacatggggtcagaccactgcagtaccctgaaggtgacctcttgctgcctgcaactctaattgttatcttccatctcattcctttcctgctctacaccctgggctctccctcacttctcggcgagactgaggggccgcccctctgtgctttgggggtcgcccgtttccctctgtggacagaacatttccaagtgtgggcaatggtcgccccctctcccggcagcacctacccctagcaatgaaggcgaatgcgtctctccttcatgcagcactcagtgcctgcagagtcctctaggcctttttccttcacactgacactcccagttctgttttcaagtctggacctcctgggctcaagcaaatcctcccacttccgcctcccaaagtgctgggattccaggcatgagccaccacgcgcagcctctcattgtatttctgatcttcataccctctactcagattcttttgtgtatcatccaagctttgatctttccccgcttcccccttccaaatcaggactctctctctgcatttctggacattaggaatcacccctgccctgggctcgggaagcagaagacaaaataatctgcttccggacactgggattctctcatcactttgtgatcactcatgggctatgaaagctgataarggggatggagaccctatgaccactytcttcctctttctctgaagaccatctggctgtgtattgaaacacgttttacattcttaacatagtattaaacatttttgaagccttttcactcgggaagagcattcctttatagattttgatcattgttttaagatatttttgctattgatatcatgaacgggaatcaaagttcccctaattacttacttactgttttatttataatcaggtcaatttctgctgtcaatgtgattgtggacatctttatgtcttacaggaagtagagagagagacaacatgttacatctgcaccattcttggtaagatacaattatatgcactcattagtagtctcctttctttctttctttctttctcttccttccttcccttctttctcttcttttttttttttttttttttttttttgagacggagtctcgctctgtcgcccaggctggagtgcagtggcgcgatctcggctcactgcaagctccgcctcccrggttcacaccattctcctgcctcagcctcccgagtagctgggactacaggcgccygcyaccacgcccggstaattttttgtatttttagtagagacggggtttcaccgtgttagccaggatggtctcgatctcctgacctcgtgatccgcccgcctcggcctcccaaagtgctgggattacaggcgtgagccaccgcgcccggcctcttttctttctttctttctctttctttctttctttctttctttctctctctctttcttccttccttcccttctttattttttttcctttcttatatagagacagggtctcaccatgttgctcaagctggtcttaaacacctgggctcaggcratgctcccaccttggcctcccaacgtgctcagataatgggyatgagccaccacgcctgaccgcttctggatctcttgatggtgctttctcagaatgcactgatagtgatttatcctgcatctggagaatgaagcatgagacccrtgattaatagatgtgctccaggctcccttgatttgatgttgccccaggcagcctcagaaggaattgtatttcattctctgcaaatcaggtgggcatcaaccgctaccatcggccaggtgtctggttttccagggaaaatcagggtttcccctactacaaaccttggagactcagattacatctttactgcatcccactggggattgggacactatggccctgctgtccatgtgcattcccagggtggcatcgatgaaagaggcagcaatgatagtggcaggctgtatgtcaccaacccctgcggaaatgttccctcatggtacgcaactaccagggctttctcctccaggctggaacctccttcacctccaaacccacttctcatcagataccagtgggctaaagaagtcagtcctgggtattttcatctgtgtgctacaatgaacagagggttttcatagactcagaagtagcagctcactgtgttctcaccttgccccaagcttgtgtctcttccttgctctgctgggtggtccaaaccctaaccccagcctccattccctatgttcaacacagtttgcttaaggaagaacaatgaagaagagggaatggagaaggggcaatagctgttctggggacccgatccatccaagaaaccatgactaaggcaggctttctggctgtttttgctttttcttgttgctgttgtagttttgagacagccttgctctgttgccctgcagtggtgcgatctcagctcgctgcagcctcaacctcccaggctcaagcgatcctcccacctcagccttcccaggagttgggactacaggcacgtgccaccacgcccagctaagctgtgtatttcttgtagagatgagttttcaccatgttgcgcaggctggtcttgaactcctgtggtaaagcaatccacccgctgcagcctcacaaaatactgagattacaggagagagccactgcaccccaccaaggctttctgttaatcatgagtttaatcacttaacaacagactttacagcatcaaaaaaaacccaaaaaacttcaaggccaaataaagccatcaacggtatcagttaattgtaaccagagaaaaacaatcaaatgcctaagagatgtcctcaaagctattctgaaatgtgatgataatatcaatacctcttaaaatagtgatgccaacttcccccatacacaagttctgcaaatgagatggayaggagcatgacgcagtctctgacagtttgtgtttcaggagctggctgccagcgatgctcgctgtactgctaagtttggcrccatcagcttccagcgacatttccgcctcccgaccgaacatccttcttctgatggcggacgaccttggcattggggacrttggctgctatggcaacaacaccatgaggcaagggacagagaattactcacctggtgcccccaatgcagacaccagaagaaagagaagccactgaaaatgcatataacccttgatcttggcagttcacrcttcaagagttctgcacttctgckttttctaactctccctaatgttactttcttcccatgccagcactaacctcacctcaatccatcctacatatgactgctcatttcatttttatttttatttatttatttttattttttatttttctctgagacaaagtcttgctctgtggtccaggctggactgcactggtacaatcacagctcactgcagccttgacctcccaggttcaagtgatcctcctgcctcagcctcccgagtaattctgggactgcaggtgcccaccatcatgcttgggtaatttgtaagtttcttgtagaggtggggttttgccgtgttgcccagcctcgtctcgaacttctgggctcaagtgatccacacacctcagcctcccaaagtgctggtattgcagatgtaaaccaccatacctggcctcatttcttttctttttttttttttttttgagacagaatctcactgtgttgcccaggctggagtgcagtggtgcgatctcggctcactgcaacctccgcctctgcgattccagtgattctcctgccttactctccagagtagctgggattacaggcgcccgccaccatgcctggataatttttctatttttagtagagacagggttttgccatattggccaggctggtctcgaactcctggcctcaagtgattcacccgcttcagcctcccaaagtgctgggactacaggtgtgagccactgtgcctggcctcatttcattttttaaatatgatttttatccacccagtacataatggacaatgctttagaaatgctatcagccgggcatgactgtaataccagccctttgggaggctgaggcaggaggatcacttaaggccaggagttcaagaccagcctgggaaacatagtgaaatcctgtctctagaaaatataaacattaattttttttttttgagacggagtctcgctctgtcacccaggctggagtgcagtggcatgatcttggctcactgccagctccgtctcccgggtccacgccattctcctgcctcagcctcccaagtagcttggactacaggcgcccaccaccacaccccgctaattttttgtatttttaatagagacggggtttcatcatgttagccaggatggtctcaatctcctgacctcgtgatctgcctgcctcagcctcccaaagtgctgagattacaggcgtgagccaccacgcctggcacattaatttttaaattaaaaaaaaaattagccaggcatgatggcatgcacctgtaatcctagttattcaagagggtgaggtgtgggaggatcacttgagcccaggagtttaaggttgcagtgagctgtgatcagaccactgcactctgggcgacagagaccctgtttcaaaaagtaggctggccgtggtggctcacgcctgtaatcccagcactttgggaggccaaggcaggctgatcacttggaggtcaggagttcgagaccagcctggccaacatggtgaaacccccgtctctactaaaaatacaaaaattagctgggcatggtggcgggcacctgtaatcccagctacttgggaggctgaggcaggagaatcacttgaacccgggagggggaggttgtagtgagactcaaatagtgccactgcactccagcctgggtgacagagtgagactcagtctcaaaatacaaacaaataaacaaacatacaggagaaatcagtgtcgttgcctgtaagcagaagaccaatattgatctctgtctcactcccaaccctatccatctagccaagcccagcacttatgcgggatttcaatcctcccctgctgaaaagctctgcttcagacagacaagtccacaccctcctaatgccaaaatatggcgtgtccatctgtcaagagctagagctagtccgtcctcctgtccgaattccagccttccaccctcatgtagtacttacagtgtgttggcgtccatgaagtcaaaccttcccatgaacactgtgagctccagagaaggtgccctgggctctcagttctgcattccctctgaggtcggtctctcagtaccaacagtgccttgtggaaacttagtcactctatctactcattcatttatttattttagagacaggttgtctctctgtcacccaggttgaagtgcagtgttgcaatcacagctcactgcagcttcaaactcctgagctcaagcaatcctccttcctcagtctcccaagtagctggttctacagacatgcaccaccaatcctggctaatttttctatttttgtagatttttttgtagagacagggtctcgccatgttggcccggctggtcttgaactcctggccctaaackatcctcccgctgtggctttccaaagtgctgggattacaggcatgagccaccgcgtccagccactcattcctatttaaatgagttgatgtttcctcgaaagttcagaagacattagaaatctttgacattacctttgggtcattcctgagaacatcttgaagcactcagcgatgaccagcagaccttctatgaagtagcatgtagctatgcttatgaaaagcctgtctaattttaacaagtaaagctgttaatttgtccctccataggactccgaatattgaccgccttgcagaggacggcgtgaagctgacccaacacatctctgccgcatctttgtgcaccccaagcagagccgccttcctcacgggcagataccctgtgcgatcaggtcagtctctctttacaactgcactagggtgcagcctggtgtattcgtcacagtttctagttcttacattttggtttttttattttttatttaaatagagactggggggtgttctctctatcttgcccatgctggtcttgaaakgctgggctcaaaagatccccgctccttgacctcccagagtgctgggattacaggcatgagccacygtgcccaggcagcttttatattctgatgctttgacatcttagggctttgctgaccttggcaggactggccctcccagggctagccaattcttagagatagcaaacaagtcacctgggagtgcacctttcatgcataaaccaaacagtccagagcccacacccccaaccatcacttttatgagattttcatatatggggctactctctccttgccctaatccccccagaatcaggtaccagctttctagggacagcccctgcagatgaaagcccacggaaattgtacaacctggccagtcttaagccggcttaccctaccttgcccattactttccaaaaaagaaaaacaataaataagaaaggctttttccatgctttcccctcactccctctgcctcctgaccaaccctggagcttccccatatagtcacacagcatggctcacccctgcgtcctcttgaactgtgagtaataaactatcagaaactgtgagtaataaactatctctccaatgacagtcatctcctgatctgttggccttgccatagctgaatgataaaaccttaataataataatacataacacctacattttaaagcacttgggtagaggctgggcacggtggctcatgcctataatcccagcactttgagaggctgaggcaggcagatcacctgaggtcaggagttcaagaccagcctgaccaacatggggaaactccgtctctactgaaaatacaaaaattagctgggcgtgatgatgagtgcctgtaatcccagctacttggaaggctgaggcagtataattgcttgaacccgggaggcggagattgcagtgagccgagatggcgccactgcactccagcctgggtgacagagcaagactctgtcccaaaacaaacaaacaaacaaaaaaacccttgggtagagatttggaatgtctggagagcagaataaaattttatcagtggctaccaaccttgtcagtacgttagaatcatccagaggatattcccaccatcccaaagcccaagttccacccaagaccaatgaaaattagcacccctggggtgataaccaggcgtcagaatattttgaagctccccacacgattccaatgggcagacaactttgagaacctttagattatatcaagagtttgatgaaattataaaatcatttttagttcaggcacaatggctcatgtttctaatcccaacactttaggaggctgaggtgggaggatttacttgagtctaggagttcaagaccagcctgggcaacatagtgagaccccgtctctgccaaaaaattaaaaatattagctaggcatggtgatgagcccctatagtcccagctacttgagagactgaagtgggaggatcagttgagcccaggagttcaaggctgcagtgatctatagtcatgccactgcactcaagcctgggtgacagagtgagaccctgtctctgcaaaaaatttaaaaattagccaggtgtggtggtgcacacctgtagtcccagctactcaggtagctgaggtgggaggatcgtttgagcccaggtggttgagactgcagtggacattgattacaccactgcattccagcctggacgacagaacaagaccccatctttaaataaattaattaacaaacaaaaaaccatttaaatttttagtcctttttcactgaattatattgcttataacctgcacataacaggaaagtccatcttctcgctaaggttttcaataaattaatcatttactttgytgccaaaaatgcaatccactaggcaaagtcatataggaagtccattttcaatttaattttaagtaagagagatttttaccaagtgttctatttttgaataaataataaataacaaacaggaaaaaaaatgtggaacagtaattctttctcttaataattgctcaaagggatggtttccagcattggttaccgtgttcttcagtggaccrgagcatctggaggtcttccaacaaatgagacaacttttgcaaaaatactgaaagagaaagbctatgccactggactcattggtatgtacgtttttaaaagtggtaagcacatgacttttatatggaagggacattcagctaaagagtttggaaaggaaagtgggtgaggtgctgtgggatttcccactagacagaaagctgcatgtatctaggaaccatgttcctttccaggttgttttctgcaaagtagatastcaagaaataccagctcaggcaaggtggctcatgcctataatcccagtactttgagaggccgaggcggaaggattgcttgagcccagaagtttgaaacccgcctgggcaacatagcaagaccccacgtctacaaaaaaatacataaaaataaattaaaaaataaataaaatgtgctcatgcctatggcatatgttccaagctccattgcacaacacataattgcttctttgttctgtgggatcctctcccacccttcacatggactttttgtcttagacatgaatgtcttagactgaacaccttcagctcttttctggttggtttatggatcaacttggctagtttagtgctgccatctaaatgtttgtgtccccctaaaattcctatgttgaaacccttaccccccaggtgatggtggcaggaggtgaagcctttgggaagtgatgaggtcgtgaaggtggagcctcatgtgtgggattagtgcccttacaaaagtgactctggtcaggcgcggtggctcatgcctgtaatcccagcactttgggaggccaaggtgggtggatcgcttgaggccaggactttgagaccagcctgggcagcatggcgaaaccctgtctctacgaaaaagaaaaagaaagaaagaaaaggaacatcaacttaatgaaatatttggcatctcaaacaatgttctcgtagrccatgataaaaaaaaataagaaaaaatatattcttgcatcaaaaatttctgtaatgctacctatttttccccttggtgtgtatgaaaatgtctttactagatttagtacctccctgtcagcttccataactaacatggttatttttctacaagtcaacaaacatgtcatgtattggatgaaaaataaaattaatgacaacagttccttgagaggagaccaagttgccattatcattattgtgttatagtaatgattgttatcaacagttccatttattgataacaaacaacatgactagtggatacaatgagtataaaattcaataaactatatttctaaaaattaaaaattataaaatgttctttstttaattttttaccaaaaaaaaaaaaaaaacaaattctggggagattcagtcatcgctgtcaaacaaaggtgtattttttccaatagacttttttttttttttaaacagggtactcactctgttactcaggctagagggcaatggtgcagtcacagctcactgcagtctcgacctcccagactcaagtgatcctcccaccttagtctcccaagcagttggtactacaggcttgcaccaccatgcccggttaattttttcttttttttctttttttttttttttttttttgtagagatggggtcttcccatgctacccaggctggtctccagcaatcctgggcacaaggaatcctctcacctcggcctcccaaagtgctgggattatagttgtgaaccaccatgcctggccaactataatttttctaagacagaagagtctatccttaagggatatccattgggaaatcatgaggttttccagatggcagacagcattggggtggttgacatctctttgtcaacaccatagtagtggctacatggaagcaaagactatattcctttgactgaatttgaaaggtgtgccttgcaaaacccaccacccacttcaaccatggccactatgatagtggtttctcaaagagagaacaattccaaagtccagaagtcttttgcccatgctgctgatatcacatggtgctttccggccttcatcattgcactgcaaaacaaggtgcaatagactaaataatggtcccagagatgtcaggccctaacctctgaatctagcaaatattagcttatatgcaaaaagagtctttgtaaatgtgattaagtgaacaatcttgaggtgagaagatgatcctgaattatccagctgggcccactgtgcaaggacaaggcttcgtttaacatggaggtagaggaagattgggccacagagaggagaaagcagtgtgattaaagtgaggcgaccacaagccaagggatagctggagccaccaggagctgggagaggcaggaaggatcctcccctagagcctctggagagagtatgtgtgtgtctgtgtcctactatcctcttcttataggacacaagttctatcagattaaggcctgtattagtctgttctcacgctgctaataaagacatacccaagactgggtaatttataaagaaaagaggtttaatggacttccagtttcacatggctggggaggcctcacaatcatggtggaaggcaaaggagaagcaaaggcatgtctttcatggcggcaggcaagagggcatgtgcaggggaactyccatttataaaaccatcagatcttgtgagactcattcactaccatgagaacagtgtaggggaaaccacctccatgattcaattayctccacctggctccactcttgacacatagggattattacaattcaaggtgagatttgcatgaggacacagccaaaccatatcagtgcccaaactaatgacctcattttacattaattatcctttgaacaccctgtctccaaacacagtcacattctgaggtcctgggtgttagggcttcaactcatgaatttgaggcaggccaggatccagctcacaatagagtcattgcagatataatcaagtaaagatgaggtctctacagtgggccctactgcgatgactgctgtccttatgagacaagagattaggtcgcagacacacacagaggacaacgccatggaaacatggagatggagactggagtgatgcggccacaagcccagggaggcctggagccctcaggagctgggagaggcaggaaggatcctcccctagagcctccaatttgagtgtggcctggagacactttgatctcagactcctggtctctaggactgggagaggatagatttctgttgtattaagtgaacagttttacagtaatttgttccacctgtcacgggtaactaatattttggttaaagctgacacatggggtcctcattcccctgaaacgatgaggccagattgtggtgcaaataacagctaatgctgcccacacttctttgcaatctcctggccccccagtgtctaacagagtatcaggaatgtgacaaacagtcaatatcgacatgtccagttatgctcagatgcttgtcacatcaacatcctttttgcctctcaggaaaatggcatctgggtctcaactgtgagtcagccagtgatcattgccaccaccctctccatcayggctttgaccatttctacggaatgcctttctccttgatgggtgattgcgcccrytgggaactctcagagaagcgtgtcaacctggaacaaaaactcaacttcctcttccaagtcctggccttggttgccctcacactggtagcagggaagctcacacacctgatacccgtctcgtggatgccggtcatctggtcagccctttcggccgtcctcctcctygcaagctcctattttgtgsgtgctctgattgtccatgccgattgctttctgatgagaaaccacaccatcacrgagcagcccatgtgcttccaaagaacgacaccccttattctgcaggaggttgcgtcctttctcaaaaggtcagcagaaaagggtcagcttcctccaagcactcagctttggaatgaaaacgcatcctaaatagtcttcttcagtcaggcatggtggctcattcctgtaatcccagtgcttttggaggctgaggtgggaggatcgcctgaggtcaggagttcgagaccagcctgrccaacatggtgaaaccccgtctctactaaaaatacaaaaattagcccaatgtggggctttacaggtgcatgcctgtaatcccagctactcgggaggctgaggtgggagaatcccttgaacctgggaggtggaggttkcagggaggtgaggtcacatcactgcactccagcctgggtgacacagggagaacctgtctcaaaaaaaaaaagtcgttttctttaattgacgtttgaagaatgggatagccatgacctagaaggacaattttttggtaagaatggggcatagatgagggtcagtggagccctgtgacttgccttgtgtccattaaaacattgttacagctgagctgggcatagtggtacacacctgttatcccagctactcgggagactgaggcaagaggataatttgaggccaggagttagagaccagcctggacaacacagcaagaccccatttccacaaaaattttaaaaattagctggctgtggtggcatggacttgtaggcccagctacttgggaggctgaggcaggaggatcacttgagcccaggaggttgaggctatgtagtgaggctatgaagggagcctgggcgacagagcaaggccttgtctcaaaaagaaattgttacaggtcagctggaatttgctactactctggggtcagtcttattccattagcatcctcggatcaccacagacactatttaagtaacctgcatcacctgaagggctttataatcaattataaacttaaaaaaaagtctatcttcagaagtcagatgtcttttggcagaattcagcctgcggtcaattttatggcaaggaaaattcctgtgtgggaccaggagaaatgggatgaaactagttctcagtactacacagctattttcatgctccccaagggcattctagtaaagatggtaacaccatcaaaagtcaccttacctggtgacaatgaggttgtcatcatctcctacaacattcttagataatttttttctttttttttttgagacagagtctcgagctatggcccaggccggactgcagtggtgcaatcttggctcactgcgacctccgctcctgagttcaagcaattcctgtacctcagcctcccaagtagctgggattacaggcatgcaccaccatgctcagataacttttatatttttaatagagatgggttttgccatgttggccaggctggtcttgaactcctgacctcaagtgatctacccgcctyggcttcccaaagtgctgggattacaggcgtgagccactgcatccagcctcttagagagttcttcatggcaatacctaatgtatgacagaaaggacattgacaattagcttgcaaattaaagcagggtaagactgttgtgttctttttgattttaaatgtgacaggatctggctatgttgcccaggctggtctcgaactcctgggctcaagtgatcctcctgcctcagcctcccaaagtgctgagattacaggcatgagacaccatgcccagcctgacgtgttctaattaaggctaacaccttcaccattgctcttaggcttcaaggatctagattagaccatgaaggccgggtgaagggagggagaagctaaaacactgctttcaaggaggacaatggaaataatatgaataacccaatatgcctcatttgtaaagtgtgttttttataactattttatgtcctaatcctcactacgtgatagcaattataaagaaaatggaatgtgtggcaccacttattctataagctaaagcttgaggttaaaaatagatattgaaataattgaacaaaataaaagtcatgtcagtaacctacagttcttttaactttgcattaagcagtagagttagaamattataatattcgggggggaaaagatgcattagatcagtgtgggtttttatttatttatttatttattttgagacaggatttcaatccggttgtccaggctgaagtgcagtggcgcaatctcagctcaccgcaacctcctcctcccagggtcaagcaatcctcccaccccaccctcctgagcagttgggagtacaggtgcatgtcaccacatcccgctaatttttgtatttttagtagagatggggtcttgctatgtttcccatgctggtcttgaactcctaggctgaagcaatgctcctgcctcagcctcccaaaatgctgggattgcaggtgtgagccaccacgcctggcccagtgtggatttttaaatagatttcagaagggaagggaaaagtcatgatgttaaagagtcttaaacaagacgtgtgttgtggtgcatgcctgtgatcccagctacttgggaggctgaggcaggagaattgcttgaacctgggaggcagaggttgcagtgagctgagatcgtgccactgcacccccgcctgggcgacagagccacaatccgtctcaaaatgaaaaacagagagaggtaacagaccagaaaggcatggtggctcacgcctgtaatcccaacactttggaaggccgagatgggcaggggcaggtcacttgagccgaggagttcaagaccagcctagtaaacatagtgagaccctgtctctacaaaaaaaaaaaaaaaaaaaaaaaaaaattagctgggcctgttagcacatgcctgtggccccagctacttgggaggctgaggtgggaggatcacttgagcctgggagattgaggctgcagtgagctgagatcatgtcactgcactccagcctgggtaacagagcaaggccctgtctttaaaatagccaaaaaaaaaaaaaaaggaagattgttaaatataagaattaattttccgttgaagaagagttttgagtgtttctttttggtgagcagagttgagaagacatttgagtaatgatgtgacaagtgagatccgtatttagtatctacaggacttcaatctctgttttaccaaaaaagtcaccttaattgcttcgtatttatttttaggaataagcatgggcctttcctcctctttgtttcctttctacacgttcacatccctcttatcactatggagaacttcctcgggaagagtctccacrggctgtatggggacaacgtagaggagatggactggatggtaggtaagtgcacttccagggaaaatgggctgcttcccttccagcaatagaagcaggaaaggaaacaaagaatgagaaggttaaagacagaagatgcagaatagcgattgcagtgcgattggattttaagagtgcaaaatattatagcacagatcttcactgcattagcagagggtgaattccataacacatgcacgggaggcaatgcgattcggccaaagatgtccacatcttaatcccatgtggcagaaagctgtccactccctagacagaataatggctgcagagacatccacgtcctaatcttgatgtggtagacataaaaatggccccaaagatagccactttctaatccccatgtgggagacagaataatggccccaaagatgtccacatcctaatccccatgtgctagacagaataatgactccaaagatgtccacgtcttaatccccatgtgttagagagaataatgacctcagagatttccacgtctgaattcccaagtggcatacagaattttggccccaaagatgtctacgtcctattgccatgtggtagacaaacaaaagaaagagcagataaaattcctctccgctgtagagtggctagtggctccactgcactgaaaataggactaaatttcctcctatcacctacaaaagccccatgacctgctgctgcccagatcctagtctgacctctacccaacccccttgtcctccccacctgctgcattctggccacgtggacgccacacagtatctttcacatttgtcccctgtcagggcttccacacctgctgttccctcctggaatgcttcctcaggcttcactggctcctcttcagagcctgccctgacgcacccctaaagtagctcctccccaatcatcttctcccccattctcctgtggtccttttttgttttgcctttgttttcctcctcctcttcctcctttctcctcctccccctcttcttcttcttcttcttcttattcttcttcttcatattcctcctcctcctcctccttcttcttcctcttccacttcttcctcttcttcttctttcttctttctgtcttctttcttctttttttcctaacacagcatcaccattgcttctcttcgtgaccatgtgttaggtaggttgattttccatttcccccaggggaatataaactcctgtggggccggattgtcttgcctcattccctcattatatttcctgggtttagaacaggatggaaggggaatattgcttgagtgagtcagggctgggtgagcacctgtatatgggcacagcacatccctgcctcccaraaaagaacttaggaaccgcagggtttaggtggtggtgggctgcgaatcccaggatcctcagaataattgccatcagagatttgggtgaacgacgtatttaaaaaaaaaaaattgtttcctcaacaagctaggcatggaaggagaaaaagttaattgtgtgtgtgtgtgtggcagggtctcactttttgttttgtttttttttttgttttttttgttttttttttgagaccgagtctcactctgttgcccaggctggagtgcaatggcacggtctcagctcactgcaacctccgcctcccgggttcaagcaattctcctgcctcagcctccsgagtagctgggwttacaggcacccgccaccatgcctggctaatttttgtacttttagtagagatggggtttcaccatgttggccaggctggtctcgaactgctgaccttgtgatccgcccgcctcagcctcccaaagtgctgggattacaggsrtgagccmctgcgcctggccgacagggtctcactcttacccaggctggagtgcagtggtgcaaccgtggctcactgcaccctgccttcccaggctcaagcaatcctcccacctcagcctcccaagtacctgggaccacaggtgtgcactaccacacccggctaatttttttattatttgtagagacaagttcttgctgtgttgttcaggctggtctcaaactcataggctcaaagagcctcccacctcagcctctcaaattgctgagatttcaggcatgagccactgtgcccggccaactgtgagtgacattaatgacatgagttcccttgtgtgtggctgcaagaagctcagggtcacttttgaggactggtctgcattttcagtctatgctttcttctcaggaatattcacatgcctcactttttttttttttttttttttttttttttgagaccgagtctcactctgtcacccaggctggagcgcagtggcgtgatctcagctcacagcaatctccacttcccgggtttaagctattctcctgcctcagcctcccaagtagctggtactacaagcatgtgccaccacgcccggctaatttttgtatttttagtagagatgtagtttcatcatgttggccaggctggtctacaactcctgaccccaaatgatcctcctgcctcggcctcctaaagtgctgggattacaagtgtgagccactgtgcccagcctgcatgctgcacttttaagtttttgatattttgtccttgtasgttgcctaaaattctgaccaaaggatggggtgcatataaagtcatacatcaatctccaacaaaggatatcaaaattatccaacagctgacttccattatgcgttaaaactaaggcttcattcttgtggctagcccccgaatgctaaagcatacacttcagagctgcatttctgatatttttccatttcgacggccccaaaaacatctgttctttgcaggacggatccttgacactttggacgtggagggtttgagcaacagcaccctcatttattttacgtcggatcacggcggttccctagagaatcaacttggaaacacccagtatggtggctggaatggaatttataaaggtaagactgagatgctcccagatcttcatcttgcaagtttatctcttccctgcaattcccagcagggcaatctattccaggagggtcaatattattgctcagggacagtgatttttcctatccagggcaaaagtggtaatttgacatactccagtttgaatttttgttcctggaccaaactgagggtcaggctgcttattctggtggttcaaaaatgagatgcagatgaactgggagaggagggagtttatttctgtaaccggttacagggaggtctggaaattgttgccagaccaactcaaaattacaaagttctccagagcttctatttctaagctgtatgtctgcgtgtaagtgtgcactcatctaaagacattagtgatgaacttcttctaatctgtaactaaggtctgagtcccggagaccctcctctggagactaagtaaattgacttaatctaaatgggtccaggtggccgggcacggtggttcatgcctgtaatcccagcactttgggaagccgaggtgcgtggatcacctgaagtcaggaatttgaggccaacctggccaacatggtgaaacctcgcctctactaaaaatacaaaaattagccgggcatggtggcacacgcctgtagtcccagctactcaggaggctgaggcagaagaatcgcttgaacctgggaggcggaggttgcagtgagctgagatcgcgccactgcactccagcctaagcaatagagagagtctccatctcaacaacaaaaataataaaataaataaataaacaaataaataaatgggtccaggtgccagggctgattacccttaccttgtctcctgctaaatcgcggaggtctggggagttgtttcagacctctaataaaacttgtttaatcctaaaagggtcctgctaagaattccttggttatcttgtcacgcttcaaggcccaggagaggcctgggcagaactcctggggggcttttgtgacatcccggcctttgtatacaggcgctggttgtttcagcttttgctatttaacttcaccactcgtcagtgctgaaacagttgttacggaggcctgtgttagtgagacgtggcctgccacgtttttgtgcacaattaaggaatttttagtagattatcagagttgtgtaaccatcatcatgtcgatgaaaagagctaaactctgtaaaacatttgaagaggtttattctgagccaaataggagtgaccatggcctgtgacacagccctcaggaggtcccgagaacgtgtgcccaagatggtcaaggcgcagcttggttttatacattttagggaggcatgagacagcaatcaaatacatttaagagacacattggtttggtccagaaaggtgggacaactcaaagccacggggcttccagcctacaggtagatttaaacatttcctggttgacaattcgttgtttctctaaagacctgggatcaacagaaaggaatgtctgggttaagataaaggattgtggaggccaggcacagtggctcacacttgtaatcccaacgctttgggaggccaaggcgggtggatcacttgaggttaggagttcgagaccagcctggccaacatggtgaaactctgtctctactaaaaatacaaaaattagctgggtgtggtggtgcgtgcctgtaatcccagctacttgggaggctgaggcaggagaatccgttgaacctgggaggcggaggttgcagtgagccaagactgtgccmctgtactccagcctgggcgacaaagcgaaactccatctcaaaaaaaaaaaaaaaaaaaaaaaaagattgtggacacccaagttcttatttgcagaggaagccttcaggtactaggcttcagagacaagaggttgtaacatgcttcttatcagacctaaaggctgtgtggatgttaatgccagagaggaatcatgaggcatgttcgactcccgcttcctgtcacggcctgaaacagcctctcaggttaagtttttaaagagctctgggtgaggaggaagtccattcagatggttgggggtccttagaattttatttttgttttacaatcactattttcattcgtaaaatttattgttattatttttatttatttttattgagacagtctggctctatctcccaggctggagtacagtggtacgatcttggctcaccgcaacctttgcctcctgggctcaagtgatcctcctgtctcagcgatcataagtagctgggactacaggtgcatgcaaccactcctggctaatttttgtatttttgtagagatggggttttgccatgttgcccaggctggtctcaaactcctcacctcaagtgatcctcccacgttggcatcccaaggtgctgggatgacagcaggcatgagccaccacatgtggtccaccactgtttatttcagaacatttcatcacctcacaaaaaaatcctctactcatagcagtcactcccttttcccccgtgctaacatccatcacccaaaaacttatttttgatttgtttattatttaatttttaaaattatcttttgtaaagatagggtcttgttatgttgcccaggctggtctgaaactcctgaactcaagcagtcctcccagctgggcctcccaaagtgctgggattccaggcgtgagccaccatgcctggccacaaaattattttgtatcattgtatattttcctactctagacatttatgtaaatgaaatcatgcaatatgtggagtttttttgtttttacttagcatgatgcctctgaggttcatctgtgttgtggaaatgtttcattcctttccatggctgaatatattccattgtgtggactcaggtttgaattttaccttcagacaatgcatccaagaaggataaggccaggcgcagtggctctcacctgtaatcccagcactttgggagaccgaggcaggcagatcacttgaggtcaggagtttgagaccagcctggccaacatggtgaaacctcatctctactaaaaatacaaaaattagccaggcgtggtggtgcacgcctgtaatcccagctgaggaggctgaggcaggagaattgcttgaacctgggaggtgaaggttgcagtcagctgagattgtgccactgcactctcgcctgggtgacagagtaagactctgtctcaaaaaaaaaaaaaaaaaaaaaaaaggtagaagggtagacacctagctggccacattatattcaaacctgtattccattgtttccaaacacgccattctttcgtgtaccacaaagatgctaaaatgtgctgccccgtgtacatgacttcacactgttgtgcttacacattttgtcttctccctgcttagagagctttatttttcagtccttgaaagagcctttttaggctaatattggcaaatatacctatgatgtatatttgctttgaagtagatggatccatcagtctagtacatatgtaaaacgggatatataaatgccaactacatccactaatgccttcccacaacaacttcacattgaaggcctgactcctcagaaaccttctttatctcattgccattgacgttaatgtatcctctacccaatctggttctctgtgccatcaagaatgtcagtattataaactggcrgagctttaaacaacaggaatttatcctgtcccagccctggagaccaggagtttgagatcaacgtgtctcagggaaatgttcccgccagaagctctaggrgaggctcctccctgcctctgccaactcctgggggccccaggtgtccctgagcttgtggccacatcactccagtctctgcctccgtctctatgtggccttctcctctgtgtctgtgtctcctcttctgtctcttagaatgctgtcattggacttagagtccatccttctccgcgacgatcttgagatacttaattgcatctacaaggacccctttttaaaataaggtcccattcacagaatctggggatcagggtgtggatatatgtttcaggaggactaaagtgcaatccattgcaattgaatccacttctttctggatgctctaggggaggctccttcctgcctctcccagttaccgggggctccaggcatccctgggcttgtggccgcatcactccagtctctgcctctgtctccacgtgaccttcttctctgtgtccgtgtctcctcttctgtctcttagaaggacatctgtcattgcatttagggccaccctaatccaggattatctcaaggtccttaacttgattatatctgcaaaccccctatttccaaataaagtctcatttataggctctgggagatatgacatgaacatgttttggggtcactgttcaatacgttatagttgtatccactttcttcttgaggctctaggggaggatccttcctgctgctcccagcgcctgggggttccaggagtccctgggcttgtggccacatcactccagtctttgcctccgtctccacatggccttctcctctgtgtctgtgtcttctaagaacaagagtcatttgtagtgaaggacctaacttaatccaatgcacactaaccaataacaaggttaataaaaaatataaaatcaaacctctacaggggaactacatgagattgaatgttttaatgtcactaaaacrgagagagagagagagagaaattgagagactcagggagagagaaacttcaaacaagtgaaacaagcagaaaagttaaatcagccaggctgagcatctatttctggtttttaaccactttcttttgtttctgttcaaacccaggtgggaagggcatgggaggatgggaaggtgggatccgcgtgcccgggatcttccgctggcccggggtgctcccggccggccgagtgattggcgagcccacgagtctgatggacgtgttccccaccgtggtccggctggcgggcrgcgaggtgccccaggacaggtacagaacaacccaaagaaacaattcagctttgcacagacacagcaacacttatggcaaatgaacatgtcactttggctttgcagtaaggcgtccctgaaattgttccccgaccaaaccgagggtcgggctgcttattctcatggcccaataacgagatgcaaatgaacgaggaaagaaaggagttttatttctgtaaccagatacggggagaaggctggaaatgatcactagaccaactcaaaattacaaagttttccagagcttctataccttctaagctgtatgtccacatgtaagcgtgcatccatctaaagacataagtgattcaacttcctttcatctagaactaaggtctgagtcctgaggaccttcctctggagcctcagtaagttgacttaatctagatggttccaggtgctggggtgattacccttatcttgtctcctgctaaatcatggaggtttggggagttcttttagaccccccaataaaacttgtttgtggaggtctggggagttccttcagatccccaataaaacttgtttaatcctaaatgggtcctgttaagaatcccttcattattttatcgcgcttcaaggtccaggaaaggcctgggtagaactcttagtgggcttttgttacattccagcctttgggtgctggctctttcagcttttttttcttctttttttttttttgagactgagtctcactcagttgcccaggctggagtgcagtggtgcgatctaggctcactgcaacctccgcctcctgggttcaagcgatcctcctgcctcagcctcccgagtagctgggattacaggcacacaccagcacacctggctaatttttgtgtttttagttgagacggggtttcaccatgttggccaggctgatcccgaattcctgacctcaggtgatccacccgcctcgacctcccaaagtgctgggattacacgcacgagccactgtgcctggccaattaattactttttagccaaaggtgacgtttggtggtgactaacgtgggcagctgctgcattcttcttctaagcgtgctaatgcacacacatgccttccatccatctgcgttcacacccagactttccctccactgatacaacataaggagagtgcaccacctggggctgggactggtggatgctggagggacaaatgtccagagtccctgttccaaccctgagccatgccatgttccttcctgcagagtgattgacggccaagaccttctgcccttgctyctggggacagcccaacactcagaccacgagttcctgatgcattattgtgagaggtttctgcacgcagccaggtggcatcaacggsacagtgagtaggggagccccttcctaacacccttagggaaagagtccctctgtgcaggaaagcaccatgccctagaacaggctagggatggagctgcattccagagtccatctccatgtctccgcacttccgtttttctccacgagctttttaaatttagtttttgtcaatatgtgtccctctcattccagcgacatgccttctgagatcacctgccaatcgtcttaaaacgatggggagtcgttacctatagtttcagcaccatgtatgggctatatttcattctttcttccctgcactatatgaagtgcaacttttatcatcatcacacacacgtatgtgcatgcatacacacacgcacgcacacatgcttgcacacacatgtgttcaagacttttctagtctcttttttttcttatttttttgtaattatttttttgagactagtctttgtcgctcaggctggagtgcaactgcagtctcccgggttcaagtgattctcctgcctcagcctcctgagtagctgggattacaggtgcccaccactacacctggctaatttcttgtatttttagtagagatggggtttcaccatgttgggcaagctgttcttgaacccctggcctcaagtgatccaccctcctcggcctcccaaagtgctgggatgacaggcatgagccaccacgcctggtctccaatttttctttattaagttgaaacaaggtctcagtatgttgcccaggcaactcctgggctcaagcaatccacccatcttggcctcccaaaatgctgaaattgcaggtgtgagccaccacgcccagccttttgtagtctattttatgcatctagatgtgcttccaaatgttttaatcacctgaccttaacacgacttcatcttctttgtgaacaattacaggcgcactcctgtaatcccagctacttgtgaggctgaggcaggagaatcacttgaacccaggaggcggaggttgcaccactgcactctagcctgggcgacagagcaagactctgtctcaaataaaaaaaaaaaaaaagaaaagaaaagaaaagaaaagaaaaaactgactgagtgcaattcacaggcacttcgtgctttcacagtgttgtgcaacctccacgtctatgtagctccagaacattttcatcacgccaaaagcagacactgttcctatcagcagtcactctccatttcacaccctgcagaccctggaaaccactactctacttcctgtcattatgtgtttccctatccttgacattcaatgtgaatggaatcatgcaatgtgtgctcttttgtaacttctttctctgagcgtagtattttgaaagttcgttgatgttgcagcctgtgtcattgtgtcattccttctcatagctgcagagtatgccatgtaagatgtaccatgttttgtttatctgtccatccatcgatggacgcttgggttaggcctaccttttagccctatgaagatgccattctccagcaaggcaccctatttctctatgccaactctgtaatgattatctttccaccaggaggaacaatgtggaaagtccactttgtgacgcctgtgttccagccagagggagccggtgcctrctatggaagaaaggtctgcccgtgctttggggaaaaagtagtccaccacgatccacctttgctctttgacctctcaagagacccttctgagacccacatcctcacaccagcctcagagcccgtgttctatcaggtgatggaacgagtccagcaggcggtgtgggaacaccagcggacactcagcccagttcctctgcagctggacaggctgggcaayatctggagaccgtggctgcagccctgctgtggcccrttccccctctgctgrtgccttagggaagatgacccacaataaatgtctgcagtgaaaagctggagccccgattcctaaattttgtcactcaaattgaaacaaaccagctggccatggtggttgtcatcccagcactttaggaggccaccacaggaggatcactcccgtgatcaaaaccaacctgggcaacatgatgaaactctagctctacaaaacaaaaataaaaaaaaaattagcctgcatggtggcacacgcctgtagttctagcttctcaggaggctaaggcaggaggatcatttgagcaccggagttggaggctgtactgagctatgattgtaccactgcaccccagcctgggcaacagagcaagaccctgtctcaaaaaagaaagaaaacaaaaaaatgaaacaaacttcagtgtcatgttaagatatctatttgcataaggatgaatagtttccccctgtgaaaaacaaaggaaaaggcaagagaaagtagaaatgaacaataaacactggccaggcgcagtggctcacgcctgtaatcccggcactttgggagacagaggcaggcagatcacttgaggtcaggagttcgagaccagcccgaccaacatggtgaaaccctgtctctatcaaaaaaaaaaaaaaaaaaaaaagcagcagcagcagccaggtgtggtggcacacgcctataatgccagctactcaggaggctgaggcagaagaattgcttgaagccgggaggcagaggttgcagtgagctgaggtcgtaccactgcaccccagcctgggtgacagagcaagactgtctcatcaaaaataaataaataaacaaacaaacattaataatgcaccgttgaatgatcactcagacaccaaactggagaggcaaagtatctcctgcagtcggggaggagtctgtcaatggaccccagctcagtctggaagaggctgccctgtagcccaaaacagcacaagtcccagcaaaggtgtctctgtgacctacaggtttgcacatgaacaggagataggccccaaagataaaaactggcactgatgtggctttgtctgtggtgcccatttatagtgtttgtttatcgtttacggccacaaggatgagccgtgcttcccgttggaactgttttcaagtggttttcctttgtctccaatgccccaggtgatttgggcaaactctggctgtggaagccgcgctgtgcaggaagtgttcgccccagctctgagctgcaaggtcattgcataatcaggctgcgccttaattgtctgggctgctagaatgaaaataccataaactgggtatcatcaagaatatttctttcttgcagttctagaggctggatgtccaagaccacggcgtgacggaagctgtgtctggggagaacctgtttctcggttcacagctgctgccttcttcccatgtcttcacacggtcatccctctgtgcctgtctgtgtcctatctctgattcttgttttttgttttttgtttttttttgagatggggtcttgctctgttgcccaggctggagtgcaatggcgtgatctcagctcactgcaacctctgccacaggttcaagtgattcccctgtctcagcctcccgagtaggtgggactacaggcgtgcaccaccatgcccggctaatttttgtattatttagtagaggtgggttttcaccatgttgcccaggctggtctagaactcccgacctcaagtgatccgcccaccttggcctcccaaagtgctgagattacaggcgtgagtcactgcacccggccctaatctcctcttcttataaggaccccactcctattggaatagggcccactcttgtgacctcattttaaaggatgaataaaaaccttattcctgtgagtttgaaggcaacacaattcagtccccagcacattctcccctgggagtaaggaggtctttccaatagctctttctgtctccagattcaagcaacaggtccctcctcccactcttccaagcctaggtatgtgacgagcaatgccccaccttgtcaccgcctcaagaacatgtcctcaaattatccaatccacatcagcctccaagaattcaggctgtgcatacagaccaaaaagtcaaatccatctccagccaattctcttgggtcaagaaagaaatagtaggccaggtgcggtgactcacatctgtagtcccagcactttagggcactaagatggcttgaggccaggagtttcagaccagctggggtgacatagcgagaccctgcctccgcataacatttaaataattaggtgtggtgacacgtgcctatagtcccacctacttgggaggctgaggcgggaggatcacttgagcctttggcctcccaaagtgtccaaggctacactgagctgtgatcgtgccactgggcgacagggcgagacctcatctctaaaaagaaaggaaggaaaaaatggcaggaaggaaggaaagcaaagaagcaaaaagaaaaaggaagaaagggagggagggatggcaggaagaaccagttaacccctatggctttccccatagccatggcttatggaacaagaccagcactttgggtcagctgtgcccgatgttcccggcccacagagtcacctttaagttcttcagcatccactggggagagtcacctctgtctccacacttgcccacactcttgagcttgatggctttgaagccaaagtccccatggaggctccatgtgctgaaagtcatgtgagaccctcagggtcagggcttacccaccctttccatccccacaacctcccgcaaatatgacttctggagcaccagctcctactgcccccaggccccatttccaaatcctgggcacccaagacagctcagtgtgtttacataatttacctaagggcacccaaagttcttttctctctagttctcaggaatctcaactcccagcagcataggatttcttccaaggatcaaatctccgcgccacccctgctaaacctccttgcagaactgcttctgggctgtctcctgcccccctccttccaggcctcggcctggccttctccatctgcatgacagaggctcagcaaggaatcccagttgggaagccctcaaagataaaaaagttcttttttaaatttttttagagacagggtcttgctctgtcacccagtctggagtgcaacggtgcaatcagctcactgcaacctcaaattcctgcactcagatgactctcccacctcagcctcccaaatagctgggactacaggcacaccaccatgcccggctaacttaaaaaaatttttttgtagagacagggtctctctgtgtttcgcaggctgttctcaaactcctggtttcaagcaatccttccccctcagtctcccaaagtgctgggattacaggtgtgagccaccaagcctgtctgataaaagctatttcagagtaacagggcaaagagagaagcaataaacagtgctcaagagctagctccagacagatggccagcgtaataaatgtaaatgaactaaatttgccaattaaaagtgaatggtcttttttctaaatagaattcccagcaccattttgggagattccaattgaataaatttagggagtagggctcctgactgtattgtcttgaacaagcacccccatcatctcatcccaggggagtgtggggcagctccctcatttatgaaaatcctaactcagtgaatttaaggaggggcttctgaatctatgttttcaacacaaacttccaccccgcctcccctaccttactgattccatttggtaagcatagagaactgagttgcaaaggaaaaaaaaatggcataaatgttggaggcagaataatggtgaggaggacctggatatgcttcccacctacacacccaacatagagtcttgtggctggtcaggcacagtggctcacctgtaatcccagtactttgggaggccaaagcaggaggactgcttgaggcaagagtttgagaccagcttaggcaacatagtgggacctagtctctagcaaaaaaataaattaacaaaaatgtgtcaggggtggtggtgcacaccggtagttccacttccttgggaggcggtgacagcctcacccttgacagcctcagccttggaaaaagaaagtactgttaatcttgaagactatggaatcattttgtccctgaccagtggaagaggacctaagcaaccccctttgagggaaagtgggtcacctgggctggaggtagggatgtgatattgttttgtaagctagcatttcctacaaaatatgaatttatactttgaccagatcttgcattgtgaggggatgtgaggggatgaggtaagacatgaaggggcttgagagaatcagcgactggaggtcaagagagttagacaaaaacaaaggctcactgcagcctcaactctcagccttgatctttctagaggtcaaaagagttaaaaacaaaacaaacaaacaacaaagggagagccaaagatacaaaaaaagcattacgtgagagggtaatgagcaaaatagcatcattcaaaaacaaaaggatgagtcacagaaaagatggggaggggtccagggcacagtgattaatcaaaaggagtaatttcaacagcagtctgatgaaagaaacaaagataaaaatagcaattggaattagccgggcgtggtggcacgcgcctgtagtcccagctactcgggaggctgaggcaggagaatcgcttgaacccaggagacggaggttgcactgagccgagatcgcaccactgcactccagcctgggcgacagagtgagtccctatctcaaaataataataataatagtaataaaagcaaaaaaaaagggcccatctagcattccccgtcccagacttagagtacaagtccagcatccggaacagacatttcaaacaccaagctttgagaaactgaaatcgcaacttgattgctctgggtaggtcctaagacccttcctgacaaaaagaaaaggggctccctgtgctcaagcctaactgggtttattttttatttttatttatttattttttgagacggagtgtcactctgtcgcccaggctggagttgcagtggcgcgatctcagctcactgcaacctccacctcccgggttcaagcaactctcctgcttcagcctcccgaatagctgggactacagacgtgaactaccacacccagctaatttttgtatttttagtagagacggggtttcaccaggttggccaggctggtctcgaactcctgacctcaggtgacccactcgtcttggcctcccaaactgctgggattccaggcgggagccaccgcgcccggtcaatcgtaactgggtttaatcagctccttagcccaggccttcccgtgtgacgacctgggaaaacctgtttccacgcgcaggtcccggaggtcccgagagccaggagatgacgcggatgaaggaggggcgggcgcccggcccagatcccgcagctgagagggcggaagccttggcactagcggcgcccgggcgcggagtgcgcagggcaaggtcctgcgctctgggccagcgctcggccatgcgatccgccgcgcggaggggacgcgccgcgcccgccgccaggtgcctgggaccccgggacgcggcccatactaaggcctagggtgggggcctggggagggggtcgcgagcacggcgaggggcgccccgggcgagcctgggcccctgtaaagggcgtggttgtgtccggcgccttgtagtctccaaaatgtagctggaggcgcgttctgtgcccgggaaagacgccagacagcagagcccagggatggggggcgactgaggggacgaagggcgggtggaggagaccgaactgaagggaaggcggaagggcagggaaagagaacaaaggaggaagggaagggagggcggaggaaggctggccgggacccggagggagcggaaactgggccggtcacgccctgctgggtcctccgccttccacgcccagctacaccgctgcccggattcggccttcaaaggctccctaagacccgccccgaaccgcgccccccgctctgccccactaagacgcgccccgtcccgccccaaggctccatcccccgaagcgtagccttgcccgccccacttcctaagaggcaccccgtcccgcccccaaccccccagctcgatgccttccagcacggccgtgttccccgggtccactaagacgctccctgtccctccccaacgccccgtcctcccgagcacagctgtgacgccctcccgatttctaagaaggccccttcccgccccccgcctcttcggccccaccatgacatgctccatcccgccccccggcc

SEQ ID NO: 94329 - DNA, 37388 bp, Homo sapiens
ccttctcatagctgcagagtatgccatgtaagatgtaccatgttttgtttatctgtccatccatcgatggacgcttgggttaggcctaccttttagccctatgaagatgccattctccagcaaggcaccctatttctctatgccaactctgtaatgattatctttccaccaggaggaacaatgtggaaagtccactttgtgacgcctgtgttccagccagagggagccggtgcctgctatggaagaaaggtctgcccgtgctttggggaaaaagtagtccaccacgatccacctttgctctttgacctctcaagagacccttctgagacccacatcctcacaccagcctcagagcccgtgttctatcaggtgatggaacgagtccagcaggcggtgtgggaacaccagcggacactcagcccagttcctctgcagctggacaggctgggcaayatctggagaccgtggctgcagccctgctgtggcccgttccccctctgctggtgccttagggaagatgacccacaataaatgtctgcagtgaaaagctggagccccgattcctaaattttgtcactcaaattgaaacaaaccagctggccatggtggttgtcatcccagcactttaggaggccaccacaggaggatcactcccgtgatcaaaaccaacctgggcaacatgatgaaactctagctctacaaaacaaaaataaaaaaaaaattagcctgcatggtggcacacgcctgtagttctagcttctcaggaggctaaggcaggaggatcatttgagcaccggagttggaggctgtactgagctatgattgtaccactgcaccccagcctgggcaacagagcaagaccctgtctcaaaaaagaaagaaaacaaaaaaatgaaacaaacttcagtgtcatgttaagatatctatttgcataaggatgaatagtttccccctgtgaaaaacaaaggaaaaggcaagagaaagtagaaatgaacaataaacactggccaggcgcagtggctcacgcctgtaatcccggcactttgggagacagaggcaggcagatcacttgaggtcaggagttcgagaccagcccgaccaacatggtgaaaccctgtctctatcaaaaaaaaaaaaaaaaaaaaaagcagcagcagcagccaggtgtggtggcacacgcctataatgccagctactcaggaggctgaggcagaagaattgcttgaagccgggaggcagaggttgcagtgagctgaggtcgtaccactgcaccccagcctgggtgacagagcaagactgtctcatcaaaaataaataaataaacaaacaaacattaataatgcaccgttgaatgatcactcagacaccaaactggagaggcaaagtatctcctgcagtcggggaggagtctgtcaatggaccccagctcagtctggaagaggctgccctgtagcccaaaacagcacaagtcccagcaaaggtgtctctgtgacctacaggtttgcacatgaacaggagataggccccaaagataaaaactggcactgatgtggctttgtctgtggtgcccatttatagtgtttgtttatcgtttacggccacaaggatgagccgtgcttcccgttggaactgttttcaagtggttttcctttgtctccaatgccccaggtgatttgggcaaactctggctgtggaagccgcgctgtgcaggaagtgttcgccccagctctgagctgcaaggtcattgcataatcaggctgcgccttaattgtctgggctgctagaatgaaaataccataaactgggtatcatcaagaatatttctttcttgcagttctagaggctggatgtccaagaccacggcgtgacggaagctgtgtctggggagaacctgtttctcggttcacagctgctgccttcttcccatgtcttcacacggtcatccctctgtgcctgtctgtgtcctatctctgattcttgttttttgttttttgtttttttttgagatggggtcttgctctgttgcccaggctggagtgcaatggcgtgatctcagctcactgcaacctctgccacaggttcaagtgattcccctgtctcagcctcccgagtaggtgggactacaggcgtgcaccaccatgcccggctaatttttgtattatttagtagaggtgggttttcaccatgttgcccaggctggtctagaactcccgacctcaagtgatccgcccaccttggcctcccaaagtgctgagattacaggcgtgagtcactgcacccggccctaatctcctcttcttataaggaccccactcctattggaatagggcccactcttgtgacctcattttaaaggatgaataaaaaccttattcctgtgagtttgaaggcaacacaattcagtccccagcacattctcccctgggagtaaggaggtctttccaatagctctttctgtctccagattcaagcaacaggtccctcctcccactcttccaagcctaggtatgtgacgagcaatgccccaccttgtcaccgcctcaagaacatgtcctcaaattatccaatccacatcagcctccaagaattcaggctgtgcatacagaccaaaaagtcaaatccatctccagccaattctcttgggtcaagaaagaaatagtaggccaggtgcggtgactcacatctgtagtcccagcactttagggcactaagatggcttgaggccaggagtttcagaccagctggggtgacatagcgagaccctgcctccgcataacatttaaataattaggtgtggtgacacgtgcctatagtcccacctacttgggaggctgaggcgggaggatcacttgagcctttggcctcccaaagtgtccaaggctacactgagctgtgatcgtgccactgggcgacagggcgagacctcatctctaaaaagaaaggaaggaaaaaatggcaggaaggaaggaaagcaaagaagcaaaaagaaaaaggaagaaagggagggagggatggcaggaagaaccagttaacccctatggctttccccatagccatggcttatggaacaagaccagcactttgggtcagctgtgcccgatgttcccggcccacagagtcacctttaagttcttcagcatccactggggagagtcacctctgtctccacacttgcccacactcttgagcttgatggctttgaagccaaagtccccatggaggctccatgtgctgaaagtcatgtgagaccctcagggtcagggcttacccaccctttccatccccacaacctcccgcaaatatgacttctggagcaccagctcctactgcccccaggccccatttccaaatcctgggcacccaagacagctcagtgtgtttacataatttacctaagggcacccaaagttcttttctctctagttctcaggaatctcaactcccagcagcataggatttcttccaaggatcaaatctccgcgccacccctgctaaacctccttgcagaactgcttctgggctgtctcctgcccccctccttccaggcctcggcctggccttctccatctgcatgacagaggctcagcaaggaatcccagttgggaagccctcaaagataaaaaagttcttttttaaatttttttagagacagggtcttgctctgtcacccagtctggagtgcaacggtgcaatcagctcactgcaacctcaaattcctgcactcagatgactctcccacctcagcctcccaaatagctgggactacaggcacaccaccatgcccggctaacttaaaaaaatttttttgtagagacagggtctctctgtgtttcgcaggctgttctcaaactcctggtttcaagcaatccttccccctcagtctcccaaagtgctgggattacaggtgtgagccaccaagcctgtctgataaaagctatttcagagtaacagggcaaagagagaagcaataaacagtgctcaagagctagctccagacagatggccagcgtaataaatgtaaatgaactaaatttgccaattaaaagtgaatggtcttttttctaaatagaattcccagcaccattttgggagattccaattgaataaatttagggagtagggctcctgactgtattgtcttgaacaagcacccccatcatctcatcccaggggagtgtggggcagctccctcatttatgaaaatcctaactcagtgaatttaaggaggggcttctgaatctatgttttcaacacaaacttccaccccgcctcccctaccttactgattccatttggtaagcatagagaactgagttgcaaaggaaaaaaaaatggcataaatgttggaggcagaataatggtgaggaggacctggatatgcttcccacctacacacccaacatagagtcttgtggctggtcaggcacagtggctcacctgtaatcccagtactttgggaggccaaagcaggaggactgcttgaggcaagagtttgagaccagcttaggcaacatagtgggacctagtctctagcaaaaaaataaattaacaaaaatgtgtcaggggtggtggtgcacaccggtagttccacttccttgggaggcggtgacagcctcacccttgacagcctcagccttggaaaaagaaagtactgttaatcttgaagactatggaatcattttgtccctgaccagtggaagaggacctaagcaaccccctttgagggaaagtgggtcacctgggctggaggtagggatgtgatattgttttgtaagctagcatttcctacaaaatatgaatttatactttgaccagatcttgcattgtgaggggatgtgaggggatgaggtaagacatgaaggggcttgagagaatcagcgactggaggtcaagagagttagacaaaaacaaaggctcactgcagcctcaactctcagccttgatctttctagaggtcaaaagagttaaaaacaaaacaaacaaacaacaaagggagagccaaagatacaaaaaaagcattacgtgagagggtaatgagcaaaatagcatcattcaaaaacaaaaggatgagtcacagaaaagatggggaggggtccagggcacagtgattaatcaaaaggagtaatttcaacagcagtctgatgaaagaaacaaagataaaaatagcaattggaattagccgggcgtggtggcacgcgcctgtagtcccagctactcgggaggctgaggcaggagaatcgcttgaacccaggagacggaggttgcactgagccgagatcgcaccactgcactccagcctgggcgacagagtgagtccctatctcaaaataataataataatagtaataaaagcaaaaaaaaagggcccatctagcattccccgtcccagacttagagtacaagtccagcatccggaacagacatttcaaacaccaagctttgagaaactgaaatcgcaacttgattgctctgggtaggtcctaagacccttcctgacaaaaagaaaaggggctccctgtgctcaagcctaactgggtttattttttatttttatttatttattttttgagacggagtgtcactctgtcgcccaggctggagttgcagtggcgcgatctcagctcactgcaacctccacctcccgggttcaagcaactctcctgcttcagcctcccgaatagctgggactacagacgtgaactaccacacccagctaatttttgtatttttagtagagacggggtttcaccaggttggccaggctggtctcgaactcctgacctcaggtgacccactcgtcttggcctcccaaactgctgggattccaggcgggagccaccgcgcccggtcaatcgtaactgggtttaatcagctccttagcccaggccttcccgtgtgacgacctgggaaaacctgtttccacgcgcaggtcccggaggtcccgagagccaggagatgacgcggatgaaggaggggcgggcgcccggcccagatcccgcagctgagagggcggaagccttggcactagcggcgyccgggcgcggagtgcgcagggcaaggtcctgcgctctgggccagcgctcggccatgcgatccgccgcgcggaggggacgcgccgcgcccgccgccaggtgcctgggaccccgggacgcggcccatactaaggcctagggtgggggcctggggagggggtcgcgagcacggcgaggggcgccccgggcgagcctgggcccctgtaaagggcgtsgttgtgtccggcgccttgtagtcyccaaaatgtagctggaggcgcgttctgtgcccgggaaagacgccagacagcagagcccagggatggggggcgactgaggggacgaagggcgggtggaggagaccgaactgaagggaaggcggaagggcagggaaagagaacaaaggaggaagggaagggagggcggaggaaggctggccgggacccggagggagcggaaactgggccggtcacgccctgctgggtcctccgccttccacgcccagctacaccgctgcccggattcggccttcaaaggctccctaagacccgccccgaaccgcgccccccgctctgccccactaagacgcgccccgtcccgccccaaggctccatcccccgaagcgtagccttgcccgccccacttcctaagaggcaccccgtcccgcccccaaccccccagctcgatgccttccagcacggccgtgttccccgggtccactaagacgctccctgtccctccccaacgccccgtcctcccgagcacagctgtgacgccctcccgatttctaagaaggccccttcccgccccccgcctcttcggccccaccatgacatgctccatcccgccccccggccctttgccttcccagcacggctgtgccctccccctcatcccactaagacgcgccccgtccttcccccagaccccatcctcccaagcacggctgtgactcccccaacacgctcggtaagacacgcccctttcccccccgtgggcttcattgggcgccctccccccagcaccgccgtgcctaccccggtcaccccccaagacttctctgtcccgtccccatctccaccacaagcgcggccgttacttccctctggccatcccccggcgccttggccttgtgccgcctccatgtccccaccctctagcaccgccatgccccgctgcacttcctcagatgcgccgggtcctgcattcccagcttcatttgcgccccagtgccaccggtagagggtcgtgactgcaagttgtccaggttcttggcgttttgaacaaagaattggacaaaacgcccagcaaagaaagaatgaagcaacaaaagaaggaaagcagggatttattgaaaacaaaaggacacgtcacagtgtgggagccgaccaagcagcggctcaagggcccgggtacataatcttcttgggtccaaataccccctagaagtttcccattggccacttcatgctcacctcatgtaactgaagtggtggcccgcgatcagtctgattggttgcaggcagcagccaaccaaagggtgaagttacaaaggtcacactcctgtgcaaacatctgattggttgcaaaacccaactaatcagagactagggtgaagtcacaaagttgcacacgaagactagacccgaaatcagtccgattggttgcagacagccagtctactatctacccaatagaaaaggtcaaagggaagccttcggtccttttgttacttaggcatggaaagttaggattttcccgccaggcgaggtggctcatgcctgtaatcccagcactttgggaggccgagacgggtggatcacctgaggtcaggagtttgagaccagcatggccaatatggtgaaatcccgtctctactaaaaatacaaaaattaggccgggcctctactaaaattacaaaaaaattagccgggcgtggtggcaggcacctgtgatcccagctactcaggaggctgagacaggagaatcgcttgaaccctggaggtggaggttgcagtgagcccggatcatgccattgaactgcagcctgggcgacaagagtgaaactccatctcaaaaaataataataaaaattaaaattaaaaaaaaaaggaaagttaggattttcctttcaatttacttctaggaagtcggcatggaaagccttaggttccctgcctccagaccctattctcctgcctcagcagcactgccgtgcctctcgccaccctccaagacacgccccgtcctgtccccttccgcggccattgccctgctggccacaccggatccctccccatggccttattcctcccctgccccccagtasarccgtgtcccctcacacaccctgagacacacccctcgttcgcgtcctccccggagagcacagccacgatcccccaacactaagacaccacctatccactgcagttcaaggactgcttgaatcaatcctcccacctcagaatcaggcagaggttgctgtaagccaccatcatgccactacagcctgggcagcacagcaagaccccatctcaaaaaaaagaaaaaaaagaataataaagcagattggttgtttcaaagttacttttcttacagggttaaagcacgggagactttgttagctcagatgaactacacatcttcttcttgcttactcaaatcttctgttttttggaaaactgacctgtttccctgttcagcttgacgatgtggcagttaacacaagtgactccattccagtttgttctgacctgtatggtctagtgtggcaggccaggtctcactaatgcaggcctccgtaacaactgtttcagcactgactgagtgtgaagttacatactaaaagctgaaacaaccagcgcctttatgcacaggctgggatgtaacaaaagcacaccaagagttctgcccaggcctctcctgggcctttgaagcatgacaagataacgaaggaattcttaacaggacccatttaggattaaacaagttttattgtgggtctgaagaaactccccagacctccacaaacaagctttgttggggactaaaggaactccccagaactctgtgatttagcaggagacaagataagggtaatcaccccagcacctggacccatctagattaagtcaattcaccgaggctccagaggaaggtcttcaggactcagatcttaattacagattagaagaagttaatcacttatgtctttagataaatgcacacttacacttagacatatagctttgaaggtatataagctctggaaagctttgtaattttgagttggttgggagagaatttccaggccttcctcctgtaactggttacagaattaaaaactctcttctttcccaattcatctgcatctcgctattgggtcacaagaaatagcagtctgaccctcggtttggcccagggacaccagtgcaggaattcaggccaagacaataacctcccataaagctgaacgtcttaatttagtggtaagaccttcgccttcccagcgagctgccttgaaatgcctacttcccttgccaaattgtagatagtcatttctgtgtttcgcytttctctccagggactctttgccggtgctactgtttttatgcttgcttctgaagacgtgtgaacctaaaactgcaaatgcctttaaaccaaatatcctactgatcatggcggatgatctaggcactggggatctcggttgctaygggaacaatacactgaggtacagttggttgttgctattggtgatgatgttatgtgagtttgacggaatggtgcatttaaaatctgcctggagaaattaggaaactccttagggcctcagaactcaacaaaaaactaccaacaggtaaaaaggcccttttaaaccatgcggaactgcggtgagggggtgaatgtattactaccacaaaatgggtagcttaaaacaacggaaatttgttctcccaggtctggagaccagaaatcttaaatccaggtgtgggcagggccgggctccctctgggggccctatgggaggatccttccggactttcccagctcctgggggctccaggtgtccctgagcttgtggccacatcactccagtctctgcctccgtctccacggggccttctcctctgcgtctgtgtcctaatctcctcatcctataaggacaccggccattgcagcaaggcctgcccgctgtaaagatctcatcttctgttgatgacgtttgcaaacaacgtctgttgtgggccraattctggcctcctccaaatttgtaggttgaagccctaaccgccggtacttcagggtgtgaccgttttcagagatggggtctttgaagaggtaattaagttaaactgaggtccttagggtgagccctaatctgatatggattactaaaagaggagattaagacaccaacagagctccctgagaggctgtaggggaggacccttcctgcctctcccagctcctgggggctccaggcatctctggctttgtggccacatcactccagtttgtgcctccgtccccatgcggccttctcccctgtgtctgtgtctcctcctctgtctctcagaaggacactggccattgcatctggggccctctctaaaccaggatgatctcatctcgggatacctaataacaactccaaagacagtttttctaagcaaggtctcacacacaggtttggggggtcagcacgtggacagatcggttcgcagacccccattcagcccactgcagtggcatgtgcaaacacagagtagtagcctctatgccaaccttaccagcagagcgcttgagtggtgctcacgtgctttctgcaacaggagaaaaggtgagaaagctccttattccatttggtgggcttttctcctagaaggaccgccccagaatgcaggctgcatctgcttttcaatagctgccaacctcaggagcggtccccgcagagcagggcctcccttctttgcagtgaacattgcagcacctgcagcagtctgccctgtgtgggccgggcacggtggctcccgcctgtcatcccagcattttgggaggccaaggaaggtggatcacttgagcccaggagtttgagaccagcttgggcaacatggcaaaaccctgtctctatgaaacatacaaaaaattagccaggtgtggtggcgcatgcctgtagtcccagctactcaggaagctgagagtggaggatggcttgagcccgggaggtggaggttatggtgagctgaggttgcgccactgcattctagcctgggccacagagcaagaccctgtctctaagtcaatcaatcaatcaatctgccccctgtccagggatcccctttcgaacaccctgagcaggcctggttgtaattcacagaacatgcggttcatctgtttacagtgtacagttcagggacttttattctattcatggagctgtgcrtctgtcaccacaaaccatrttagagcatttgcatacccccaaagaaactctgcatccccttagccatcacctccagcgaggagcgaatctgtgtcccctaaacgcctacgtcgaagtcctgacccccaggacctcagactgtgactctatttggagactgagtctttagagacgtgattcaggtaaaatgaggtcactagggtgggccctgatccaataggactggggtccttataagaagaggagatgaggacacagacacacacagagcaatgaccacctgaggacacagggagaagatggtgtctacgagcccagggtggtggcctcaggaggaaccagccctgcccatgcttgatctcagacttccagctcccagaaatgtgagagaataaatgtctactgggtttgtttttctgttttattttgttttgttttttgagacagggtctcactctgttgcccaggctggaatgcagtggcatgatcacagctcactgcaacctccatctcctaggctctcacctcagcctcctgagtagctgagactacaggcacatgccaccacgcccagctaatttttgtattttttgtagagacaggttttcactatgttgccaaggcttgtctcgaactcctggcctcaagtgatccacccaccttagccccccaaagtgctgggatgacaggcgtgaaccaccgtgcccaaccaatatctggtgttgaagcggccaggtgtgtaggactttgttatggcagccccagctaacactcctccaactctctcagcaccctaaccctcagcctytggcagccactaatatactttccatctctatagattcccctgttagggacatttcatacagatggaattatgtaacctgtggtcttttatgtcaggaggctttcacagtaccgtgcctcacgccttgcagtggctgagtcatattccatagattccattctatgtggatacctcttttggctccttttctttctttctttctttctttcttttcttttctttcttttttttttttttttttttttttttttgagacacggtctcactctgttctttcacccaggctggagtgcagtggtgcaatctcggctcactgcaacctccgcctcctgggctcaagcgattctcctgtctcagcctcccgagtagctgggattacaggtgtgcaccaccttgcctgactaatttttgtattttttttagtagagacggggttttaccatgttggctaggtttgtcttgaactcctgacctcaagtgatctgcccgcctaggcctcccaaagagttgagattacgggcgtgagccaccgtgcccggccctcacagttttttgatatctgatgatgaaagcttttaagcctcttctgtctgtgttccccatctggacaagcagataagaaagcacagggactgtctcctttggtgctgatggcagattcagaccataaacgcccccacccttgcatgggaaccctcatctcggccccacaccctcaccacaattgaaaacataaatctcctttccttgcttccttatttcacatgagcttggaaggcctgccctgctctccccagaaagcctcgttatatgagtcataaattgtctcatatactttgtgtgtgtgtgtgtgtgtgagagagagagagagagagagagatgtcatccatctcaacatcaacaccaaacttaggatggggtcaatctaccgctgcaggagaccataatgcaactaattctgaaatccggtgaagtccttgcagctattcctgtgcctttcagagcagggatctgcttaagccaaatgcatgtctcccttccaacaatgacatttgtgtgctttgctcagaacgccgaatattgaccagcttgcagaggaaggtgtgaggctcactcagcacctggcggccgccccgctctgcaccccaagccgagctgcattcctcacagggagacattccttcagatcaggttggtgtcacggagatgatggagaaatgggtacatctgtgtgcactcattctgtcatctgtaacagttgagtactgatggtgaagatacaggggcaatggtacaaagatcacctgcaattcatcgtcttccttgtatttatgtaaggaatattgtattgtgtgcatacacataaaagttgtgatcattaggatgtgaacagaaaaaccaaggtctgtggaatattttaaagaggtttattccgagccagtatgactgatcacaagaccaagtgtctcttagagagagcaaagtttccccaagttgagaatcattgtgatatagatagatgatagatgatagatagatagatagataaattgacagctagatacatgctagatggatgataatgatagataatggatgattgatagctagatatctagatgatgatgatacataatgatagatgattgatcatgacgtgatagatgattgatagctagatagctagataagagatgattgatagataatgatagatgatagataatgatgatagaaagataagtgatagacagatgatagataatgatagctgattgatagctagatgattaatgataatgacagataatagatacatagatagatggatagatatagatgatagatgatggatccatattgagatagacaggtgacaggtgatagctaggtaaacagatagatagacatatgatagatcacatggcgtctgtcatcctaaggtggggtgtctctgttttggcatgagggacatttggggctagatgattctctgtggtggggctgttctgtgcactgtatgtagggtcttgagcagcatcactcggctccacgcacccgatacgagtagcaccacacaccaccctttctgagctgtgacaccacaaacatctccagacattggccatgcttattatttcgagaatagtgtgataggtcggtaggtaggtaggtatgtaggtaggtagatagatgacagacgatagatgggtagataattgatagctccatacatgatagatggatgatagataatagcagcctggctcgggtgcacaaatccagatctcagacaccaaatccctctggttgagaagtgctcctctagagaaaggaaagtaaattcttcctgtcttctctgccccacaggcatggacgccagcaatggataccgggcccttcagtggaacgcaggctcaggtggactccctgagaacgaaaccacttttgcaagaatcttgcagcagcatggctatgcaaccggcctcataggtgtggatatgtgggagcctcacattatacggtggttgggaatattcgtgataaaaaagatcccaggccaggcgtggtggcgcacgcctgtagtcccagctacttaggaggctgaggcaggagaatcgcttgaacccgggaagcggaggttgcagggagccgagatcacaccactgcactccagtctaggtgacaaagcgagactctgtctcaaagaataaaaaaaaaaaaaaagatcccgttttcctgcaaaggaaaacaatcctgtgtcctctgaatcagaagttggtgcctggtccatctcatgcctattggattgtccccagtttttcatgagtttttttttcttcttaaattcaaaatcctaggagattgccctcttttcttctctggacctatcagtcttcagcttgtccccatttatcacgaccttcttcagacattatccttctctacatggccactcaccatctcaaaagccccagagttaacaaacactgccttcctttagacaataaaccccggcaggggcagaacaccctctttataacagacagcatgtcaggggtctccaagagcacccttaagttcaggaagttgctaggaggatttggcatgcagttgtgctcatgggtgatttatgacagtcaaaggaggtgaggcagaatcagtgatgggaattacacggaatgaagcccagggcaaaccagacacaagctcccaagaatcctcccccagtgggatcacacaggatgcaccatattcctccagaaatgagtttcaacaacacgcaaggaatgctgtctattagggaagctcccgggagaatcagtgcccaggggtttctgttgggggctggtcctgcaggcactcactgcctggcacccacccgaattccagrctcccagaaccaaaggaggtgtttagcatgaaccacgttgcttttgcatatagtttaggcacagtcagcttattattttaatggtgtgacttctccattggaaatccagatctcaaacaccagccacggggaatcttacaagccagcctttgtaaggggcactagctcaggcctgccccttaaactcctttctgcacggagaggaaaggagggagatgttggtttatgccgccaagcaccaggcagtctgctggttacctccttcattccttacccagcctgtgkgtttagaggtgctgtcccygtcatacacatgagaacgtgggagcgcagtggtgaggccacccgccccgacctggtggtgggatctctgtgcagggtccccagttcccctctgtgcttttctcacactcaaagccactgtcccattcacaggagccgcaacacccyaacttgtccgaagctgtggttttctaaaggacaaccattgttcctccttttcaagtttcctgccactttatttttattttgaatttttttaaagttttttcttcttttatttattatttatttttatttttttgagatggagtgttgctctgtcccctacactggagtgcagtggcacgattgcaactcactgcagcctccacctcctgggttcaagcgattctcctgcttcagcctcctgagtagctgggaccacagacatgtgccaccatgcctggctaattttttttgcatttttagtagagccagggtttcagcatgttggccaggctggtctcgaactcctgacctcaagtgatccacctaccttggcctcccagagtgctgggattacagggccagtgctttatactgtagaagtctgtgtgtctcctactctgagggtggatttattctttctttctctctcactttttttaatttttacttttattttcatttttattttttgagacggagtctggctctgtcgcccaggctggagtgcagtggcgcgatctcggctcactgtaagctccgcctcccaggttcacgccattctcctgcctcagcctcccgagtagctgggactacaggcgcccgccacctgtattgtatttttttagtagggacggggtttcaccgtgttagccaggatggtctcgatttcctgacctcgtgatccgcccgcctcggcctcccaaagggctgggattacaggcgtgagccaccgcgcccggccgaaagtcttaaacctttaatcacttgccaagggttctgacatggatgcattcgttagtcttcacggatcagaatgcgttcatttaaacacaggtatccaatccattcattgcctttccatttccagttttgctctttgcagacttttcttttcctgccgacgcggaatgattccgaggttctttgcagcagacagggctgcttcaaagcgggtctctgttgaacatttgcgtttcttttaggaaaatggcaccagggtgtgaattgtgcatcccgcggggatcactgccaccaccccctgaaccacggatttgactatttctacggcatgcccttcacgctcacaaacgactgtgacccaggcaggccccccgaagtggacgccgccctgagggcgcagctctggggttacacccagttcctggcgctggggattctcaccctggctgccggccagacctgcggtttcttctstgtctccgcgagagcagtcaccggcatggccggcgtgggctgcctgtttttcatctcttggtactcctccttcgggtttgtgcgacgctggaactgtatcctgatgagaaaccatgacgtcacggagcaacccatggttctggagaaaacagcgagtcttatgctaaaggaagctgtttcctatattgaaaggtaagcaaccatcgcatcttaaagaggagatggggccggacgcgatggctcatgcctgtcatcctagcacttcgggaggccaagatgggaggatcttttagcccaggtgctttagactagcttgggcaacataggaagacaggttctacaataaataaaatcattagccgggcatagtggtgtgtgcctgcaatgccagctactcaggaggctaaggtgggaggttcgcttcagcctcggatgtcgaggctgcagtaagcaatgatcacaccactgtacttcagcctgggtgacagagtgagactctgtcgctaaaaaaataaaaataaagtttaatttaaaaaaaagacacggtaactgctcagagcatctgagagtccccttataatctttgggatctcagacaccaaccctcggaggagacggctttgcagaagccaaccttttcatgtggctgggtttcccatatgagagtctcgaagtggatgtcatgtgatggctcgaatagcattgacatacacgccattggattctgtacatttttattgacagttttttaaacttttttttttgcattctttgtagagatggggtctcactatgttgcccaggctggtctcaaactcctgggctcaaacaatcctcccatcttggcctcccaaagggctaagattacagaagtgagccactgtgcctggcctttttctaatgtctcattttttttttttttttttttgagacaatgtctcactatatggcccaagctggtcttgaattcctgggctcaagccatcctcccacctctgccttccaaagtgctgggattataagcgtgagccaccgtgcctggcccttactttttaatttgtacaaatgtatggggtatgtgtgaaattttgttacatgtatacactgaataacgatcaaacagcatacttacagtgtccatctcctgagtacaatacattttgttagctttggtcaccctactctgctatcagacrttgaatgtactcctttaagcttactgtatgtttgtactctttaaaccacttctctttgtccttcacccttcccagcctctggtctctatcattctattctctatcttcatgtgatcratttttttttagctctcccatatgagtgacaacatgcagtattggtcattctgtgcctggcttattttagttaacatagtgacctcctgtttcatctgtattgctgcaaatgacaggatttcattytttttgatggctgaatagtattccatcacgtacatataccagatataacctttttttctgagacagsgttggctctgtcacccatgctggagagcagtggtgtgatcatggctcactgcaacctctgtctccaaggctcagrcaattctcgtgcctcagcctyttgagtggccgagattacaggcacctgccaccccaccctgttaatttttttatttttagtagagatggggtttcaccatttcaccatgttggccaggctggtyttgaaatcctgacctcaactgagctgccaggctcagcctcccgaagtgctgggattacaggcttgagccactgtgcccagcctccattcttttttatggctgaatagtattccattgtggacatatacaatatattcttttttttttttttttttttttgagacagggtctggctctgtcacccatgctggagtgcagtggtatgatcatggctgactgcaagctccacctcccgggctcaagccgtcctcccacctcrgcctcccaagtagctgggaccacagactcaagccaccacgcccagctaatttttctatttttggtagagatggcatttcaccgtgttgcccaggctggccttgaactcctggcctcaagtgatcctcccgcctcagcctcccaaagtgttgggattacaagcatgagccaccacgcctggcccaccatttattctttctgtgttcacccactgatgractcagaaggtgatcccctgccttggctcttgtgaatagtgctggagtgaacgtatgggtgcaggggtccctttggtgtactgtatattctgtgtattctcaaggaagttttcttctttcagacacaagcatgggccatttctcctcttcctttctttgctgcatgtgcacattccccttgtgaccacgagtgcrttcctggggaaaagtcagcatggcttatatggtgataatgtggaggagatggactggctcataggtaagtcaaggtaccatggagcctcactccaccctcggcctcaggtttgaacatagggcgtaacagactggccatctgaatatgaaccaasttgcaataaagaataagggcggtggctcacgcctgtaatcccagcactttgggaggccaaggcgggcggatcacctgaggtcaggagtttgagaccagcctgggcaacatggtgaaaccctgtctctactaaaaatacaaaaactaacccggtgtggtggtgcacacctgtagtcccagctactcgggaggttaaggtacaagaatcgctttaacacgggaggcagaggttgcagtgagttgagatcgcaccactgtgctccagcctgggtgaaagatcaagactccgtctcaaaaaaaaagaaaaagaataagagttactcttagcactttgggaggcccagatggacagatcacttgaggtcaggaattcaaaaccagcttgcacaacatagtgagaccccatctctacaaaaataaatgcttagccaggcataatggtacacgcctgtagtcccaggtactcgggaggctgaggcaggaggatcgcttgagcctgggaagtcaaggctgcagtgaactgagattgcactgctgtactccaggctgggcaacagagtgagaccctgtctctttaataataataatagtacaaagaatgggggcagaacacactcccatatcatttatttgcttcttcagtattcccaattacttggtctaattctgcacaaaatcaaccttctacacagccagtgacttcatgtcatcatcagaagttaccgaaagtgaagcgataaagttaatgttcaggacaatgcagasacrctgtcttccttctatggccttcaagaaaccctggagaggaccagtgaggctgcagattcttaaaagagcatagacattaaaattcttgcagaatctgaatgtgtctcctgagacaagcatcgtgatagagttcacagtcttaaaagtctgcattttcaggtggggcaaggtggctcatgcctttaatcccagcattttgggaggctaaggcagggagatggcttgagaccaggagttcaagaccagcctgggcaacatagtgagacgcccccccccccatctctacaaaaaatttaaaaaattagccatggtggtgtgcacctgtggtcccagctactccagaggctgaggtgggaagatcatttgagcccaggaggctgaggctgcaatgagctataattattgcaccactgaactccagcctgggccacatagcaagaccctgtctccaaaaaaaaaaagaaataaaagacgaagaatagggagaaaaacttctctcatatcatttatttggtccttcagtatttctgattacttagtctaattttgcacaaaatcaactgtattagtccattcttgcaaagaaatacctgagactgggtaatttataaagaaaagaggttggattggctcacggttctgcaggctgcacaggaagcatggcagcatctgcttctggggagacctcggggagcttttgctcatggtggaaggcgaagggggagcaggcgtcttgyggcaggagaaggaccaagagaggagaggaagagccgcacacttttaaacaaccagatctcgtgagaagctactccctccgcagcaccaagcgggggatggtgctcaaccattcatgagaactctgtccccatcattcagtcacctccccccaggccccaccgccgattctgaggatgacaattccacatgagatttgggcggggacacacatccaaactatattgtcaaccttctacacagccaatgacttaacagcctcattagaagttacagaaactaaagcaataaagttcggacaatgcagagaggtcaccttccttctatggccttgaagaaaccctggagaggaccaacgaggctgcagattcttaagagagtgtagatattaaaatccttgcagaatctgaacatatctcccgagacaagcatagtgatagggcgggattggttcacagtgtaaaccaaaaataaattcgaaggccccccacaaccatctgaatggattccctcctttgccagggcaccctaaaatttaacctgagagactggttcatgccataacgggaagagggggttgggcttgcctcattctaccccccgcagcatgaacatccacacagaccttaactctgataagaaacatttacaatctattttctctgaagcctgccacctagaggcttcatctgcatgataaaagcttggtctccacaactccttatcataacccagacattcctttctattgataactctttcaatcagttaccaatgagaatatgtttaaattccccacttccagttgttccacctttccagctcaaccaatgtacatcttacatgtagcgatggatgtctcatgtctccctaaagtatacaaaaccaagctttgccccagccacggtgggcacatgtcatcagggcctcctgaggctgtgtcattcttaaccttggcaaaataaactttctaaatggattgagacccgcctcagatacttttcagtttacagcaggcttcaaagtctgcattttcagagctacagatgaccttgtggtttatatcattttgactttcagtgctttcaatgaccagtggcctccagggataaagcaactgcttggtttgcagggcgtcctctgcgctgctgagccatcagcctccaatacgccaatgcccatagatgctagttacagccctgcttcctcctacatagggttctgtcatcactgagtctcaccatttccctctccccagtgtctttattatgtgacacacacacacggcactatgtttaaaaaagcgtgctcactggcaacctcttggcgttgtgtgttcattctgtgttttgtattggtggtatcttggggtcgaccgaaagagtcaaactccgtaaaatatttggagagatttattctgagccaaatatgagtgacaagtggcctgtgacacagccctcaggaggtcctgagaacatgtactcaaggtggtcggcatgcagctcagctttatacatttagggagacatacggcatcaatcagcacgtgtaagacgtaccttggttcagtgcagaaaggcaagaccactgaaaggggggcttccaggtcaaaggcggattcacagattttctgattggcaggtggttgagttattatctgagaatcaatagaagggaatgtctgggttatgataaggggttgtggaggccaaggtttcataatgccaaagaagcctccaggtagcaggcttcagagagaatacatggtaaatgtttcttatcagacttaaagagtctgttctatcagtcttttttttcttttttaaacagggtctcactctgttgcccaggctggagtgcatggtgtgatcttgactcattgcagccttgacctcccaggctcaggcaatcctcccacttcggcctcccgagtagctaggactacatacaagcatgtgccaccatacctggctaatttttgtattttttgtagagacagggtttcaccatgttgcccaggctggtcttgaactcctgagctcaatggatcttcctgcctcggcctcccaaagtgctgggatgacaggcatgagccactgtgcctggccttctctcagtcataggtctctgtttcaatgtgaatgctggtcagttgtgcctgaattccaaagggaggagggtatcatgacgcatgtccaccactccccccgcccccactactttccaacatggcctgaccttgtttttgttttttgtttcttttggttttttttttcttttttttttttttttgagatggagtctcaccctgtcgcccaggctggagtgcagtggtgcgatctcggctcactgcaagctccgcctcctgggttcacaccattctcctgcctcagcctcccaagtagctgggactacagtctcccgccaccatgcctggctaattttttgtgtttttagtagagacggggcttcacggtgttagccaggatggtctcaatctcctgacctcgtaatccacccgcctcagcctccgaaagtgctgggattacaggcgtgagccaccacacctggccctcttttgggttttttttgaaacagtctcactctgtcaccctcgctggagtgcagtagtgtaatctcacctcactgcaacctctgcctcctgggttcaagcgattctcctgcctcagcctcccaagtagctgggattacaggcgtgcaccccccacacctgcctaatttttgtgtttttggtagagatgaggtttcaccataatggccaggctggtcttgaactcctggcctcaggtgatccacccacctcaggctcccaaagtgctgagattacaggtgtgagccgccaggcccggcctgacctagtttttcaggttaactttggaatggccttggctgaagggagagtccatcagtcggttggggggcttcgaattttattgttggtttgcattgtaaacagtcctgtggtatcacagtgattagctatgtcttacactttgggatcacattgtaaccacggcctccgagtaagtgtggtctcttcttatgacttcctggcaagaggtgtctcctgcagaaaggaagaagcgcattgaactagtggatgctgctttgttttcttggtcctgaaactttccattttctgtaaaggtaaggttcttaatgccatcgaagacaatggtttraagaactcaayattcacgtatttcacctctgaccatggaggacatttagaggcaagagatggacacagccagttagggggatggaacggaatttacaaaggtgagttgtggacatcggggacacatatgcattcgaccaaatatctgccaccactgagggtcccagaacaagttgaactgaaaatgagtttgctcatttcaaaaagaatgcattgagcacctactgtagtacaagttctacctagatgagcaggacaggcagataaaaagtcacatccccttcctttaaagggtttacattttagtagaatacagagaggtataaataaataattcagataaaattaaaatttattttattatagtcttaatttttaaatatttaataaatttattactattttaatattttaaatgcatcaattaatattgatgcataataatacatattttaaaaattattgatagttaacaaacatttttaaattattaaatttaatgaatattttaatacattattttattctaaataaaggtagcatagatcgactagaacagttgaatcagccacagcgacccaccgatattcaagaggccagggagtagcatgattctggaaatattgctgtggctgtttttgggaagctgaggctgccccagtgtgcatgtgtgcatccrggtggctgtgcgtattcacatacctatgcacaaatacatccagatgtgtgtacagactgggcagtttccggcaaaatcctaacgatgtcttctacttacaggtgggaagggcatgggaggatgggaaggtgggatccgcgtgcccgggatcttccactggccgggggtgctcccggccggccgagtgattgragagcccacgagcctgatggacgtgttccctactgtggtccagctggtgggtggcgaggtgccccaggacaggtacgtggagataaggctgcctgttccctgattttttttaattgtttttagttttttttttttatttcaataggattttggggaacaggtggtatttggttacataaataagcttttttttttttttttttttgagacagagtctcacactcttgcccaggctggagtgcaatggcaygatctcggctcactgcagcctccgcctcctgggttcaagcaattctcctgtctcagcctcccgagtagctgggattacaggcatgcgccaccatctcctttacccatgtggccatgtgtcttggggtctgttatgattaaaaagtaaggacaggtcggatgcaatggctcatgccgataatccyagcactttgggaggctagatgggcggatccccttaggtcaggaattcgagaccagcctggccaacgtggtgaaaccccatctctacaaaaaatayaaaaattggccgagtgtggtggcttgtgcytgtagtcccagctactcagggggctgaggcatgagaatcacttgaccaggaggcagaggttgcaatgagctgagattgtgccactgcactgcagcctgggtgacagagcaagactctgcctcataaaaaaaaaaaagtaagaaaagccaacctaggaatgtgggctgtccagctggaatttgaaggctttgtgttgacctccaaggtgacagtgctgtgtgttggggtgtgtgtgtgtgtgtgtgtgtgcactctgcttatgcagtgctgcataacaaatgaccccaacacttagagacactgtgtcttgaaataaccacatgtatcctgctcagcaacctgtaatctgaacagcgactggagagacagctcatctctgctccatttgctggggagccttgcattctgggagatgtgttcccaggtgcaaaaggctgcctgggaacccgtggtctgactctgctctgtgttctcttcatgaaatcagggtgattgatggccacagcctggtacccttgctgcagggagctgaggcacgctcggcacatgagttcctgtttcattactgtgggcagcatcttcacgcagcacgctggcaccagaaggacagtgagtacctgctgcccacagccagggttgtccagagaaacagccaataggatgtgtggatatgtggatggatggatggatggatggatgaatggatggatggatggatgggtggatggacagatagctatagaaatagagatagataaaccgatgagtagattatagatagatgatgggggggggagagagagagagagagagatgatagagacataatggatagatgatggatagatagatagatgagatggatgatggatagataagatagataatggatagataagatagatgatggatggatagatgatagataatggatagatgatggatagatatttaagatacatgatggatggataaatatatagatatgtaggatagatgatagataagatacatgattgatggatagataagatagatgatagatatataagatagatgatggatagataagatagatgatagatagatagatagataaaaagtagaatcagttcatggatggatgaatagatggatggacagatagatggatgaaaggtagataaacagagatagatgataggtaggtagatagatgatcgatagataaatagataatggtagatagatgagatcgatgggtaagataaatggatggattgatagataaatagataaataggtagcgatagatagataagtacccaatcatgctgtttaaaatatcatggttgtttctgtgtagaaaggtagtagatcgacgctgaacagtttcaacacaggggaaaggggaagaattaaggaacctctatgattctgatttctgaaagcagccacagtgagcgctctgcaatgagtccctttgcctggggcatgcaatgcagagacacaaacggacacacatgggcgcacgcgcgcacacacacatgctctgactttgcaagctgaaggctgtgattgtgtggactgcctcgtgtccctcctccttttcactgaatagggaggttcatgctgataccacagggccgacacctgcgttctgcgttcacacctgcgtggatttctgccaccctgactcccttcttgtctgcatccaggtggaagcgtctggaaggttcattacacgaccccgcagttccaccccgagggagcgggggcctgctacggccgaggcrtctgcccatgctccggggagggcgtgacccatcacagaccccctttgctctttgacctctccagggacccctccgaggcacggcccctgacccccgactccgagcccctgtaccacgccgtgatagcaagggtaggtgccgcggtgtcggagcatcggcagaccctgagtcctgtgccccagcagttttccaygagcaacatcctgtggaagccgtggctgcagccgtgctgyggacatttcccgttctgttcatgccacgaggatggggatggcaccccctgaatgccaggactgtgagagaggatccaggagagcctgactgcrttgcaaacaaaattctccaagcttggttctatcttcagcttccctttttgcaaggaacatgccctggactgagagtgggtccccactttctttctttctttctttcttttttgagacagagtgtcgctctgtccctcaggctggaatgcaatggcacgatctctgctcactgcaacctccgcctcccgggttcaagcgattttcctgcctcagcctcctgagtacccaggattacaggcaccaggcacctgccaccatgcctagctaatttttgtagttttagtagagacagggtttcaccatgttgcccaggctggtctcgcactcctgacctcaagtcatccacctgcctcagcctcccaaagtgctgggattacaggcacgagccactgcgcccatgtagggtttccctttcctgatttgtgaaataagactgtcccagtaggcacccactgatgcctcctcttcctcttctaaatctcagggttcgtcattgtgccaatgcccgatgttttcacccctccgtcttaaagcattgttgcaatttcatcacctagatgacataacagccttacaaaaggacagggaggagtgtctgttcctactctcacatagcggaggaaagttagagcctctcagtctctgtttatgaggactcattaatctcaaataattgatgcatttttcatacattagggtctctgtccatgtgtcttcctgatattgttatagaaatggcttcaggctgctggtaacagatgctgcggaaaaagaatgccttaaacaaagccaggcacggtgactcacacctgtaatcccagcactttgggaggctaaggtgggaggatcacttgagcctaggagttagacacctacccagcctgagcaacacagtgagacctcatctctacaaaaaacaaataattagctagatgtcgtggcgcacagctgtagtctcagctacttaggaggctgaggcgggaggattatttgagcctgggaggtcaaaactgcartgagctaagattgcactactgcactccgggctgggagacagagtaagaccctgccttaaaaaaaaaaaaaaaaaaatgccttaaagaaaataataagagaagggtgtgttctcttccaagtaatgagccgatcaaggggaagcaacccaaggctagcaggctcttttcaattcccagctctgccactcttagcatggcagagagttggcctcattatgccagtatggctgccacagtgtcagacatcacattccaggcagtggaaaggagaaagaaccaaagggcatccctttctcttgaagcagtccctgtgaggggggattatctggaagccccaacccaatttctgcttccaaccattatccatagaaacaactggaagttgagaagtgcagtcttttaggtgggcacctggctgccctgtatgaaaccagaattaggttggtcagcaggaaaacaagaaaacacttactgtgttgactgaggtttttgacgcatcgctttattgtcaaattaaacaactctatctcattctgcactgaaacacgtactaccattgcctataattggmaaatgatcctcagaggcacagaagwtgccctgatggaaagtttgccccttgggcaaagagacagccatgggaaccttcagacatagagagagaaggtrgcttttctccctacattcctcaaatagctaagatttggccagtgtgttttctaagtcaattctagtgtgtttcatcctcacctcttccctctgtggctttgatgatggaagtgtagtcctaacctactgcacagctgggaccccctgcccctagatcccaatactggggatgggaggaccttgcactattcccctcagtccatctatcgaggtctttgcaggaagcatactgggaattgaaacgagagcctaaatgacatctaagaaaggcagtgttcaataccaggtattaggtgaggatgggattctaaggacatcagtgggaggcagggagccaccttcagacctcagcatggaagcttccaagatccagaggaagaggcaacagcactgagagtcataggtagaagaatcatcacagccctgctaaccaggcagctgatgcccctctcccctggctccctgtgtccaaatcctacaggggcatctgttggctgaactcaacctgaagccaaagagaagatgagtggagagaggcaacatttatagagctcaggtttctagggctggagagggatctggagggacacacaggagacacctggcataaccaaaaaatgattaaaaaaaaaaaaaaaaagaaacatctatggagcatgggacacggggagtggaggcagctaaaagccatctcatctttcaccgtattcaacaagcccattataacaagtctttcacgctcaaccattcaaacaatcccaacaatcccagcctaagaatttcctggcatttgatgaaaatggctgtgggttttgctatctttaagctccctgggaagcaggatataagcccagggctggcaggctctttctagctacctgctcttgcacatagagtttgcctcatggttgcaagaaggctgccatagctccagatggcacatagacattccaggcagcaggaaaaaggaaggagcacttaaccgaaggaggtcagggagttggttagtctccacctgaagaagagagccatgaaccagcttcagttgactaacgggctcctgtgagtgcatctttggacttttctggaggttgaaatctagatgtggtatgtgtcttaaagcagccaccaactcctcccattaccttccaagtgagcccaactacacgatggagcctcttccctgcccttggatctgggctgagcctctgacttgcgttgaccaacagaatgcagtgaaagtgatgccgatactaccctccctgccctagacttgggatacctggcagctatattcttccattcctcaggacttgcaaaaacgggtctcarcatgccttcccagagccatgaggtgtttctttgcccattcattgatctgagaagtgagtgtaaggagtttaaatcaacctctgttctgtgctagttaaggtaataaagttgctgcagtccagggggtaggtacctgtggacggctctgcgaataggacagttgcatttcttgggaatcaagtgcatccctaggctggcagtgcagcagaaatactgaataaaatgtgacaaatctccctggatggtgtcatttgtttgtttttatttcccatcctcaatcctacttttccacctccaccccttcaccccccagctttgaaggaactcacctggcattgctattcactattcatggagagaggactaaacaatccaaactcccccgttctgaaaaacttaagtcacagtcacaagtgtactcctgtgcttttagggttatacaggggagagagggcgactgggaataagaacgccttaaacaagagaaagatgtgttctctcccaggtaatgggggtcacagaggaagcaatccagggctgacaggttctttccagcttcctgctcttgcacatagggtttgcctcatggtcacaagatggctgccatagctccaggcagcatgtagacattccaggcagcaaaaaggaggaaggtgcagttaactgaaggatgtcagggagctggttagtctccacctaaagggggcagccttgagccagcttcagttgactaacttgggctgctgttggtgtatctttggacttttctgtaggttgaagtctagatgtggtacatgtcttacagctgccaagtcctcccattaccttccaaatgagcccagctacaagttggagcctttttcctccccttggatctaggatgagcctctgatttgcatagaccaacagaatgccgcagaagtgatgctgatactatccttcctgccctagacttaggagacctggcagcttctgacttctctcttatggactcaagagcccccatgtaaataaaaagttcatctgcccttctggagagaacagatggagagaaagagaatgagagagagagagattgagagaaaaagaagaaggagaagggaaagaggaggagaagaaagagagagagagaggacctgaggttaaaagaccattaaaggagtgtatgagtttgctattggtgctgtaacaaaatgtcacaaacttaattgcttaaaataacacaatttttcttatagttctggtaatcagaagtcgaaaaatcaaggtgtcagcaggctggttccttctggaggttccaaaagaaaatccatttccttgagatttccctcttctagaggctgtggtattccttggcttatggcttcttcctccatcttcaaagccagcagcacagtatcctccagtctctctctctctctctctgacctctgcttccctcttcacatctccttctctgactttgacactcctacctccctcttataaggactcttgtgattacttagaacccatcaggataatccaggatcatctcatctcaggattcttaactcattatagccgcaaagtcccttttgccatgttagctaacatttaccgtttctaatgtttaggacattatggaactacaattcaagatgagatttgggtggagacacagccaaacgatatcacccatcttggtaccaatcattatggctgaaggacttggccgttcctggattaaatgtccacccatggttggaatgggatctccaccctagaatcccatcctaatctaatcacatggagttgccatggctgttccagagaaaaggacgtgtccaacagaccaaaggcaatccatggccacaattagaaccgagccctgccaatggcttaataatgatccctcatgctgttcaagatacagacatcagaatccctggagtctatgaatatgtctgaattagttttctgtggctgctataacaagttaccacaaaccaggggcttaaacaacagatacttatccttacccagtcctggagtccaggaggctgagatcaaggtgtctcagggctgtactccctcaggaggctataggggaggatccttcctgcctcttccagaccttggcaactccaggtgctcctgggtttttggttgtatcactccagtctctgccccatggtttcatggtgttctcctctgtgtgtgtctgtgtccaaatttcctcttttcataaagacaccagtcatgggattacagcctatcctcctgcaggatgacctcatctaaactaatgacatctgtaaacactgcatttccaaataaggtcacattcacagatggagaggggatagatcttccacatatgaattgtgggggaagaaacaccagtcaacccttaaccaccttgtataatgtcaccttgtatattagtctattttcacactgctgataaagacatacccaagcctgggcaatatacaaaagaaagaagtttaatggacttacagttccacatggctggggaagcctcaatcatggtggaaggcaagggggggcaagtcatatcttacaaggatggtggcaggcaaagagaaaagagcttgcgcaaaatcatcagatctcgtgagacttattcactgtcacgagaacagcatgagaaagacttattcactatcacgagatcagcatatcacgaaagacttattcactatcacgagaacagcatgagaaagacgtgagacttattcactgtcacgagaacagcatgagaaagacctgcctccatgatttaattacctcccaccgggtccctcccacaacacttaggaattcaagatagatttggatggggacacggccaaaccatatcacactgcatggcaaaacagacttctcagatttcatgaaattaagtgtcttaatatggggaggtgattctggattatttgggtgggcctaatgtaatcataaagtcattttttgttatctgaacagttggttctgagggttttttgtttgtttcttttgttttgttttgagacagggtcttgctctgttgcccaggctaaagtgcagtggcaccatcacagctcattgcagtctcaactacctgggctcaagcaatcctcccacctcagcctcccaactaggtgggaccacaggcatgtgtcaccacttccagctaattttctaaaatttgtgtagagactgggttttgctatgttgcccaggctgttctcaaattcctgggctcaagcaatcctcccacctcagcctcccaagctcccttgggaccacaagcgcacaccaacacacccagctaatttttgtatttttcatagagatggggtctcactatgctgccctagctggtctcaaactcctggcttcaagcagtcctcgcatttggcctcctaaagtgctaggattacaggtttgagccactgtgccaggcaatttttaaaacttttaacttttatgaatatatcagaactgcacagatctatgggattggtgtgatatttttgatacaagcatacaatgtgtaggcatccaatctgggtaactgggctatccgttacctcaaatatttatcatttatttgtgttgggaacatttctaaatatactcttctagttattttgaaatatacaattggccaggcacagtggcttatgcctgtaatcccagcattttgggagaccaaggtgggcggatcacctgaggccaggagttccacagtggccaacatggtgaaaccccgtctctactgaaaatacaaaaattagccgagcatggtggcgggcgcctataatcccagctactcagaaggctgaagtgggagaattgcttgaacctgggaggtgaaggttgcagtaagctgagatggcaccattgcactccagcctgggtgacagagcaagactctacctcaaaaaaaaaaaaaaaaaaaaaaaaaaaaacccaataaattattgtcaaaaaagcaaatgtttgactgggcacagtgtctcacgccagtaatcccagcactttgggaggccagagcgggtggattacttgaggccaggagttcaagaccagcctggctaacatggtgaaaccctgtctctactaaaaatacaaaaattagctgggtgtggtggtgcacacctgtagtcccagctacttgggaggcagaggcaggagaatcacttgaaccaggaggcggaggttgcagtgagccgagatcatgccactccagcctgggcgacaagagcaagactgtgtctcaaaaaaacacaaaaacaaaaacaaaaaacaaacaatctgcaaacattttaaaaggaagaaagccttgaggttaaaggtcatctccaggctgaatacctcaccctctgtccttggcctccacgtcaccccatgccactatcatgctatccattaaaaaaaaaaaaaaaaaaaaatcacattcccttagaccatcgtgagaacctggaacagaaggatgacatgttttcttctttgttttcagaaaccatagcacattccccacccagagaacatgctcaaaaggaaaaaaaagaagattcagaagtgttcatcttcttttttatatttttttaaatttaaaaacctcaactttcctccatacctgtaagacctatgacatgagcagacatgctttaaaggtagaggttctggctggcttagaagcacccaggatttctgcagaaaacctcactggggcttttaaaaaatacattctttaaaactttcttgtatggctctttgcttttgttttttattttgttttgttttgtttttggagacagggttccgctctgttgcccaggctggggtgctgtggtacaatcacagctcactgcagcctccaactcccaggcttaagcgatcctccagccttaacctccagagtagctgaggcaagagacgcaagccaccatgcccgactaatttttcttttatgtatagagatggggtctcctatgtcgcccaggctggtctccaacacctgggcacaagcaatcctccactttggcctcccaaagtgctgggattatggctccttgagagttaggttccctttgagtcaaactgtggcaggccaggcttccattagcagccggagcaaccagtttttccactaacgctttattataattctgatgatgcacaagttaaacacgtcataccagggctcactgaagattaagcgtctagagaaaacttcccagaccccagaccctagttaaagattagacaggaaccgaatgaaatactcccgctcgtaggtgcaatcctacacgtgggcatagagcttaaaatgcatagaaaccctggaaaaaacttgtcactttgagctgacctggtgagttaatctgaccttctccctgtaacccgttggagaaataaatccccttctccccagtctgtctgcacctcattgttgagccccaagaacaagcagccagcactcgttcattcgtccgggagcaaaacctttgttaaagaaaaaactattcagtgatactaggttggtaattgcagttattacttttgcacgaacctcgtacttgggaaagcatcaccaaaaagataacgaagacattatccaggcttatcgtgtgaagtacagggaccactgcaatggcggttcacagtgcaggagaggctgggctcagcttccaatatgaacacagcaagggcaagtgggaatgtacagccacgggggcaggcagcgggtgtacagatggcaaagcactaaaaggaaacatcagaggtgaagcgggtcctggctaaaccaacctggcttgttaaagccagccaagggggttaaacatcaaccaggggtggtggacgacgaggaacatgatatcaagaatggtggcttctcgccaaactgacttagccggtactttgctgaaatctaattctataaggaaacgcaccaccgggcctgggaggggcttcaggagcctggctacggtttggccaggcagagactttttgtcacatctccttctcacctaaaggtgtccgcggtgaattcttgcatcatttccttttcatgcatttccccagtcatgtgttgcaaacctaaccctgaaaataccaagtatgcagccggtctgtgagctgagggaatatgcagagacctgcagagaagcagcattgtctgcagatttaaagaggaaggaagcaggactcggataaggagggggccagccagaggggtggag

SEQ ID NO: 94330 - DNA, 69867 bp, Homo sapiens
  misc_feature (1)...(69867): n = A,T,C or G
atgcagcattcaaaaacgtgtaaatacaataggttttccttttcttgagtttttaaaattatgtttgaccgctgaagcaaagattataacagtgtctgatgtggttctaaaggaaatatttaagacaattataaacaaaaagtaaagctataaatacaaagggaagatagatatacagggaagtaatgtttatataaagggaagtaatgtttccatactttactcaaataagtaaaatgacaatatcagtagtctgtgattttatacacacatacgtacatttacatacaatacccgtaacgaccactaaaaagctacacaaagagataaactaaaaaacactgtaaataaacaaaaataaaattctaaaaaatgttcaaataattcacaggaaggcaagaaaaagaaacagagataaactaaaaacaataaaaataagatggcagagttaagctcaaacatagtaataattacttgaaatataaatggtgtaagtataccaattaaaagacaaagacttggctgggcacagtggctcacacctgtaatcccagcactttgggaggctgaggcgggaggatctcctgaggtagggagttcaagaccagcctgaccaacatggagaaaccccgtctctattaaaaatacaaaattagccgggtatggtggctcatgcctgtaatcccagctactcaggaagctgaggtgggagaatcacttgaacctgggaggcaggaggttgcggtgagctgagatcgtgccattgcactccagcctgggcaacaagagcgaaactccgtctcaaagaaaaaaaaaaaataagacttccagagtggattttaaacataacccaattataaattgtctacaagaaattcaacccaaaaataattaaataagtgaaaagtaaaaggaagaagtggtagacaaaatagtggccctcacaaagatgtccaagccctgatcctggcatcagtgagtatgtgaccttatatggcaaaaggcattctgaacacataatcaaggttaaggggcttgagatggaagagtaccctgaattatccaggtgggcctggataacgcaatggacatacaatctaatcacatgcatcattcggagaaactttaacagctgtggttagagaggaagctggctagagaaggatcaaagagatgcaatgtttctggctttgaagttggaggaaaggggccaggagtcaagtgatgtgggcagcctctggatgctgggaaatatattctcccctagagcctccagaaaggaatgcagctctgctgatacccaaagacaggagaatacacattgttttcaagtgccatggaccatacaacatattcagggcctgtcttagtccatttagtgttgctatggaatactcgaggttggataatttaaaaataaaaagaggtttatttggctcatggttctacagattgtacaagaagcatggcaccaacatctgcttcaggtgagggcttcagactgtttccactaatggcagaaggggaagtgggggtggcatgtacagagatcacatggtgagagaggaagaaaggcgtgggggatgccaggctctttttaacaaccagctttctggaagctagtaagtaagaagtcagtcactctctctgctccctgctcagggagagcattaatctattcaggaaggatttgcccccatgacctaaacacctttcattaggccccacctccaacactggggatcaaatttcaacatgatatttggtggggacagataatccatatccaaactaaagcagggccagaaaaccccaacacatttaaaagaactgaaattgtacagagtatgttctctgaccacaatgtaataaaattagaattcatggacagaaacattagaggcaaatctctcaacacttggaaactagacaacacacttctttctaaacagtccatcaaaagaggaagtctccagggaaataaatacactgaactaaataaaaatgaaaatacaacatatcaaaatttgtgcaacaaaaattaactcaaagtagatcatggacttaaataagaagctgtaaaacttttaggaaaaaactctttaggatctgggaatagccaatgagttcttatatttgacaccaaacaacaagaaaactatccataagagaaaaaattgataaactgataaattttagccaaaatttaaaacttttgtaagacatatatctgagaaaatattagtatctagattatataaagactagagtatgtcaaaactcaacagtgaaaaaacaacaacaacaaaggatcctattttaaaatgggcaaaagacagaaaaagacattttatcaaagaggttacatatttcattagccaatagggaaattcatatctaagccacaatgagatagcatttcacatacattagaatagtcaatataaaaaagtagcaatatcaaatgctggcaaggatgcaaagaatccaaactcagtcatacattgctggtgggaatgtaaaatagtacagctactctggaaacagtttggcagcttctttaaaaactaaacatgcaactaccatatgacccactcacagcactcctaggcatttattacagagaaatgaagatttattttcatacaaaatctgtatacaaatgtttacaatatctttcttttcttttttggcaatagccacaaactatgaacaactcagatatccttcagtgggtgagtggtgaaacaaactgtggtatactgtgctgtggagtactactcagcaataaaaagaaactactgatacgtgcaacgacctggatgaatctccagagaattactctgagtgaaaaaaagccagtccccaaaggctacatattgtatgattttactcacctatcattttcaaagtgacaaaattatagaaatggagaacagattagtggttgccaggggttaaggaattggtgaggtagaagggaggtgagtgtagctatcaaagtgcaagttgagggatccttgtggagatggaaaatgttctggatcttgactgtaccaatgtcaatatcctgttgtgatagtgtaccatcattgcaagtgtacacaatgtgataatgtgccacattgcaagatatgaccacgaggggaaactgggtaaaggttacatgggatccttccgtattatttcttaaaactggtgactcatgcctgtagtcccagctactcagaaggctgaggtgggaggatcactgaagcccaggtcgaggctgcaatgggccactgcactccagcctgggcaacagagtgagaccttatctcaaaaaaaaaaaaaaagttgaattttcaaaaataatatgtaattatatccacaaagataacaatacttaacacttaggagtcaacagcaaaaaccagaaattacccttggtaggttaggcagaaaggaatgtaatacagggaattagatcaccacaaaattgtcgaaaggcctggaggagtaacatctaggctgatcttctgggtacaactgctaaatcaagcaccacagtatggacacaccaaggaagtatctacctccacgacctggaagccaggaaccaaccaggaggccacggtactgtcagccccagggacctatcaacgcagccacaatccatgataacaaaatgaatgctctgtaccctcccacagacccatgaggtagtagctaagtgggaagcggaaaatccaaacccctctgtgtccttcccctcactttccccttccaaatctcccagtcacgtgcctggctaaagccaagtcacgtttacaaccaaactacagtggggtctgggaaaggtagtctttagctttttaacctccagatgtagattcttttgcccttctgtcagggagatgacaagtagtgaaaaagcaagcaaaacagcaagaagtaataggtctgcatattccagaaacaaaaaggtcctaaggtaacttcatgatccaaagatgaatatccaaatgtccatcaatattggtaaccaaataaacattaaattaaacaatacgatagcatattaacttctcaaattagaaaataccagtgttgctgagagtatagagaaataagcaaaaattttgcatactctttattctagaaatggtacctttcaggaattaaacgtccatacctataataaatatttggttacaaggatatttatgttacttacaatagcaaaaaaaaagaacctaaataccaagaagagggactgtctaaactatggtacatccatatactgaaaaactgtaaccattaagaatgatgttgaagaagactgaatgataaggaaaaaaagttatgatttcccaaaaaaatgtacatgaaactccatttttcaccttccccctccaccagaaagtaaaagaaattatacaggatagagaacatgttaacagtaaggagattatggagattaatatttattttctttatgcataggctatttccctgaatgttttactgaaaatacgtactacttctgtaaccaaacgaaaaaaaaagtagtaagaatttttttaaccaactcatgaagaatagtttctcataacactagtttattctggtaaacagaaatagaaattacaagttataatattcagtagccattcctttgactctgcttttctattttccttctccactaccaatttatccaagttgccacatttgcctacttaattctgaatttactcactccattccatccactcaaacttgcaacctcttgtctcctcattttcactaaaacacttgcccatatgtacgtttctcctggcatattatccacagctaagtatcaactggcacacttttctgagccctctctcacacaagttcttaaagaaccattcccaacacttgcaaggaaataggcaaacccacaaacataaactttcgttaagataaagtcaaacataaaaagaccagtctacaagctcatacttaaaactggatacatactccttacagccacacattcttacagactcagggaatcaaggagagaggtctttctctttcatgtcagcgtcctctccattcaacttcatctttcagtcttctaagctgaacacagaattgcaccttttgtttcattcctagaatgacaaaccttactctttcgtggtactgagcacttaaataaattagtttatacttttaaatgcactctcactagtctaaaactctaggtaggaagggtccctatttgttttgctcatctttgtagccaatgcctaagaatacgctcccagtagcattcaataagtaatgaataaacgactgtattattactgatgcatgattctgtcaatacagtcaaagcacacactacgttcccaacttataagtaaggaaaacgaggctggggcggttcagcggcgagtcagcgcagacccaggaggagagcggggtctcggagctgcaggaagtacggtcagccatgcagcggcagggctggggggcatgcaaggttcgcgctttgcagactctccgtaagggctagtgtcaataaatcgagttacgtgcggtggtgagcggacaagctaagttggcatatagtacgtggttcagtcagtatttatgaatgactcaagacacaaaaatagcttcataaacagtgctttgcttgagtttgtccgctcactaccgcacgtaactcgatccggagaattaatccgtggcgaattctccaataactgcgcgcgcacagtaaacggagaagctgaagctgggagatgagttgatcgttttacagaagcaaccaataaactccccaggccgggacccaaacccaccggaacagcaactggaaacctacatccttggtgcaccaggccgtccaactcttcagcggaggcctgcaggtggcgctgatctcaccacgtttcccctccacaggccaggggccaggcctggctaccgggcccgcgacctcattcatctggcgtccgccggccccgcgcgccgcgcaggcgggggccgtggccaccaagcccgggcgcagtttctctccgcccacggcaggagcgaaggaaggccctggcgcgrgcgggtaaactgcccaccgggcggcccacccgctgcgcccccggcccgcaagaggcagtcccaataggttggcccgcctggccgaagtccgcccggagcccgctcacctgtcagcccccactgccgtaagtcctgctcctgcacccgcgccgcctcggctsggccctcagtatgaagccgcagtaagaagccaggsgcttggcccccgcggctagtagcgcccgcgcgctccatcgggccggtagaggccccgccccgcgcggccaagcgcgcacctccctcccaacttcccaacgcgcgggggcgsgcgactgcgcgctggggcccacctaygagcgaggcgccgccagagggcgcgtcctgccaagatatccrgagcggagctggtgcagtcacccttccggacaggcagttcttgcagtgcggagcgtggaagggctgcccagttctcaccagtcgtgcttctgaagcgctaggcgtctgatcacgcacaggamgtctgattgcctgaactgcccgtcaaggaggtggcatgtgttcatcattcatttattatttaatcaacatcgactatcatgtgtcagacactccgctgggccctgggggttctagaagtaagacttgttccgtgccctccagtgattcacgataagatcaaactgttcttgttcggtttacctagtgataaattgatttagtccctgaaatccctttcttactgcctgtgacctgtaggccaaaattgggaacctctgaatagtagtaaattaaaatcaccaaagacgtcattgtggcagtgggtatctcaagtgcattatggggagcagattgaggcaatgtgttcagttaggggtcaccgtgactcagcatcagctttgagtggatttatgatgtagtataccactaatataaatatgataataacaaaatagctgcatttattgatgaagttctgggtggtgtcctaagggctttaagtatattttcttatttaaccttcacaataaccaataattaggtgttataattgtccccacattgtaaatgaagatattgggacttgtaatggtaattggcagtactggaacaggaacgatattattctctggctaatgtcattagaatagtattctcatttaggttaatcttggtgcttccttcttcagtaaactcatgttaaatttgtaccctccattctcatcttcctctaaaataaaagggagaaatttgttctgagctagaaaagggatgacttcagattggtttattcataaaaactcaagcaaagcactgttttatgaagctatttttgtgtcttgagtcattcataaatactgactttcatgcgcgtccgtgtgaagagaccaccaaacaggctttgtgtgagcaataaagctgtttatttcacctgggtgcaggtgggctgagtccgaaaagagtcagcgaagggagataggggtggggtcgttttataagatttgggtaggtaaaggaaaattacagtcaaagggggtttgttctgtggcgggcaggagtgagaggtcacaaggtgctcggtaggggagctttttgagccaggatgaaccaggaaaaggactttcacaaggtaatgtcattacttaaggcaaagacgggccatttaaacttcttttgtggtggaatgtcatcagttaaggcaggaaccagccatctggatgtgtacgtgcaggtcacaggggatatgatggcttagcttgggctcagaggcctgacactgactgaattacatactatgtgccaagcactctatggtactgaagatagaggccacttatctcctggatcttacattttaaaaggaggagacaagcaataaataaaaatcaggtagtgaaggggtggcctgcccctccacacttgtgggtatttctcgtcgggtggaatgagagacttaagaaaaaaaaagagacacagagacaaagtatagagaaagaaaagtgggcccagggaaccggcgctcagcatacagaggacctgcgctggcaccagcctcagttcccttagtatttattgatcattatcgggcatttctcagagagtgggatgtggcaggacaatagggtaatagtggagagacggtcagcatgaaaacakgtgaacaaatgtctctgcatcataaacaaggtaaagaaaaaagtcctgtgcttttgatgtgcatacacataaacatctcaatgccttaaagagcagtattgctgcccacatgtcccacctccaggcctaaggtggttttctcctatctcagtmaatggaatatacaatcgggttttacaccgagacattccattgcccagggatgagcaggagacagatgccttcctcttatctcaactgcaaagaggccttcctttctcttttactaatcctcctcagcacagaccctttatgggtgtcaggctgggggacggtcaggtctttcccttcccacaaggccatatttcaggctatcacatggggagaaaccttggacaatacctggctttcctaggcagaggtccctgcggccttccgcagtgtattgtgtctctgggtacttgagattagggagtggactcttaacaagcatgctgccttcaagcatttgtttaacaaagcacatcctgcacagccctgaatccatttaaccttgagtggacacagcccatgtttcagggagcacagggttgggggtagggttacagattaacagcatctcaaggcagaagaatttttcttagaacagaccaaaatggagtctcttatttctacttctttctacacagacacagtagcagtctgagctctctttcttttccccacaaggtaggattaatgctaagacaaaagtaaaacacaatcgcataatggggcaatagtaattttgtacagcagctttcctgcttgggtgttttctcaaaacaaacctgaagagagatttatatcctttggtggcttctccagagggacctctgtcctatgtggctgctcatgagtggtttttgcatcttggtctccatgtatgacttatttcctctcctctagattctaccagtagacttatctgctaaagcagccatatcaagcacttgccacttaaatataagcctgtttattatttttaacttaaagtacatttgttgtaacagaataccagatgatagagtcctagctataagccaggtagactgttggtatactaagtctggtacctaaaatacagctaagaaaggtagctgagagactccaggtctgccagtgaggtgacacatagaaaagttttgctctgaatactgtatgaagagatctgtagatgatcaggatggaaggaaggaggcagtttggaaactattgcagtagtctgggcaagagttgatagttttggggccagcatggtgatagtggagtggtgagtagtggtctgctactagatctattgaaaagatagagcctataggattcactgattgagcatctgggagaaatgaagaagcaaaggttgggttcagggatgtggcccgagcaactggtgggatgtgttggatttgtacaaacagtgctgggcacatagtgttgtacttgagcgagttagagagaacgccacactttgagacgaattaagagtctgtttatttagccagcggctgagagatggctaacgctcaaagttctcttggccctgaagaaggggctagattttcttttatactttggtttagaaaggggagggggggtctagttaaaacaattttccagaagtaaagtaggcagaaagttaaaaggataaatgattacmagaaagtaaacagttctaggtgcaggggctttaagactcttacaaactgatagacgtggggctttgggcgttatcaattggacgaattcctgggaactgcggatattgctcgccacagtattttatcagttaattgaattcttggatgttctgggagtcagcttgcacaagttatgtctttgaggaaggggctgccagtgaaagagccaagatgaagtctgtctggctctcttagctaagggacagtcaattcaggtggaaacaaggctaggkgattaaaggaaagagagaatctaaaaacagggttagtaaaaacaaggttaggcattacaatagtatgccctcaataaatattgttgaatgtttgaatgaggtgcctgtggaacaattttaaaatctagggcatatgattgttataactttgaagtacagagagtgcatttcacagatgggcaaaccaaggcacagaaagtttaggaagctggtccagtgttttctgtgagtcgtgattaactcccagaataaaatttagcctcaactcatttttcattcattgttcaggttatacaatcatgctgtttttgttaattgttttattcctccacagaaaggatatgtcctttggcaacagcaactccataagattaatgctaaccaactaacactgtcagtgggacttagcatgtgcagacattaccaaaacaagcatggattaagcacagattaagaaacaaattatgtttgctgtttgttgtatccttgctctgttaggtaacatcagggcaccagttagaagcacctagtgagtcagatacggaaattggataaaagctgtgaccaaagtaaacatttattcagacctcttgagtaaatgaacttggaactttgagcttaggttasaattaggtccgtgcccatgggtggaagatttttgtgctgggatgaaaaacacttaacttgggttttctttcttgcaagaaatgaaaaactgtrttttgacttttgatgccagtatacctctttgtcatgaaataacatgtaataaatttagaacccagaaagccagggaaaatataccacagtatagaagtatagaaaaaaagtaagttggtttcacaggactcttgcccagtcacctcagagaattgccactcccttttactatcaaaggtaaggttgtaaaatagtaatattatcaagttaatctttgagaacatagtttagaaattgtaggcatcaaaatttgcccacggtctttttgcttgaaaggacagtgttttcctttttaactggatgccttttgactgtcatgccatgccatcacattggtcacccagaatttcattctttatgttctccaaccagcagtgtaacgtttatgcaatctgcccagctagtccctgaaggcttttgagtttgccaaactggaaatttaacttttgtgacatattgatggcagtgacggcctatctagagcagctgctgtcatgatgccacttgcaatgggggtggcacaccagggctgccagctccatggagctgggggaaccaggaacaggtggaggccctgcctccttctgagttggcagggcaggagcttcctgctccccaggtacagctgtggctgcccagctgcagctgcagacctgggcatccctgtgctctttggggctaaaagcaggcaggagccctaccctctcaggcacagctgcagctgcctgagtcatgtccaccaactcggcctccctgtgctcttgggttcctggagcaggcaggagccccaccctcctgggtgcagctatagctgctcaaaccacagctgcagacctgggcatctctgcactcttgggggccctgtaagaccycccaccccattcctgcaggctaagaagtgtctcctcccattgcctggcctctttctgctcccagcacccactccattcccagagcaaggttggagctgaggctgggtgctattgcagcctggccaggtgtgcacccactccaggcagcactgacacatggctttggccccctcaggactttgggtgccagcatgggagggaggccaagggggtgctggggcagctcagcctctgtgcttgcctgcaggtgcccctttgcacaaacagtttgggtgctgtgaatgccagcaggaggcagtctcctgggtggaagggagcaggtcaccggtgaagacctaccctcaagctggggagggcctgaagcctggaggctgggctgctggtcccaaaaaccagagtgagaacttgtgttttatctgggtgcctatggaccagttggcgcacacttcctctcctctgaggcctgtaaaagccccagactcagccagacttgagacagtgggataaccagctgcagagaggagctacccaccccagggtctactctctgctaagagctgagttgacaatgatgacctgccagctgtggagaggagctgcttactccagggtctcctctctgtgagagctaagcagacattgggacaaccaactgcagagaggagctacccactccagggtctcctctctgctgagaactgaacactcaatgggacaacctgcctgtggagaggaactatccaatgtgggtctcctctgagctgttctgtcactcaataaagtttctcttcaccttgcttaccctccacttgtcaacttacatcattctacttggacgcaggacaagaactcaggacccgccaaatggtggagctaaaagagttgtaacacaaacagggctgaaacatgcccattgcttgccacattgtgggcaacaagaaggagagaagagagaaggagagaggagctgcagccctttgggaagcccagacctaggagctcactgagccagggctgtgacaccctctttggggctctttagctcttggcatctccaagcttccaggcaccactgcattctccagtgccagccatgaaatctgcttgtggcacccctggtccagctggagcctcacagggagtcagtgcccatactggcacctggagctgcctgccttgccrcagctggcatgcctggctgtgcatagtggctggacctcatatttgctcacacacccctctctgctctgcatctggctggcccttggctggcatgggatccaggctggtagcatgagccatgtgcagcctgccaggctgaatggaccaaacaagcccaataggctygagcaaaacttgtgcaaaagyaccaatggccacagaggtttctgtctcacaaagcaacaccccaagaatcccgtgacaatatttccatgtaggggacaggttgtctcaataatataccataggaagccaaaatgtttctcatgattcaccctactctaaaatatttttaggcaatgtaaaattatgaccctaagaactctctatgaccttcttcttcctctgattgacaagaatccaaagccattttttttaccctaaccctataaagcctgggttttagttttgaaaaatgagcatacctattctgggttctgttgcacatgtatctatccctgaggcacagttataactttgatgcaagggggttccccacctctatcccctcaaattgctcaaaaatggcatgtctaattaggcttcctaattagagggttttaacaatcagagtgcttctgaaaggcccataatgcatagtgaattatgaggataatagtagctatcctataatgctgttgtaaaaattaaatgaaaattttttcacaagaaactaaatacaaatttgaatgtccaaggtattacgaaggactgaaaatcttcacttgggaatgagcctggggatcactcaagtatccacatctcatcagtggagaattaagaaattggaagttatccctcattattgaggttccatggtaatctcatttgcttggggtgtctacaggcatagtgttttccccatatgtgtggcccacagatatgggtcataaaagtaaacagaaatacacacacacayacacacacacacacacacacacacacacacacacacagtgtgggatatctactccatggtgggctctaaccagctttgatagattgtattactgttcctaactatccactttctccccacaagatggttatacatttatgcccttagtcatgtgacttgcagtgcttcctaataggaagaacccctgtgatttgccttggacagtggaatatgagtggatgtgatttaccctagtatataagttgaagctttaaatgtgcttgcccaaattattcctaccctctgccatggaaactatacaaatgaaataagggccatgctggttaaaatctttcataattttttcatgtcagtataaattcatctcattaaatataatatgtaatatagtccttccccatcttgatgaacgtttatgaagtcatttcaaatttttcactattactccataaatatagacaattgttatttgtccattcaaaataaattagtaaaaacatttttaagttagaaaacaaaataattttttacaattaatgctgactaatacttgaactccaactacatgccaggccacgtgtgggcactttacatgtgttataacatccacaggttctgcggcttaggacatggatgtctttggggacgatgttttcagcctaccatgatggctgtgatttatctcctcatcttttttagatatgcactttctcttcctcctctctgggtaacaaagtacctagcacatagcaggcatagaatggatgctgttggggtgatcagacccaacaccagatcctgggggtgacaaagtccggtagagtcaaaggattgagaaaaccacagtttgagaagtaaagtgggagcagggggccatcrcaattgtggaggctgcgaaggctccgagctctgggagcccacgctgtttattggtaatccaacagagaatcaggtggtgagaatgtgggggtcaaaagagcaggctcatgatctacagctgtgacggtttagcatttatttatttwttttttttattgatcattcttgggtgtttctcgcagagggggatttggcagggtcataggacaatagtagagggaaggtcagcagataaacaagtgaacaaaggtctctggttttcctaggcagagggccctgccgccttccgcagtgtttgtgtccctgggtacttgagattagggagtggtgatgactcttaacgagcatgctgccttcaagcttctgtttaacaaagcacatcttgcaccgcccttaatccatttaaccctgagtggacacagcacatgtttcagagagcacagggttgggggtaaggtcacagatcaacaggatcccaaggcagaagaatttttcttagtacagaacaaaatgaaaagtctcccatgtctacttctttctacacagacacggcaaccatccgatttctcaatcttttccccacctttcccccctttctattccacaaccgccattgtcatcatggcctgttctcaatgagcatgttgggtgcacctcccagacggggtggtggccgggcagaggggcttctcacttcccagtaggggtggccgggcagaggcgcccctcacctcccggatggggcggctggccgggcggggggctgacccccccacctccctcccggacggggcggctggccgggcgggggggctgaccccccacctccctcccggacggggcggctggccgggcggggggctgacccccccacctccctcccggacggggcggctggctgggcggggggctgaccccccacctccctcccggacggggcggctggcctggcaggggctgatccccacctccctcctggatggggtggctgctgggcggagacgctcctcacttcccagacggggcnnnnnnnnnnnnnnnnnnnnnnnnnnnnnnnnnnnnnnnnnnnnnnnnnnnnnnnnnnnnnnnnnnnnnnnnnnnnnnnnnnnnnnnnnnnnnnnnnnnnnnnnnnnnnnnnnnnnnnnnnnnnnnnnnnnnnnnnnnnnnnnnnnnnnnnnnnnnnnnnnnnnnnnnnnnnnnnnnnnnnnnnnnnnnnnnnnnnnnnnnnnnnnnnnnnnnnnnnnnnnnnnnnnnnnnnnnnnnnnnnnnnnnnnnnnnnnnnnnnnnnnnnnnnnnnnnnnnnnnnnnnnnnnnnnnnnnnnnnnnnnnnnnnnnnnnnnnnnnnnnnnnnnnnnnnnnnnnnnnnnnnnnnnnnnnnnnnnnnnnnnnnnnnnnnnnnnnnnnnnnnnnnnnnnnnnnnnnnnnnnnnnnnnnnnnnnnnnnnnnnnnnnnnnnnnnnnnnnnnnnnnnnnnnnnnnnnnnnnnnnnnnnnnnnnnnnnnnnnnnnnnnnnnnnnnnnnnnnnnnnnnnnnnnnnnnnnnnnnnnnnnnnnnnnnnnnnnnnnnnnnnnnnnnnnnnnnnnnnnnnnnnnnnnnnnnnnnnnnnnnnnnnnnnnnnnnnnnnnnnnnnnnnnnnnnnnnnnnnnnnnnnnnnnnnnnnnnnnnnnnnnnnnnnnnnnnnnnnnnnnnnnnnnnnnnnnnnnnnnnnnnnnnnnnnnnnnnnnnnnnnnnnnnnnnnnnnnnnnnnnnnnnnnnnnnnnnnnnnnnnnnnnnnnnnnnnnnnnnnnnnnnnnnnnnnnnnnnnnnnnnnnnnnnnnnnnnnnnnnnnnnnnnnnnnnnnnnnnnnnnnnnnnnnnnnnnnnnnnnnnnnnnnnnnnnnnnnnnnnnnnnnggctgccgggcggaggggctcctcacttctcagatggggcagttgccaggcggagggtctcctcacttctcagacggggcggctgggcagagacgttcttcacctcccagacggggtcgcagccgggcagaggcgctcctcacatcccagatggggcggcggggcagaggcactccccacatctcagacgatgggcggccgggcagagacgctcctcacttcctagatgggatggcggccgggaagaggcgctcctcactttccagactgggcagccaggcagaggggctcctcatgtcccagacgatgggtggccaggcagagatgctcctcacttcccagatggggtggcggccaggcagaggctgcactttcggcactttgggaggccaaggcaggcggctgggaggtggaggttgtagcgagccgagatcacgccactgcactccagcctgggcaccattgagcactgagtgaaccagacaccatctgcaatcccggcacctccagaggccgaggctggcatatcactcacggttaggagctggagaccagcccggccaacacagcgaaaccccatctccaccaaaaaaatacgaaaaccagtcaggcgtggcggcgcgtgcctgcaatcgcaggcactcggcaggctgaggcaggagaatcaggcagggaggttgcagtgagccaagatggcagcagtacagtccagcttcggctcggcatcacagggagaccatggaaagagagggagagggagaccatggggagagggagagggagagggagaggttgaggtttagcatttatatggaacatgttctgctacttgagataatgggaatacaaccgctctaggagcttggagggctagaagcaaggatccagcaagtctacacacattccagaggacattatgtcagacatgcaagccctgcctcagctttcttcccaacactcagctttttcccaacagacactgtgstagaaatgactcttggactagtcaggattgacttattaaggtttactactgaacaaatagctctccacattttaattcagcaaaaagtatatttctcactcatgtcacagtccaatgcttgtcagccacctttcctttgcagctctccctcaagattcaagcctattctatcttacaaagatgccatttaaaagtggcctctggggggtggagccaagatggctgaataggaacagctctagtttacagctcccagcatgagcgaagcagaagacaggtgatttttgcatttccaactgaggtactgggttcatctcactggggagtgtcagaaagtgggtgcaggacagtgggtgcagtgcactgaccatgaactgaagcagggcgaggcatcgcctcacccgggaagcacaggaggtcagggaattccctttgctagtcaaagaaaggggcgacagacagcacctggaaaattgggtcattcccaccctaatactgcrcttttccaatggtcttagcgaacggcacaccaggagattatatcccatgcctggctccgagggtcctacacccacagagtctcactgatacaggagcacccagattcataaagcaagtccttagagacctacaaagagacttagctcccacacaataataatgggagactttaacaccccactgtcaacattagacagatcaatgtgacacaaaattaacaaggatatacaggaattgaactcagctctgcaccaggtggacttaatacacatctacagaactctccaccccaaatcaacagaatatacattcttttcagcaccacaccacacctattccaaaattgatcacatagttggaagcaaagcactcctcagcaaatgtaaaagaacagaaattataacaaactgtctctcagaccacagtgcaatcaaactagaactcaggattaaggaactcactcaaaaccgctccactacatggaaactgaacaacctgttcctgagtgactactgggtacataacgaaatgaaggtagagataaagaggttctttgaaaccaacgagaacaaagacacagtgtaccagaatctctgggacacactgaaagcagtgtgtagagggaaatttatagcactaaatgcccacaagagaaagcaggaaagatctaaaattgacaccctaacgtcacaattaaaagaactagagaagcaagagcgaacacattcaaaagctagcagaaggcaagaaataaccaaaatcagagcagaactgaaggaaatagagacacaaaaaacccttcaaaaaatcaatgaatccaggagctttttttttgaaaagataaacaaaattgatagactgctagcaagactaataaagaagaaaagagaagaatcaaatagatgcaataaaaatgataaaggggatatcaccaccaatcccacagaaatacaaactaccatcagagaatactataaacacctctacacaaataaactagaaaatctagaagaaatggataaattcctcaacacatacaccctcccaagactaaaccgggaagaagttgaatctctgaatagaccgataacaggctctgaaattgaggcaatacttaatagcttaccaaccaaaaaaagtccaggaccagatggattcacagccgaattctaccagaggtacaaggaggagctggtacccttccttctgaaatgattccaatcaatagaaaaacagggactcctccctaactcattttatgaggccagcatcatcctgaaaccaaagcctggcagagacacaacaaaaaagaattttagaccaatatccctgatgaacattgatgcaaaaatcatcagtaaaatactggcaaaccaaatccagcagcacatcaaaaagcttatccaccatgatcaagtgggcttcatccctgggatgcaaggctggttcaaaatacacaaatcagtcaacgtaatccagcatataaacagaaccaaacacaaaaaccatatgattcctcaataggggcagaaaaggcctttgacaaaattcaacaatccttcatgctaaaaactctcaataaattaggtattgatgggacatatctcaaaacaataagagctatctatgacaaaccaacagccaatatcgtactgaatgggcaaaaactggaagcattccctttgaaaattggcacaagacagggatgccctctctcaccactcctattcaacagagtgttggaagttctggccagggcaattaggcaggagaaggaaataaagggtattcaattaggaaaagaggaagtcaaattgtccctgttggcagaagacatgattgtatatctagaaaaccccattgtctcagcccaaaatctccttaaactgatgagcaacttcagcaaagtctcaggatacaaaatcaatgcacaaaaatcacaagcattcttatacaccaataacagacaaacagagagccaaatcatgagtgaactcccattcacaattgcttcaaagagaataaaatacctaggaatccaacttacaagggatgtgaagtacctcctcaaggagaactacaaaccactgctcaatgaaataaaagaggatacaaagaaatggaagaacattccatgctcatgggtagraagaatcaatatcatgaaaatggccatactgcccaaggtaatttatagattaaatgccatccccatcaagcaaccaatgactttcttcacagaactggaaaaaactactttaaagttcatatggaaccaaaaaagagcccgcatcgccaagtcaatcctaagccaaaagaacaaagccggaggcatcacgctacctgacttcaaactatactacaaggctacagtaaccaaaacagcatggtactggtaccaaaacagagatatagatcaatggaacagaacagagccctcagaaataatgccgcatatctacaaccatctgatctttgacaaacctcacaaaaacaagaaatagggaaaggattccctatttaataaatggtgctgggaaaacgggctagctgtatgtagaaagctgaaactggatcccttccttacaccttataaaaaattaattcaagatggattaaagacttacatgttagacctaaaaccataaaaaccctagaagaaaacctaggcaataccattcaggacatagtcatgggcaaggacttcatgtctaaaacaccaaaagcaatggcaacaaaagccaaaattggcaaatgggatctaattacactaaggagcttctgcacagcaaaagaaactaccatcagagtgaacaggcaacctacmgaatgggagaaaatttttgcaatctactcatctgacaaagggctaatatccagaatctacaatgaactcaaacaaatttacaagaaaaaaacaaacaaccccatcaaaaagtgggcaaaggaaatgaagagacacttctcaaaagaagatgtttatgcagccaaaaacacatgaaaaaatgctcatcatcactggccaccagagaaatacaaatcaaaaccacaatgagataccatctcacaccagttagaatggggatcattaaaaagtcaggaaacaacaggtgctggagaggatgtggagaaataggaacacttttacactgttggtgggactgtaaactagttcaaccattgtggaagtcagtgtggcgattcctcagggatctagaactagaaataccatttgacccaaccatcccattactgggtatatacccaaaggattataaatcatgctgctatgaagacatatacacatgtaagtttattgtggtagtattcacagtagcaaagacttgaaaccaagccaaatgtccaacaaygatagactggattaagaaaatgtggcacatatacaccatggaatactatgyagccataaaaaatgatgagttcatgtcctttgtagggacatggataaagctggaaaccatcattctcagcaaactvttgcaaggacaaaaaaccaaacaccgcatgttctcagtcataggtgggaattgaacaatgagaacacatggagacaggaaggggaacatgacacactggggcctgttgtggggtggggggctggggaagggatagcattaggagatatacctaatattaaatgatgagttaatgggtgctgcacaccaacatggcacatgtatgcatatgtaactaacctgcacgttgtgcacatgtaccctaaaacttaaagtatgataaaaaaaaaaaaaagtggcctccatggagcttgcagtgagccaagatcgcaccacttgcactccagcctgggcgacagagtgaggctccatctcaaaacaaagggggcctccaaaagagactgtttgctgaatgaatatgggcaaaatgcaaacgtaatagaaagaattagaaaacagggtagcatctgagtagaggtgagactgtattgtttgaaagctctttctgggttggacctttgcagaaactctgcaaacccagttccacatgcatgtgcatccatacacatacactccttcaaaagcctcatatgttatcttggaattagttgttcttatttctcactcataatattgctgtctagtaatagcatgagtaactgagttgagtctgtatattaatttggatgtatcaagttatttttcaatgaagaaattgacttacttgcaaattgtcagctaggcaagagagagaacatttgagtcaaggtttaaaacattgtataagtaattttaatacaacacaaaacatatttgctatattcaaaagcaattaattataagacacaattgaagtagggggacattaaaataaaattacattgttaactacattttaaaagtaattcttgcattatttgtaaaactgattcagtaggaggaaattaatactcagtttataaaagtattcatgttttcctttaggcatttcttctagtgcattcaaaattatccaatttacaagtaattcattttaagttaacttctagcatataaaatggttgtgttgaaacactgtcttcagaattttatttttaaaagatactattttagtataaattcacatttatagttgaatgcttttgtgaaagatattagtctttaaaatattttacaggctggccttgttggctcatgcctgtaatcccagcactttgggaggccaaggcaggtggatcacttgagcccaggagttcaagaccagcttgagcaacatagtgaaacctcatttctacaaaaaatacaaaaattaccaggtgtggtggcacacagctgtagtccctactcagaaggctgaggtgggagggtagattgagcccaggagatagaggctgcagtgagccatgattgcaccactgcactccagcccaagtgccagagtgagaccctgtttcaaaaaaaaaaaaaagttcgacagttccaaaacacattaatgttaattagagtctgctaagttgctataaatacaacaaaaaattcaatggcacaaacaaaatatcagttgcctctcatgaaaaagtccaagattagcaggtgcagattggaagagcaaaattgactcagggagtggtagaaggagagcaaggatccaaggcatgagccacaatccatgcctcttacaacccctcacatctgtcaaatagaacccttgtctggatgggcccttgttctaacccagtgcctgaaatcttgtatctgttatattggtggttctacatgactttatatttgaaaagttacattttagaagtggatattttgtatttttggttactaatataactgtgtgaaagcactattaaaaatacttttatttcgttaaaattacctgtttatgttttggtctcctccactaatctgtaagcccctctgagtaggaaacaatacattcctcactatactccagcactcagctcagtgcatggggatttaaaagtaaatttcttccagaagtgtagattcttagatccagattgtgaggaggggaggagagaggtataggtgagccgggggcggaagtgggggcaggatcatcttaaggaaggagaccactrctactactgctgccctcctcccaccaccttgcctcgttcacaagacaggaggagagaaaaagcaaaaagttggaaaaaaaaaaaaaagtaagataaatwgccagacaaccttggcaccaccacccggccctaggagttaaaaaaagtaataataataacatcaacccctgacctaaactacttgtgttatctgtgaattcctgacactgtatgaaaaaagcattgtagcccccagtcacgtttcccactcttgtttgatgtatcacgaccctttcacgtggaccccttaaagttgtaagcctttaaaaaggccaaraatttctttttcggggagctcggctcttaagacgcgagtctgccgacgctcccggccgaataaaaacctcttccttytttaattcggtgtctgaggagttttgtctgtggctcatcctgctacaatctgtttgaacagatcacctgaaaggtaggtgttcatttaagcatttggagtagaactggctttggggttgttgacagttttcccttcactaggaagtgtttgtcactttaaggcaaaaaccaggaagttaaaagtggatgcagaagcgagcacagacggggctaggggtttcagagaaagtaattgagagtgctggcaacagcagctgaaatatagagaagttgtaggattaactttttcgcccaaagcagcttcagcccacgttttattcccatcgagggagggagaatgggtgccgctgagtgggcgggggagtggtccctgaaaggaggtggagtgctacagyccctccccgttggctctcgctgtttgtccgttgttggtttatastaatttgacaacagccgcctgttgagtctcctccagatcgcagctgaaggatctgttgagcgcttcaggaaaggcggtgagatccggtaccgcagcagagcactctcagctctgggtcttgcaggcgcagggctcccccatgccagcagaaagatttcctctggtgaagaggaccgtcgaatctgtcctcctcaagacacctcttgtacagaatttattcgaatgccacggccaakgtcttccttgaaaaatgttaaccgatgtgtgctttttgtcttttgtcatcctttctttaggacaggcgacactaacaggtgaagatctcgggagaccatgactaagaaaagaattgctgtgattgggggaggagtgagcgggctctcttccatcaagtgctgcgtagaagaaggcttggaacctgtctgctttgaaaggactgatgacatcggagggctctggaggttccaggtacatacatctcctagtcccttaatacttgaaaccctccctgcaactaggtgcatacgacagtttatcttaacagtgtcaggtggccgggcgcggttggcacacgcctgtaatccyagcactttgggaggccgaggcgggcggatcacgaggtcaggcgatcgagaccatcctggctaacacggtgaaacctcgtctctactaaaaatgcaaaaaaattasccgggcgtggtggcgggtgcatgtagtcccagctactcgggaggctaaggcaggaggatggggtgaacttgggaggcagagcttgcagtgagccgagatcgccccactgcactccagcctgggtgacagagcaagactccgtctcaaggaaaaaaattaaaaaaagatagttaaacttattatattccaaagaataccagccacctttattgatctccaaactgacatgcattggatttgctgggtttgcttttatttttacattttttgaaggagaatttttattctttttatttacagaaaattcagcagtgtacatttaacccagtttagtggcaacttctttcacctttcccttttccactttggtgattcaaacccacagatttaggacccaggacattgcctccccattggcagcgaatctcatcatatctgtccatgtaattggttctgaaaactgccaccaacttagccacacctcctttgtcttcctagtgaacctgtgtgaaggcaaygtcgtgcaggtcttcctgtggactagacatcccaatcttacctcacccttgataatgcagtaagggacccccattttgggacacagggcaggcaggaagacaaccagctcgatgggatccgcatcgtgtgcaatcaccaccagctgagtcttcttgttctccaccaaggtggtgattgtgttaacccctgctggaaagacgggtggtgtctcgatgggggtatcccctttgctagcagctttcttctcagtccaggacaacagtctctgcttcttctcttgttttgtctctggtctgtgcttgtgggcccgcgtaagcagtcagtagctgtttggcagtgcgaagcctgggtgaactggttaatggcaggaagtgctttcagcagcttataaaaggatagctctttgctgctgcaacctgatataggggggccatctgacaaagagggtgaggtctctttggggctgtatgtcctgtccaatgccaaaattcttaggctttttctcaaacagaggattcacaacttttttgkcttcctgcttcttcactgatagcaggggcgggggccgccttctttcccttagccttctttcctattggcatcttgggtggctagaggagaacgggtttgcttttaagctagttttctgaacatttaatagtattgaggtgccctagataagttttacgtttcatatttcataaaaactaacacattgttggccagctacataaaagtggctttatagcatttcttagttgaacygaaatacaatccttttgcaccctgactctgttttggggactaattttatgtgacaatcrtccttattcagatctggagtggatccccttagctgacctgcatacstgtatcatcatcagtcttggacatgggctaaaagcctgttgtttttagtaaacagcagaaaattctgctcttaaaatccagccacaatatggtatggaggttaagaatgcagtcttaggctcaaaccttatttctgtcacctactagcagtgtgactttgggcacatcattaagcttctctgtacctgtgtttcttcatctttaagaagtggataataatagtatccactttatagagttattgtcaggagtaagtgaatggataattatgccaatcacttacaacagtgccaggaacatagtgytacatgttggttattattcagtaggcctaggatgggactcacacatgtggtgtctttactaagcatcttagccagttttggcagttactgaaaaggcatgaaatcaattgaggatgggaggaggttgggagggcatccatcatcttgtckgattatcaagtttctggtttttatctccaatgtggtttaaacttattctctgctaaagacttaacgtggaggtttttcttctgattatccacttggcaaaattttaacactttgtaaactgcttccttgaaaataaataagctgtgtttcatcataacgctctgacttctgttmcracagaccacacctgtgtggttcaccgttatatttctagagccaagcatgtattctactatctccattttttaaagctccccagatgattccaatgtgcagacaacagttcaaagagagtttctattccatgggattttgaaaatctgacaggaacagaagccccaaactgtcctcattcctcccatttaaatttttctcctttcttctgtccttattacttcttccaatcccatcagttccaatttccccaacttccatcccctgctctctctctcttttctttttaggcagagtctcactctgttacccaggctggagtatagtggcgtgatctcagctcactgcaacctctgcctcctgggttcaagtgattctcatgccttagcctctcaagtagctgaaattatacacgcactactacgccttgctaattcttgtatttttagtaaagatggggtttcaccatgttggccaggctattctcgaactcctcacctcaagtgatctgctcacctcggcctcccaaggtgtggggattacaggcatgagccaccgtgcctagcctctcttttcttacacagacttcctgctcaaatgtgtgagccttgtgcctaggtaggaaatataatcagtgtatagagtttgtagagagaagatttattcatcaatggtagaaaattgtaaaatgcaggagcagaagcttctttttcttctactcactaacccaatactgctctgtgctcactcttttggaaagcagtggattggcacagtggtaaaccttacctaagttccaatcaggtgtttcgaaggacttgaaggatgttgttgacacaggataacacttgttgtggttagtgatttgaaaaagagttgaaatataggagtacctcaaagaggtgagatctgtcattcatttcactcagtgatcccaacagacctgctgtggataggatggctctactctttgtaaacgttgaacttttggaatacacatacagacttgcatttatcrgtacctcataaagtattttattacagagggactttctaaatatctcttgaatgaataaatgaaatgaaattcagaagttaggaacatgcctcacctgctctccatacagcaaacatcttaattccaaaatgaccttgccattcattaatttaccttaattaaaaaatatatacacttatgtacaaacatgtttaaataagcttttaattttagaacagttttagacttacaaaatttattaggaagataatacagagaattacagtacacctcatgtccagttaccccattttacattagtatgatacgtttttaaataatgaatgaaccaatattgatacattattattaactgaagtccatactttattcagatttactcagtttttcctaatggccttttgctgttccaggatcccatccaggatactgcattacatttaatagtcatatctccttaggctctttttggctatgaaatttcttagactttccttgtttttgatgcccttgatagttttrgggccaggtatgctgtagaatatccctcagttgggatttatcttatttttttctcatggttaaattggggttatgacttttggggaggaatattataaggtgccattctcctcacctcccatcaagggtacatactatccacattatacccactgttttttttttttttttggaaacttaaaactcattttatgttattataagtaagaaattagcattcaatatatgccacaatatatctttgttgaagtgtaagtttgttccacttttctatttttcattttccaacttttattttaggttcgggggtacatatgaaartttgttacaaggataaattgtatggggctggtataactgctagccatatgcagaagattgacactggatcccttccttttgccatatatgaaaatcaactcaacatgcgttaaaaagttaaatgtaaaatctaaaactataaaaaccctagataatatcactattgatgttaaccttgatgtcctggcttgaaatagcrtttgtcagtttttgccacactgtaaagttgctccttttttctccattgccatactatactctttggaacaaagtcactatgcacagcccactattaaggacaaagtcttctattctaggccttctgtctttccatatgaactttagaatccatgtgttagcttggattctaaaatagcttgctgggatgttgattgagattgcattgtatctataggtcaagttggaaagaactgacatcttaacaatatttaatcttctagtctatgaatcagaatatctctccatttatttaaatcttagactttcttcatctgtgttttctaattcatgcttataaatcctatacatattttgttatgtttatacctacgtatgtaatttcaggggtattactatagatggagtttttaaaatttcaaattccagttgttcattctagtatataaaaaagcaaatgactgggtgcgatggctcatgcctgtaatcccagcactttgggaggccgaggtgggtggatcacgaggtcaggagatcgagaccagcctggccaacatagtgaaaccccatctctactaaaaatacaaaaaattagctgggcakggtggcatgcgcctgtagtcccagttactccggaggctgaggcaggagaattgcttgcacccgggaggcaggggttgtggtgagccgagattgtgccactgcactctagcctgggcaatagagcgagactctgtctcaaaaaaaaaaaaaaaagcaattaacwtttgtatgttaaccatgtatcctgcaaccctgctgtactcacttgttgactctaggagtttttttctttttttcttactttttttttttaatcctttgggattttctacatagacggtcaggtcatctgcaaataaaaagttatctttattccttcccaatccgaatatcctttacttttctttcttctattattgtactagctaagacttctagtgcaatgttccataggagtggtgagagaggacatccttaccttgttcccagtcttaggggaaaagtgtctaatttctcactgttaagtatgatgttggttataggtattttgtagatgttctttatcaaattgaggaagtttctctccattcctagtttgctgagagttttcatcatgaatgggtgttgtacaaacaacattttaacaaaaataaaagaaaaagaaagcaatcctactgccttaataagtcgactggttttctgtattttcacatttttttctatttcaaataaatgaagtatactcaaaagagacatgtctaacagggagcgattatacaagtataattatatacccatagatagacataatattacatatttggtgattagaatgtaaatttaattttacagttccctttgtacttcattatatcatacgccatttttaatgttcctgcacagacttcaaaatcatagtttttggtgtctccaaattcaatttccataattcattaactaattcatttcaaagcatttattgcacatccartacacaccaggtcctgataatagagatttaaagaaggatatggctactctcgggtttctcacagtcatggaawcaaatgcctgataatatagtgtgtttaagttatctttatagaaatatgaacagagagttttgggagcttggaggatgaataggggaatctaattctmtggagaaattagaaaagtcttgttgaaggaagtgacatttgatgtaactcttgaaggacaggaaattttccagatgaagaaatagtaatatttacgaaggtttaaagttgtgcaagagcctagagtgtttcaggaacaatttaatracttagaaatttgagattaaataaggacaacactggatgaagattaaaagataaaccgggctagattgtgaaatgtgctaaatttcaaaataaggaattttgttttccatatggaatcaagagaaactattaagcagtggagtggcaggatctactttgtatttatcaggatacccatggagtggtgtggaaggtaaattctgcatgttgaggctgggcgcggtggctcacgcctgtaatcccagcactttgggaggctgaggcgggcggatcacgaggtcaggagatcgagtccagcctggctaacatggtgaaaccccgtctctactaaaagcacaaaaaaaattagccaggcatagtggcgcgtgcctgtaggcccagctacttgggaggctgaggcaggaaaattgcttgaacccaggaggcagaggttgcagggagctgagatcgtgctactgcactccagcctggcgacagagtgagactccatctcaaaaaaaaaaaattctgcatgttgagatactataatttactaaaccattcatctattttgggaacatttaacattgttactaattaattgctatttaagttatacaaaaatatatctatgcatttgactttatattattttgaaatttttcttgggacaaaattttgggagatacatatatcttattgaagtctttttgagataaatgttgatgtattttattagttttcttatgcattttgtgaaacttacatcttattctgtatatccctttctcaatacaatttgatatgcatccattaaacatttattgagtgctatttatcattgtggatgctgtggggaaaaccatgagtacaattcaaggggcttacaatctagttggagagataaggaatacactacaaaacattatggaggtctttgaatcctaagctgagaaataggaactttattctgcaggaaatgggaaaacatctaaaattttaattagggcagagatttagtccagccacaccttagagagaacactttggttgaaacaggtaggctagattagaagaagagacttcaaaggagtcttatgaaaatgttattagcagttaaagaaatgagatgttggattataggtcagagaaatgggaatgatcaatttaggattcctagattgaataattaagcaataaaaatgggagaaaaacaatcctaaaggtggacaaagccaacaaacaacaaacactctcctttgtggctatttaatgtttcataatactcaatatctcaatatctgttcatttctagaataaaaagggaggaggagatccaaattgattaaggtgattttccatagtcaaaacaatttttgaaaatctaaaaatttgaaarctcctcatttgtgaaatctcggtgacaggctgggtagattgcatcattgcattactttatgtgatcaccacaacaatgctataagatagttaataggaagtttttttttctttttctttttcttttttttgagacggagttttgctcttgttgcccaggctggagtgcaatggcgctatctctgtcaccgcaacctccgcctcccgggttcaagcgattctcctgcctcagccccccgactagctgggattacaggcatgcgccaccacgcccggctaattttgtatttttagtagagacagggtttctccatgttggtcaggctggtcttgaactcccgacctcagatgatctacccacctcagcctcccaaagtgctgggattacaggcatgagccaccacgcccggcctcaataggaagtttttgaggatgcaaagaagtttgttgtaggggaaagaacactgaattgaggattaatgtcatttaatgcagtgcatctcagtttgcatgagcatctgaattctgaatcacatgaagattttgctaagatgcaggttctgattcagtaggtctgaggtggggcctgagagtctgcatttctaacacaatctctcaagggaagccccagctgctagtctacagaccatactttggtagtaaggatctagagcagtggttctcaaatttcagttgtttttttgggcatttagcttgtctcatttttgtattatgaataatgctggtattaacatcctttaacataaatcttcctaagcgatgctgaatatttttttaaaaggctaggtaaattgcaaggagtttcatatacattttaacactgctctccagaaaacgctggagatgttatactctttccagtatatggaaactgttacactctttcctgtgtatcttcccattttgcctcattgttactcatttaaaagactattactcagtgttagtaactttctgttcacatgtttagaacttcagctgggatagaatagaataggtagaatttytggggactggccatatattttctgtcccagacattctcttcatgtggtgaggctggacttcctcaagctatggtgrtctcatggtagttggatttctcatatggctgctagcttctaccagagygagctttctgagacccaggcagaatccgcaaggctacttatgacttggtcttggaagccattcagtgtcatttcaactgtatgctgttggtcaaaagcaagtcataaarataactgagattcaaggggaagggactacataagggcacaaatactggaaggtgtgtgtgtgatttaattgacacttctttcagaaaactttttcagatgtctattggctattataaaacatgaagatgatcctcaagttgctatgaatactttctatttattgcaggaaaatcctgaagaaggaagggccagtatttacaaatcagtgatcatcaatacttctaaagagatgatgtgcttcagtgactatccaatcccagatcattatcccaacttcatgcataatgcccaggtcctggagtatttcaggatgtatgccaaagaatttgaccttctaaagtatattcgatttaaggtagaaaattgtgtgggtatctttgtgtttgaagttgtttgccaagtaaatgaataacgtggtttcagttaccwatgtttacttctaaagattggcttgatttgcacatgtatttatcctacccaggcaaaaactccattctttgtcctcctttgctcctcaaaaatattcaagggacagtctctctttcatatattttggctgcagatacaggaagccasctggcagagtgttttcattaccttcatttcacattatttgattgcaataaacagatgaagggaaatgttttccccattacagaagggaactgataggtatgggaactttaaaactctctggttccacaacttgtccattactgcttagcccttttgtactttctgaagtactttccaatatatttgtttacatgaacatcataaaaacccagtaaagtatagctcttgggtagttaactctggtgtagaggggagaacatggaattgcagaataaaaacctgaattctggtgcttgccctaccactaactaacttagatgttagacaagcaatttcctcaatttcaatttttaaaaattttcttgtttgtaaaacaagatgattgtaccagatcacttctgtggttccttcctgctctaaagtattctaggacttttctataatttctgatcacgaccataaaagaattttatggtcagatatttctgacagctggcaaaaagcccaaaccttctgccttctgatcatcctgctaagtcatgcctttttctgcttaatgacaataagaaaatgaaaacatctagtgaacttctaaagtaagtcatttacattccagtggtgcttctcttcatttatttaaacaatacttattgaacaagtttgctaccatactaagcattgaatatgcaaagacaaaaaagaaaaatcagtaactttatagtctagttaargggataaaaatgaagaaaaattttattataaatataattaataaaaatagagagttacatggggacaaatgctagagatctatacgttgcagctcggaggaaagatgttgaacccatcaggacatgaaatatcaggttccaggraagttttcttaaagaagataaagttttcttaaagctgagtcttgaaggatgagtaggagtctaccaaataaggaataaaagggtgatctcggcagaggcaccagcctgtgtaaaagaacatgatagaggaactataaatagtgctggattgctagtgcatgcaggggtggtttgtctctcttttttttttttgtttttttgttttttttcagacagagtcttgctctgttgcccaggctggagtacagtgacacgatctcggctcactgcaacctccacctcccaagttcaagcaattctcccgcctcagcctcccgagtagctgggattacaagcatgtgccaccacacccactaatttttgtatttgtagtagagacggggtttcgccatgttggccaggtgagttttgaactcctgacctcgggtgattcacctggctcagcctcccaaagtgctgggattacatgcgtgagccaccgcacccggccgggatggtgtctctattagtccatgaagacattatggtcatgggcccgtagaagcacatagtgtttccttaacctaagtagggtaacccatatttattattttttataaagctaaaaatcataacactatcctgtttcacagcctctttctttatagttctttgtaaaatgggtatttatgggagccaaagggagattcatttatataaaatgagagccactgaggtgtttttctaccctaccaggaaaaggagccctatagctcagtcacttatttaaaggtagccaggagaagagaacctagggtaagaagacatcagaaggtctcaggacatataggggtcaggagaagaataggcatttagtgcatggagtgtcataaaagcacaggagaagcccaggctttactcaggtgttacagtgccttaggacctggaccaagagacctrgtgacttgcacttttctagaagaggagggtacattagcctgccaacactatgttatttttttctgtcttgtggaaattttctcattctgactacagccccaaacagttcttatttgtggagtatgaaaatcaaatatccctgcatgggtcctattatgtgatagtgyctgtgatatcagccctttgtgtaacactrtgcaaggagagtcatgtcagggatgtcccctgtggttatcacttttcttttcagaccactgtgtgcagtgtgaagaagcagcctgattttgccacttcaggccaatgggaagtggtcactgaatctgaagggaaaaaggagatgaatgtctttgatggagtcatggtttgcactggccatcacaccaatgctcatctacctctggaaagcttccctggtgagcagcttaccaggaaggaagacccttgacccatgcctgtgacctgacccctgaggaatgggaggattgtggtctgagtaattcctactttggaatgaagtaagacttatcctaattattcttgttccccagaaggatgttggggtaacttgtattactgccatttttgtaattttggagattagagcaaaatttgcagtctatttagttttacaatgactttagtcattgtatcaaatgactggagtatcaaagggaagaatgtggagttcttgaggagcattaggtagaataaggaatttttcagcagtaaacacaaatattgagtttctaaggaaggaatgaaagcttgaagaatttcagtctttggcctggattttcattttaaaaaaaaaagcactctatactctaaagtatataagaatatatgtgctgtaagtgaaatgcgagtaggtatttaaggggatgaaaagataaaagagaatggaggttttctgaggcagtttatatttatatctctaaatccaaaatacaaacacatcctgagttaagcaaagtacatatgacaaggaaatcacaaggtactactctgaggctatgggaaaagaaaataggcaaaaatactgagaaaggcaagaaagtagctgagtaaagagaacacttggagaatatatgcttaaacttaagtctgcaaaaaaaacaaatgacttgacaaatgatatctatcatgtaaaccattacycaataattattttcccttctcttgcaggaattgagragttcaaagggcagtacttccacagtcgagactataagaacccagagggattcactggaaagagagtcattataattggcattgggaattctggaggggatctggctgtagagattagccaaacagccaagcaggtttgaatcactcaattattatttacgttgcttaactctagcttcagtttctccaaggaagctgcaggtggacccaacagagaatagggatacctgcacatagcccttcagtgccagtggcaaatatagggcttcgtttcattacctcagttggcaacatggtgattggtgctaatagaggagttaaggctaccagttagagttccattgtgcaactagcctcacaccaaggaactggatcagctaaagtctgggctcattatcctaatcaggcatcttctcagagtgtgcctctggctttgataaagacaaagtaattgctgggagaggttgttagaaagcagtattgagagcgaggatcttcaattggccagcagaagtgctatgttcttacataaaggaaagcacgcgtgatcattggaaacttttcactcataggatggtgcttgaattttcctttacactccccaaatggaaaaaagtatcaattttatcttcccaaagacaatgtgggtatccgtatagcgtccaaactgtagcacatgcaagcagcttgccctggcctttgcatacagttaggtaactcagataacattcattctaaagcaattatatctccttggctttttgttttgtttgttktggtttttgtatagcagactttgaactgagaagcaagtgtcttcactataaattcctggaaaaagacatgccaatattgtattttgttattaatgtctgtgttgaatcaaactctattggcaataggtaaatgtcttggttgttctttagtaactttaattaagccatgcttctctataaagatgktttaaattgttttattttaattagaagcttagtgctacaattctgttaaatgactcttactcagcaactttgtttgaaaaacacttcttctcattgctatcctcatctataaccacaaaaattatttcatatgatacttcataaattaattcaacagacatttatcaggaaataatcatataaacaaggattaaaaataattaaaataattatataaacaagggttaaaacgtatgtgggtgttatggtagaggaatgtgcaaaatgtggagtggggacccatggcgagagccatctttaatatcattggcttgtcaaatgggcagttctaagggagcttggccttacctgctctggggaattgcaggttgccacataacaaagcatttctgtgtgggtacagataaggtggctgtgtctgtgagaaagcctgggaaaatgcaaaggaaaactatgtctgcatagcagaggcaatactgtcacaccactaatccaagctgaagaaactcaattgctgagttctaactttttactttacttgtaaattgtattcatgatgatttgtttataaatcaaaaactttaaatggacctatatatttcagtatatcatggaagtttttcgtataattcttgtagatgcttttgtaaagagaaaacattcctttttttcaatattaatttcatataagattacactgattaaacaattttccttataaatctgatttgtaaatgttatttgcttaaaacaaggtatagatggaaaactgaaataagaaatatgacagccattaagcacttatcaagtgtttactatataccacaccttttacaaaaacactgcttaattatcacaacagccttgtgatatatgtattattattattactatttcataaataggaaatcttttcattagggctctgagcgttttcattactcagcagaagttatatagccagcacacaaaattgttcagtttctaagaccatatatgctctttcaactgtgactgtggaagtacataattatcagagtgcttacagtcactttaggcgagataagatttgtgaagtaaacaattatccctctgtagacaggtcattttagacaaaaagactatgaagcaatgtgcgtatataacttaaaatctggaagccatctccagagagtttcatartgtaggaaaagtgattcttttgccaggtaactgcatatcaaatctttatcagttctgaacatgaactttagccagaggaggacacagaaagactgactagcttcctgttgttccactagcaatcttatttttctccattaaataatcaatcaaacatttcttaagcacaggctttggagttagtcagacctgggttggaaattcacctctgccacttactagctctgtgatctcaggcaagttattcatcctttccatgcccctcatctataacatgggtgtaataatactttcctcaagaggttgttgtaatatagatgaaggacctagcacaatgacttaaaggtcacaaatcccaataaatggaagtgatgataatctgctgtggatgtgtaggctttatctcctatccttgagaaaacacatttgaagaracagaaattaggagtgtagaaagtttaatatcaataaaaatgataaatagcaggggtttttgtaataatgccaacaatgtcaatggcaaaagaatgagggttttagattaaatggtctccagctgctttcaactttaccagtacatgatttttaatgagttctacaggtgataagtgctagagaaattcagaggatggagagaaaattgtcagcctgaatagtcagcggtttcttcatggaggaggcagtcttgatctgggtcttaaaaatgaacaggcttcgcagagttaagaggaaagaaggcatttcaggcaggcataatagcactaaacagaaatacaacggtgtattagagcaaaacatattcttggacagtagatacaccaatttaattctaagtttagtgtttgggaaggaaaatggcaggaaacaaacataaaaacccacaaagattgtgcaggggctaaaaagccagactaatgagtttgaactctttttttttttttttttttttttgagacggagtctcactctgttgcccaggctggagtgcagtggtgcgatcttggctcactgcaagctccgcctcccaggttgacgccattctcctgcctcagcctcccgagtagctgggactacaggcacctgcaaccacgcctggctaattttttgtatttttagtagagacggggtttttcagtagagacggggtttcactgtgttagccaggatggtctcgatctcctgacctcgtgatcygcccgccttggcctcccaaagtgctgggattacaggcgtgagccaccgcgccgggcctgaaatgattcttgaagaaaatgggggtgcttttgaaggtttacgaatctgagtgacaaaagcaaacaatttyttccatgccccaggttttcctcagcaccaggagaggggcttggatcctgaatcgtgtaggggactacggatatcctgctgatgtgttgttctcttctcgacttacacattttatatggaagatctgtggccaatcattagcaaacaaatatttggaaaaaaagataaaccaaaggtttgaccatgaaatgtttggcctgaagcctaaacacaggtatgttcccaggatgggagtgcagggatagtggccaaagcacaagaataaggactcttcacactggctaatagtaaagccacctctacccatacattaagaaaacccacagtggctgggcatggtggctcacgcctgtaatcccagcactytgggaggcggaggcgggtggatcacctgagctcaggagtttgagaccatcctggccaacacggtgaaaccccatctctactaaaaacacaaaattagccaggtgtggtggcacctgtctgtagtcccagctattcaggaggctgaggcaggagaatcacctgagccctggaggcagaggttgcagtgagctgagattgcaccactgcactccagcctgggcaacagactctgtctcaaaaagaaaaaaaaaaaaaaaagaaaagaaaaagaaaagaaagcctatagactcatagaatctgaaatcagatttctaacttgtacccacagatgtccaagatctattggtctgtgggtttttaatctagaattctctttggcagtaacccttttctcattcccccaggtatcagttctttttgcatgatacccaacaacaaaatgatagctgaggacagtgcgtcatttactcattgagtacctgttatgagccaggcatcatacatgggcatgaaatacagagagaagacataatagtaatagtaatagaaataacactcacctttctgaggactttctataagataagcacagtgctaaatgagttacatgcagtatctcacttaatcctgacaatagccctataagttggtactatttttgtttcacagtgaggaggtctatgcaaacctaccccaaaggctgaggaagctgagaggctgaagaaagaagctgacagattcagtttcttagaaacatttcatagggacttatgaacagaagccatgtctgtctcaggcagtggtgagacaagatggtagatccccataccattayctcctgacccagggatgatataccacaggggaggggcacacatacttcagagcgaatgggtaggagtttgccctaagggtgggatttacagtaagtacatactattaaacaacagattaactggaaatctcagaggtattcccgraaccagggttgatcagaagtcaatatggtagattaacttctaagatggagttgctttggcctccacaatttttgatctacattttacaaatataaaaactgagatgtagagaaactaagtaattttcccgagggcaacagaaataataaatggcagactcaaaaaatagatcttaccttaaatactctaatgagaagaaagaggacagattataatgaagaaatacatacagtgttatgaaagtacaaaggatggggtcctcagagaaccagggagggaaaacatttctagaggctgattttaaatttattttccctccaactttttatttttgaaaatgttcagatctrcagaaaagttgcaaaataataagtacaatgagcacccatatatccttcacctggattcacctgttaagtttgctatatttgcttcctttccccatctctgtagataggtccatacatatagagcatacatacacaagtacatttttttctgaaaccatttgagtacgttgcagtcattaagacactttaaatacttcagtgtatattgtataagaaaaagggcattctcctacataaccatcatataattatcacacgtgggaaatttaacattgataaaatacattaatacattggcaatatccycagttgcccyaatagtattttttatagctttaaaaaaatctttttaaatctagtatcctgtcaggtaatcaatcacaccattacatttagttgtcatgtctctttaatctctctttttatatatatatatttttattatactttaagttctagggtacatgtgcacaacgtgcaggtttgttatatatgtatatatgtgccatgttggtgtgctgcacccattaacttgtcatttacatcagatatatctcctaatgctatgcttccccactcttcccaccccacaacaggccctggtgtgtgatgttccccttcctgtgtccaagtgttctcattgttcagttcccacctatgagtgagaacatgcagtgtttggttttttgtccttgcgatagtttgctgagaatgatggtttctagcttcatccatgtctctacaaaggacatgaactcatcattttttatggctgcatagtattccatggtgtatatgtgccacattttcttaatccagtctatcattgttggacatttgggttggttccaagtccttgctattgtgaatagtgccgcaataaacatacgtgtgcatgtgtctttatagcatcatgatttataatcctttgggtatatacccagtaatgggatggttgggtcaaatggtatttctagttctttttgaggaatcgccacactgtcttccacaatggttgaactagtttacagtcccaccaacagtgtaaaagtgttcctatttctccacatcctctccagcacctgttgtttcctgactttttaatgatcgccattctaactggtgtgagatggtaactcattgtggttttgatttgcatttctctgatggccagtgatgatgagcattttttcatgtgtctgttggctgcataaatgtcttcttttgagaagtgtctgttcatatccttcacccactttttgatggggttgtttgtttttttcttgtaaatttgtatgagttctttgtagattctggatattagccctttgtcagatgagtagattgcaaaaattttctcccattttataggttgcctgttcactttgatggtagtttcttttgctgtgcagaagctctttagtttaattagatcccatttgtcaattttggcttttgttgccatggcttttggtgttttagacatgaagtccttgcccatgcctatgtcctgaatggtattgcctaggttttcttctagggtttttatggttttaggtctaacatttaagtctttaatccattttgaattaatttttgtataaggtgtaaggaagggatcaagtttcagctttgtacatacggctagccagttttcccagcaccatttgttaaatagggaatcctttccccatttcttgtttttgtcaggtttgtcaaagatcaaatagttgtagatatgtggtattatttctgagggctctgttctgttccattggtctatataagaaataattctctctttgacatgggctttctttttaagaacccaaggcattgttttgtagagagtctctaaatttagacttgcataatttttttcctttattatattcaggttaaatgtttttgacacatatactacataggacatgttgatcttagtgggtcacatcaagaaccacattatgtcagtttatctcacagtaataatgctaaatttgaccacttagataaggtggtatagataccatcaagtttctccactataaagatattttttcccgttgaagttaatcagtggggtgacatttggagactgtgtttcctaaaaacctttcacctaattattttagcatgcatgtttttggtggttgcaaaataaattgaggctttgttgaataataggagatagccaaacaaatagagcaagggtatagcattctaattataaagacaaagtcttggaacagcaaaaaatacattatgctccaggacttgcatgtagtctggtatggctggactatatagcaaagatggaagagtgactgaatgtatctccaggttcatcaggcatgaaaacctttggttcctccgcggtcttctgagcggtcacgtgaacggcttcctgcaggctggccatggcgcttcaagttcccaaggctccgggcttcgcccagatgctcaaggagggagcgaaacacttttcagaattagaagaggctgtgtatagaaacatacaagcttgcaaggagcttgcccaaaccactcgtacagcatatggacgaaawggaatgaaaaaaatggttatcaactacttggagaagttgtttgtgacaaatgatgcagcgactattttaagagaactagaagtacagcatcctgctgcaaaaatgactgtaatggcttctcatatgcaagagcaagaagttggagatggcacaaacattgttctggtatttgctggagctctcctggaattagctgaagaacttctgaggattggcctgtcagtttcagaggtcatagaaggttatgaaatagcttgcagaaaagctcatgagattcttcctaatttggtacgttgttctgcaaaaaaccttcgagatgttgatgaagtctcatctctacttcgtacctctgtaatgtgtaaacaatatggtaatgaagtatttctggccaagcttattgttcaggcatgcgtatctatttttcctgattctggccatttcaaagttgataacatcagagtttgtaaaattctgggctgtggtatcacttcctcttcagtattgcatggcatggtttttaagaaggaaacagaaggtgatgtacatctgtcaaagatgcaaaaatagcagtgtactcttgtccttttgatggcatgataacagaaactaagggaacagtgttgataaagactgatgaagaattgatgaatttaagtaagggagaagaaaatctcatggatgcataagtcaaagctattgctgatactggtgcaaatgttgtagtaacaggtggcaaagtggcagacatggctcttcattatgcaaacaaatataatatgatgttagtgaagctaaactcaaaatgggatgtcygaagactctgtaaaacagttggtgctacagctcttcctagattgacacctcctgtccttgaagaaatgggacactgagacagtgtttacctctcagaagttggagatactcaggtggtggtttttaagcatgaaaaggaagatggcatcatttctaccatagtacttcggggctctacagacaatctgatggatgacatagaaagggcagtagatgatggtgttaatactttcaaagttcttacaagggataaacgtcttgtacccagaggtggagcaacagaaattgaattagccaaacagatcacatcatatggagagacatgtcctggacttgaacagtacgctattaagaagtttgctgaggcgtttgaagctattccccgtgcactggcagaaatactctggagaaaactctggagttaaggccaatgaagtaatctctaaactttatgcagtacctcaagaaggaaataaaaatgttggattagatactgaggctgtagtccctgctgtaacggacatgttggaagctggtgttctagatacttacctgggaaaacactggtctatcaaactcgctgctaatgctgcagtcactgtacttagagtgggtcaggtaatcatggcaaaaccagatggtgggcccaagcctccaagtgggaagaaagactgggatgatgaccaaaatgattgaaattggcttaatttttactgtaggtgaaggctgtatttgtagtagtattctaagaatcgcgtgatgttttcttattctccttacattaagaggtattttgtgtttgtattcttggctggatgttataataaacatattgttactgtcaaaaaaaaaaaaaaaggaaacctttggtctactaaataaaaagtatggaatgaagacagtccaaagccattcaaagatttaggcaagtgagtaacataatcatacctacattttagaaagaccattttgaaaatggtgtgggagtgggatgagacaggaggtcctaaagacaattgtatcatctggttgagataacaaggagtagataaaactatcttggggatgttaagaggagaaagggaaaaggcttggtgaccagatatataactcatggttttgtgggttgggcaactatatggatggatggtggtactgctggtgaaaaggagtaggtttggagaaaaagatgaaatcatgaggttggaatgcagaacacaatcgacctagtgtcaaagcataactaaatgcaacaaaccagtagtggtaatttaaacatataaaattcctgaggccaggacagctctgtctgaagatgagttaatatagtattcaggcattaagactactttttaggccaggtgctgtggctcacgcctgtaatcccagcactttgggaggctgaagtgggaggatcacgaggtcaggagttcgagaccagcttggccaacatggtgaaaccctgtctctactaaaaatacaaaaattagccaggcatggtggcaggtgcctgtagtccaagctactcgggaggctgagacagcagaatcacttgaacctgggaggtggaggttgcagtgagccaagatcatgccactgcactccagcttcggcaaaagagtgagactctgtctcaaaaaaaaaaaaaaaaaaaaaaagmctgctttttagaaagctccacgatactagaaaccagccttattattattaaaagtaatggcaaaaaaataagcaattacttttgcaccaacccaatgtttccagtatccgtatcctacgctgtccctaggaaacaataacaagcccgaagtataccaagataattcactgaaaacaactttgagataaattctaaaatcctaggctgtgtatcattggacaagtcacataacttttctaggcctcaattccctcatttataaaacctggataatgacacctattctgcttccttcatagagttttgtgagagtcaagttaatgcatgtaaaagcaacttataaactgtaaattgctacatacatgtaatttatcatacagtttggaaaacagtggcctaaacttagctcttgagcctttgaaactggaaatgagactgaacagaatgttgacagcttagttctgtcagacttcttggtatgagaatacaaactattgacctgtggccttatcatatcacacacagaatattattgttacttgagaaatcatatatgcactcctcaaacaacactcttccttcactcctccaacactctccctttcagtgcatccagggtccaacttcagatctgatcttgatctgtgccaacctagtataaattagaccttttccaaacttcatgcatagaccaaggggaagattattggcatyctgtttacctccaccaaagcaaaattttacttatgtgrtactgatttctctttctctcatttctccacttgatctttgtcacgactcacagagctctgagtcagcatccaaccttaaatgatgacctgccaaatcgtatcatttctggcttggtgaaagtgaaaggaaatgtgaaggaattcacggagacagctgccatatttgaggatggctccagggaggatgacattgatgctgttatctttgccacaggctatagctttgactttccrtttctggaagattccgtcaaagtggtcaaaaacaagatayccctgtataaaaaggtcttccctcctaacctggaaaggccaactcttgcaatcataggcttgattcagcccttaggagccattatgcccatttcagagctccaaggacgctgggccactcaggtatttaaaggtaagtgaccatgcaaatagactacttaattacttggtgatatgtttacctctgtttaggtacttgtttttaaatagctagagatagcatgtatgattacaacagtgcctagcacaaagttagtacagaaaaatatatttttgagtgaatctaaagtagcaatttataaccatggacatacatcatacctgggaaatttttccaagctatgcatgctttgacaccatccttgctgatgcttatttagttagtctggggtggggcagtcataacatctttgagaaaaatattccccagtaattccaatgtgtactccaaattagaatttactcatctagattttaggcaactggcatatrtttctgaagtaaaatagttttatcttctttcattatagataaaaataaaatatagaaatagtatgactttatttcggccgaaaattaagacctggttgcagactagtcaatattgtaggatattcaatcccccaaattctcacttttctccttttatgtcccctctttcagttttggctaggaatatatgaaaaaaaaaaggggaataggtttcatatgagtcagtagaatgatatagcttccaaagaaataattaaatctagcatcattaaaaaactataatgttctagaacattacaactgttgttctctaaactggccagaccacacctaatgatacattttaaaagtgaagctggagtgcgtttaataaggagagagagaaaaattttttaagggatttgaaaacatgccatctgaagtacaaytgaaaaagccggagagagatttagcctggagaagataaacttcaggagagatatgagaatttccttcaaatatctgaagggaaggcacatggaagaaggattagatttactcagtatagcttcaaagggtcaaaccagaatcaaggagtgaaatcttgagggttacacatcagcttaccattaagaaaaaaatccaaaacctttttcctatcagccaatgccatttcatgatggaaccagctgcctctgaaattctaagcagaaaaggaaaaggatgccaaatgactgaatgctcactgggccggggcaggagagggggaaggtatggagtagattcaagcctcaggatagagagaaacaagatgatgtttaagggtccttctaaagaagaaattcactgattctatggttgttataacaaaatttgctattgttactagcatttaattaaaactactcagagttcctgttggaattacaccttttttgttttcactagtgaaaatcttcacagttgcagagaaaaaaagaaccaatggtattacagttgatagttcaacaacctttctaaatttccccaaatttctattacttccagtcctatccagcagattatgtactacctgagagaactatacaagtagtcaaacgcaaatagcccattaagttggcctaattctagtcatattaaagtgatcttttaattgggtcaattacataagcggagaacagttcattaaaacaggccacagcatcttagtatactttaagcaactgggactcttttccaagaccaagtgaattcttgagaggaaatagagaaaatgagtatttgcaagagtctgcattatggttatgagattatgggatcttagggaaaatgtacaaaaagcccagcttcctatgctagcagaagcctagtgctaattcctccagcttttttctaacacctggaaggaagaaatcttcagaattctctaactttaccagacttccaacaggaactctgggttttttattctgtccatggccaatctgtctgcctcccacattcttgcctttctcttccctgaattatcccttcactatgccaattttaaaccctttggattagcttgtttttcccatttttttcatgtctgcccaacaaagcctgcctccttccttgtctgttccctaccaagccccattttccttcttcttctgttctctggaattattgttctcttgtcaagaaaatattctactcttttctagaacactgaatttacttccttgccttgactgaaatgaaacatagtttctgttttgattgcgtcttttgcagcccttgcaagtgttttattttcactcagcaactttctttccttcaaaactatatcaagttacaccaaatctctggatcacaagaagtcattatgtcataggctggcattaaagttcctccacaaattggatacaacctccaatttcaggcccatctttctttcytttttttttttttttttttttttgagatgcagtctcgctctgtcgcccaggctggagtgcagtggcgctatctcggcccactgcaagttccaccttctgggttcaggccattctactgcctcagcctccccagtagctgggactacaggcgcccgccaccatgcccggctagtttttttgtgtttttaatacagacggggtttcaccatgttagccaggatggtctccatctcttgacctcgtgatccgcctgcctcagcctcccaaagtgctgggattacaggcatgagtcactgtacccggcctcaggcccatctttcactagtctttaccatacttcctacaatactctagatgcactggatgacgtacccactaagcagcaaacacagcaggtacccttgtaccctgtgcttttgcttccactgtgctttcttcttgatatgccctccttttactttttatttctataggaaaagtctatgcatatttcttccctccctttgtaatatagtgatagctccttaagtaaaggactcatgtttatttgcctttgtattgcaagcctagaccactgcctagcacataagaggtatctaataaacatctattctaagaaatgtcagtttagccttgaggtaaattaaattctaaattctgatgtagaaacttcttatttgaggatctcagcttatgggctaccttagccaatttccagttatgttaaaagcctgaactggactgaaattgcagaatgggagccagatctcttttctctcataacattagctatacactgaaatatgcaggagcaagtcaggattacacagatacaacctgctttaggctgacagcagactgaaggcctaccaccacagaactctaattcagactstcttccttcccaccttgtcttggaacccttggaagatctctgaacttcagttcctcactgttcttcaacattcttcagataacatatactgaccttttagtatgtaccaggccttctgctaggggctggagaagcaaatatgaccatacagaaaatccctatctttctggaatgcagagccaagcaaggaagactgtgttagcccattctcatgctgctataaagaactgcctgaggctgagtagtttctaaaggaaagaggtttaattcactcacagttctgcatggctggggaggcctcaggaaacttacaatcatggcagaaggaacttcttcacagggtggcaggagagagaatgagtgctgagtgaaagggaaagccccgtataaaaccatcagatctcgtgagaactcactcagtatcatgagaacagcatgagcagtatgagagtaaccaccccatgattaaatcacctcccaccaggcccctcccatgacacatggggattgtgggacccaaaattcaagataagatttgggtggggacacagccaaaccatatcaaagacagacaagtaaacagaygcttaatgatttgttcattcagcagatatttaactatatcctaaacaagtgctccagtagcaatgcagaagagctgccrtgagagcagtgggcaataagtacccaattctccctacaactacataggaatttactaaaaggacaaggaaatattgaccatagaggggaaataatcactactgtttatgcaaagttagatgaaagtgacagaacaaatagagttctgggaactgcaagtagttcagaatgctggtaaagtgttataggaatgaaggaaaatgaaactagaaatattcacaggcaatatcaagagtttgcatttaaggtacaagttggagaaccactgaaggattttaactggaagaggagtcaaatcagatctccagtttagaagatatgttagagaggagtgaaatgggaaataggtcagtacgagcctgtggtaaaagtctmagtaagacagcatgagagctttaaaccaaggtaatgacactctaaaggaattggaggagccagacttaaatgaaatttcacaggcaaatctgaagaatttggtgacagaaagcatgttggagaagagagacagaaaagaatctgttcaggtgttgaggccattcattggaattgggaaactaagacagggagcaaagacatggagggagataagaaatatggtaaagctaatgtgtctaaataaggaaacactgcaaaaacaaaatttatgaattaagacataactgtaccacagagtatacacgtaaaaagatgtatacatctttttaaaattttttaatttttttaaattttttcaccccatgagctctagactaagatgtatatacctctttatctatctatatatagacagatagggtaatagatagggttttttgttgtttttttctttcttttatgaattgggtgtctcccacaatcaagaaatatacctcctccttcatgtttctagctaatagaagtaaaacttgtggttgtgtagaagtaatttggaaattgactctcaaaacgcttattttgagtatccgaagagacctatgattaagcttaaatgaagcatttcagtgtttcctaattgatttatgacgataaataataattcccatggctaaaatgtaaaaacacatggaaaacaacagaaggctatttgagagtgatgaacttctgagttccatattttaagagggatacaccaggatagttattagagtatgcttagtgaagggcaaccaagatggcagagaatgtgaaaaccattatatgggaaacatgtactgtttagcctgataatgagaagacttaaaggagttatgacaatcatttccaaatgtttcaagagctgtcatgtattaacattaaactctgtggctccagaaagcagagcttggtccagtggtgcaaatgcaaagagtcagatcttggggtcaataaaaacaataatgttccagcagccagagcagtcaaataattatataatcacctcagatataattattatagatacccatcaccagtgatgtttaaagaggaatgagataaccactaggttagagtacttgtagaaagaatgcttgtatcaggtaaaatatattgccattctgaaattccatattccacaattttatggagtgacaccttaggactggatgtggccaaaatcttctacatggcatagtccctagttataggggcatacaactaattgtttaagcttagcattgttcatactggcttaaatactattaagccttagtctagccctgtccttggtgtataattcctacaactggaactgtttgtgcatcttacttaaatttatcagttaatattaggtattatgagttccccttggccttaacccctactcttatcaaagaaacatgtttagaaaatgaagcttatcttccacaggactttaggcataaaatgtgattaagatttattttggctgggcrtggtggctcatgcctgtaatcccagcaccttgggatgcagagacgggtggatcatctgaggtcaggagttcgagaccagcctgaccaatatggtgaaacctcgtctctactaaaactacaaaaaaaaattatttgggtttggtaggatatcagtgatggaagatgaaaggaatgaaatgaagtgagaagggaagtttagagaaaaaagaataaaaagaaacgaacaaagcatccaaggaatatgggactatgtgaaaagaccaaatctacgtcggattggtgaacctgaaagtgacggggagaatggaaccaagttggaaaacactctgcaggatattatccaggagaacttccccaatctagcaaggcaggccaacattcagattcaggaaatacagagaacgccacaaagatactcctcaagaagagcaactccaagacacataattgtcagattcaccaaagttgaaatgaaggaaaaaatgttaagggcagcsagagagaaaggtcgggttacccacaaagggaagcccatcagactaacagcagatctctcggcagtaactctacaagccagaagagagtgggggccaatattcaacattcttaaagaaaagaattttcaacccagaatttcatatccagccaaactaagcttcataagtgaaggagacataaaatactttacagacaagcaaatgctgagagattttgtgaccaccaggcctgctctaaaagagctcctgaaggaagcactaaacatggaaaggaacaaccggtaccagccactgcaaaaacatgccaaaatgtaaagactgtcaaggctaggaagaaactgcatcaactaacaagcaaaataaccagctaacatcataatcacagaaccaaattcacacataacaatattaactttaaatgtaaatgggctaaatgctccaattaaaatacacagactggcaaattggataaagagtcaagacccaacagtgtgctgtattcaggaaacccatctcatgtgcagagacacacataggctcaaaataaagggatggaggaagatctaccaagcaaatcgaaaacaaaaaaaggcaggggttgcaatcctagtctctgataaaacagactttaaaccagcaaagatctaaagagacaaagaaggccattaaataatggtaaagggatcaattcaacaagaagacctaactatcctaaatatatatgcacccaatgcaggagcacccagattcataaagcaagtccttagtgacctacaaagagacttagactcccacgcaataataatgggagactttaacaccccactgtcaacattagacagatcaacgagacagaaggttaacaaggatacccaggaattgaactcagctctgcaccaagcagacctaatagacatctacagaactctccaccccaaatcaacggaatatacatttttttcagcaccacaccacacctattgcaaaattgatcacatagttggaagtaaagcactcctcagcaaatgtaaaagaacagaaattataacaaactgtctctcagaccacagtgcaatgaaactagaactcaggactaaaaaactcactcaaaaccactcaactacatggaaactgaacaacctgctcctgaatgactactgggtacataacgaaacgaaagcagaaataaagatgttctttgaaaccaatgggaacaaagacacaacataccagaatctctggaacacatttaaagcagtgtgtagagggaaatttatagcactaaatgcccacaagagaaagcaggaaagatccaaaattgacaccctaacatcacaattaaaagaactagaaaagcaagagcaaacacattcaaaagctagaagaaggcaagaaataactaaaatcagagcagaactgaaggaaattaagtcacaaaaaacccttcaaaaaattaatgaatccaggagctggttttttgaaaggatcaacaaaattgataaactgctagcaagactaataaagaagaaaagagaagaatcaaatagatgcagtaaaaatgataaaggggatatcaccaccgatcccacagaaatacaaactaccatcagagaatactataaacacctctacacaaataaactagaaaatctagaagaaacggataaattcctcaacacatacaccctcccaagactaaaccaggaagaagctgaatctctgaatagaccaataacaggctctgaaattgtggcaataatcaatagcttaccaaccaaaaagagtccaggaccagatggattcacagccgaattctaccagaggtacaaagaggagctggtaccattccttctgaaactattccaatcaatagaaaaagaaggaatcttccctaactcattttatgaggccagcatcatcctgataccaaagcctggcagagacacaacaaaaaagaattttagaccaatatccttgatgaacattgatgcaaaaatcctcaataaaatactggcaaactgaatccagcagctcatcaaaaagcttatctgccatgatcaagtgggcttcatccctgggatgcaaggctggttcaacatacacaaatcaataaatgtaatccagcatataaacagaaccaatgacaaaaaccacatgattatctcaatagatgcagaaaaggcctttgacagaattcaacaacacttcatgctaaaaactctcaataaattaggtatcgatgggatgtatctgaaaataataagagctacctatgacaaacccacagccaatatcatactgaatgggcaaaaactggaagcattccctttgaaaactggcacaagatagggatgccctctctcaccactcctattcaacagagtgttggatattctggccagggcaattaggcaggagaaggaaataaagggtattcgattagraaaagaggaagtcaaattgtccctgtttgcagacgacatgattgtatatctagaaaaccccattgtctcagcccaaaatctccttaagctgatgagcaacttcagcaaagtctcaggatacaaaatcaatgtacaaaaatcacaagcagtcttatacaccaacaacagacaaacagagagccaaatcatgagtgaactcccattcacaattgcttcaaagagaataaaatacctaggaatccaacttacaagggatgtgaaggacctcttcaaggagaaatacaaaccactgctcaatgaaataaaagaggatacaaagaaatggaagaacattccatgctcatgggtaggaagaatcaatatcgtgaaaatggccatactgcccaaggtaatttatagattaaatgccatccgcatcaagtgaccaatgactttcttcacagaattggaaaaaactattttaaagttcatatggaaccaaaaaagagcccgcatcaccaagtcaatcctaagccaaaagaacaaagctggaggcatcacgctacctgacttcaaactatactacaaggctacagtaaccaaaacagcatggtactggtaccaaaagggagatatagatcaatggaacaggacagagccctcagaaataatgccgcatgtctacaaccatctgatctttgacaaacctgacaaaaacaagaaatggggaaaggattccctatttaataaatggtgctgggaaaactggctagccatatgtagaaagctgaaactggatcccttccttacaccttatacaaaaatcaattcaagatggactaaagaaactaccatcagagtgaacaggcaaccaagaaaatgggaaaaaattttcacaacctactcatctgacaaagggctaatatccagaatctacaatgaactcaaacaagtttataagaaaaaaacaaacaaccccatcaaaaagtgggcaaaggatatgaacagacacttctcaaaagaagacatttatgcagccaaaaaatacatgaaaaaattctcatcatcgctggccatcagagaaatgcaaatcaaaaccacaatgggataccatctcacaccagttagaatggcgatcattaaaaagtcaggaaacaacaggtgctggagaggatgtggagaaataggaacacttttacactgttggtgggactgtaaactagttcaaccattgtggaagtcactgtggcgattcctcaggaatctagaactggaagtaccatttgacccaaccatcccattactgggtatatacccaaaggattataaatcatgctgctataaagacacatgcacacgtatgtttattgcggcactattcacaatagcaaagtcttggaaccaagccaaatgtccaacaacgatagactggattaagaaaatgtggcacatatacaccatggaatattatgcagccataaaaaatgaagagttcatgtcctttgtagggacatggattaaactggaaaccatcattctcagcaaactatcacaaggagaaaaaaccaaacaccgcatgttctcactcataggtgggaattgaacaatcagaacagatggacacaggaaggggaacatcacactccagggactgttgtggggtgggggtagtggggagggatagcattacgagatatacctaatgctaaatgacgagttaatgggtgctgcacaccagcatggcacatgtatacgtatgtaacaaacctgcacattgtgcacatgtaccctaaaacttaaggtataataataaaaacaaaaaatttatttttacttcattctctttctgttgatataaggtccctttgttatcaagaatacaggtgcagctgtgttttcccactcccctgccctttaactttgtaactaattttccatatacctttaagtccattttctcatgtccatatttcatttcccaactgaaagactacattagggaggaggcaggtattggttggaagtcagagtaggggaaatcccttccaaagacaaagaagaatargtagagtaagctgcagatgttaatattatattgtggtggtggtaaggtgatcaagtgaattgtaacctccttgagtacaggaaacttaccctgtatttctttgaattctccatagcatagtaattgtttataggattattgttccttctgaggtaattttacarttaaaatgttaatttttgtttttaggtctaaagacattgccctcacagagtgaaatgatggcagaaatatctaaagctcaagaggaaattgacaaaaggtaagaaactctcccaggaagatatatggttacatttctacttatttcttaataaaagaaatattgtactgtatttaactgcctsatgttagcttaaggatttagattctattatgaagaaaaaaggaaaaataatttgtgacaatagaatggagaaatagcactagtagtctaaatatgggtaagaaaagagagaaaagttttaggtgtctaaaatcatatgtttaatgcctaaaaaaagtcacataggaaaatgcatatggaaataaaatcagaaggcagaaggtatattatttttgtgaggattacttgaagtgctagtagacttgccagaggaaggaagagtgacagtaaatgaatgagaggtagctatgggtgaattacaaatctgtaggtagatttacaagtctgcagtggccgctttgctggcaatgctcatgtgacagcacactcaagtcacagtggctcatggtatgaatagtcactgtgagttgggaacatggtaacagccagctgcttagtgttttgatkaacacaatcatttagcagtctgaatttcagaacttaagctcaatcgctgggtgttttttatttggacaaagtggaaattgatggtaagtctctaaatttctgtggaaaactgagagacacaatcattccaggcctaaagaggtggttatcttcaactgatgatacttgcataactttcctttgtgtgggaggaggagaaagtaagtttttatttaattccgttacaacttccaggtgctctcctattttcctccttcctttcactgccaaacctctgcactaaattttctaaattctcaccttttgctgcctccctaagccttctgcattgttaacttccatccttactccttaaactgcctttttttttttttagacggagtctcactctgtcactcaggctggagtcagtggcacgatcttcgctcactgcaacctctgcctcctgggttcaagcgattctcctgcctcagcctcctgagtagctaggactacaggtgcacaccaccaaacccagctcatttttgtatttttagtagagatgggatttctccatgttggccaggctggtctcaaactcctgaccttgtgatctgcccgcctcagcctcccaaagtgctgggattacaggcatgagccaccgtacctggccggaaactgctctcttaaaggtcacctgtgaccaacttcattttccttcttctcactactgagtttggtgcttttaaacatttcttccttcttgcagtgctttcttttctggctctaaagtatcttaytttaactttcctcctctctttcctttgacttatttttgtctaaccacctcctgaacctgagtagtcagtaacccaaggatataatgtaaccttttttttttttaacttctgaaatagtaaatatttatttatttatttattttatatttaagttctagggtacatgtgtacaacgtgcaggttttttacatatgtatacatgtaacctttattaaaggccgactatgtgtatacattgttttatatgagtttatttaatctgcataatcaaggcaggagctagtgaacctcttttgtgaaaccttcatgaatactatagctcttttttttttttttttttttttgatatggggtctcactctgttacccaggctggagtgaagtggtgtgatcttggctcactgcaacctccacttcctggagtcaagcaattctcccgcctcagcctcctgagtagctgggactacaggcatactaacaacgcccagctaatttttgtgttttctgtagagatggggtttcgccatgttgcccaggctgatctcgaactcctgagctcaaagtgatccgcctgcctcggcctcccaaagtgctaggattacaggcatgaaacaccacgcccaacctcatgaatagtatagatcttgacctactattataggataaataaatgcatgtctacaaactcttgagccaacatattgttcataagggaaagctctcaaattctttactgttttacctttttctctcctaaatctagtcccatttcaataaattcctacttgaccctctatcaggtcctctgaaattccatctcaccagttctacctcaaatttattttctatcatttttttcctgtccctgttcttggattcttcaatctcaattggcttgacttggcttttctcttcctctctgtccyacagttctttcttttcattacagaaagtaaaaagtgaaagtcactcattagctcaccaaatcccactccaccacacagatatcactgttaatcaaccacattttcccctttaaaaagcccttttaaatctttaaatctgcacttggtgtaataatttcatttgtctccatttggagggctacttcctcttgtggaataaatcattctccctcatcctttcaggattccaaattaacattggccctgggaagtcctgccctgtggaccctgtcaccactgccctcatcaaataatagaggatgccatacttgagaatttttgtgatgggttttctctttctcataacatcagagtcctttgtatctagatgtgctatacctgcccctcatcttatctgtatctttcacatccttcaagaacctaacgattacagctctcttttaactatcccctctccacatttctatttggcagtctgaaaccactcagaagtctcgcttcatgtttatctgtcttatctccttttgtaagtcctaagatccttaaggacagtgaccaatgttttatctttcttctctatattccacagctcctagtctgatattgagccaatagcaggcactcagaaggcagtaattgattgactgactgattgaattattgacaggccatggtttctgtcttttctactttaggtatgtggagagccaacgccataccattcagggagactacatagataccatggaagagcttgctgatttggtgggggtcaggcccaatctgctgtctctggccttcactgaccccaagctggcattacacttattactgggaccctgcactccaatccactatcgtgtacagggccctggaaagtgggatggggctcgaaaagctatcctcaccacagatgatcgcatcaggaagcctctgatgacaagagtagttgaaagkagtagttctatgacttcaacaatgacaataggcaagtttatgctagctcttgccttctttgctataattatagcttacttctagttgtcctattgtcactgccctgtttttcattgggaagcttatctacagatgccttcagaatctgacgagattgactctcagtttcatattgcccagaaatctactttaatgtctctttcgaaagcattaattcactttcctttttcctacaatgaaacctgttttccatttgtattaactcatctcccttccactcatgatccgtcactcttccttgtggtaatccctagactgggagctcaggtactcttttagtcatctttgtatgtctttagcagagttcttgacatgtggtaggtgcttaataaatgtttgttgtttatcaaattttatggtagggagagtaagtcagcatcrgtataaaatcgcttactccacgtaactcttcttctgatagggtttgattttctattagaagctcaattttagttttttttcatattataactaaatatgtttcctgagagataagagaaataatgttcctacaatagttgtatgtatctaagataagacatatagatgcttaagacattttgtttcacttgctattcactagtgtacttgaaacatggtcatttttagcccttttccttaggaaccatgtctttattttctcaataaagaaattactttcaactttctaggctcacagtcattcagatcatctaccatctgccaatgagatcaacttggttgagaattttgggattttaaattagctgtcctacctttttaaatctcttttaaatccttcccatattaggatccaacaaaactttatcttaggaaatatgataagtagcttccaattgttgtagtgtggtctacaaatgtgatttgattcatcttcccccactctaattttctccccttttctcctcccttacatggagtctaagtaagtatttgaacaagtcatttatgtattaaattagaactgatattaactaaatgtaggaacattctgcttataccagtttttctcatgtcgtaaagtgtagttctgaaaaacagagcaaatgaaatgcaaagcaggtacttgggtttacatcccagtgccactgatgattctgttttctcatctgtggaagtttcactgttcttgtttcatggagaaattaactaagtgtcagctgtcaggcacactgaactcaggtgatgttcattaatagctgttgtacaatatgtttgtatttggattgctgcttattacttaacaacaggataaacctgaacaatggaaaagaccaacattagagagtattatctttccaaatacacacacctgtaagagaactggaaatgtgagaactacaacttcttcttatttaaacatttgaacaattgccggccctttcaccgaatttacctgtggaatgccttttgagagttagagaactgagaactggtattacttttcaggtcttttgctttccctaatccttgtgatactggagatttatcatctattaaaatggacctagtatttttaaatctgcatatcaaaagcaaattgaatgtctcttgcttccttttaatttcttttaacatataaatttctcttttagcatgtaaatttgttgaattaacagccctttgataatataattcctagttatcagcaataagtacaccagtttcttttttaaattaggagtatgtaattctaaattaattgattctctcattgtacatattatatgcaaggttacaaaaaaaaatcaatggttaatgattttttagctcaaccaagctaaaagatgtgaacaagaaattgaactcaaaacaacttaagatacaaagctcttgttactgataatgtctaataatattcatcaatttaccatatcttgttcttatattaaaatgttctatcattttcctaattattttaaagtcgattacaaaaatatatatatattcttgtagtgccagaaaattgaatacattaataaatggggtagaatagatgaatctcccatgaagaagaattccaaataatttatgaactctgccctcaaggatatggagcagaacttcctacttctctagtgtgagctgaatagtgacttccttccaaaaattacatatggaaagggggaaaataactttgtagtggagaaatctgataaacactatctcggctaggttatcaagattaacactaacagtaataagtcacactgatagtatgtacctttgagatgaagtgatgagaaggccactttacctctctgttgtattcctctcaaaaaccataatgcagtctaaccatgagaaaaacatcagacaaacccaagttgaagaatattctacaaatacctgactacctcaaaactgtcaagatcatcaacaaagaaagtctgagaaattgtcccggaataaaggggcctaaggagacataacatctaaatgtaatgtagtatcctggatggactcctgcaacagaaaaagaactttaagtaaaaattaagggaatattaataaagtatgcattttggttaataatgtatcaatattggtttattagttgtgacaaatgtaccagaggaatgtaaaatgtcaacaataaaggaaattggatgtggggtacatgagaatgctgtactatttttgcaacttttcttaaatctaaaactcttataaaatttaaaaataaaaagaaatgtggagttattattattattttttggctcaggatttgacccagagctatggtctggcagaattttctcagaggaggaatactggctagtacaagtcattcaaattactgtgtttttctatgatttctccacaaattaagttgctttaataatgcataatgtaacttaattcagcagttttgcttcctttgctgagtaagtatagactataattatagagaatgtaaaatggtgatataaagtcaaaatacacaacttcttaaaatcacttagatatgttctttattgaagctgtgcacattaacccagcagaccccactagcaaatttatgatatgttgatgtcatgtacattcataaataagattattttacttaatactgggcctgttacttttgttaggagtaatacagcatttaaacaacctccagattgcctaatggaatttctaagagtgccaagtttttccatgcttttatacacattcttgtgctgtactttcctcttgataaattctccactggcccagctggctaacacctataccatcgtccagattcaggtcatctgttttctcttcagggaatatcttcctgaccctcagtatcaaataggtcaccttcctctgtgctctcattacaactagtgttcttctcaattacattttatgaatagccttatcataatatataacaatatttggttctctcacctgtttcctccttgaactagtaaactcctcgaaggaatacattttgtacttaatctgtgtgttcctagtgcctaatgtagtggctgaaacatagtaagacctcagtaagttaagaattaattaattaaatgaatacattcaatatgggaggtaaatagatgacttttaaaggattaaatcaaacagtgaataattcttttagaaaaagtgacaaaggagattaaagggtgattaacattttgaaatgtctgcaggacaagcatgttcttccaaaaactgttctgagtcattgatctgaatcagtatgttatctttttttttgagacagagtctcgctctgtcgcccaggctggagtgcagtgacgccatctcggctcactgcaagctctgcttcccggcttcacgccattctcctgcctcagcatcccatgtagctgggactacaggtgtccgccaccacgcctggctaatctttgtatttttagtagagacggggttttatcgtgttagccaggatggtctcgatctcctgacctcatgatccacccacctcggcctcccaaagtgctgggattacaggtgtgagccaccgcgcccggcctggtatgttatctttaatgtttagttgtggtttaaaacacaagtgatatgtcctcgtctataattcatttcctcaatcaaacataagacataacaagccaagatcttggtacaagaaagaaggtagggtatatatatgtcatccttgaccctcatttcactgctgttctgccttgctttcccaaattccccagctcctttgacgcacccataacttctgattgaaattattagcagaattgttgactccccttcattcagtaaagattttagcaccaagctctctgcctcgctataatataaaactactcctgtagttggttttaacactgatgtaggtaatactttcaccaatccaatgtcttagtcaggattagcttcagctacatttaacagaaaaacctcaaataacaatgacttaaataagatttaagtttattttcctcttatattaaaaaagtctggaagtagatagtcctgagatgatataacagttcttcagcttctctttttgctccactatcttcagcatgtggaccttatacttcatggtccaagatggcccactgtagctatagccattatatggacattctacacagaaggaaggagaaatgtaacaatggcacaccccttttcttttaaggagactttacaaaagttccacataacattttcacttagtcttattggaagaacttagttacttatctagctactagggagactacaaaatgtgtctttatacagagaggcaatacctcaggaaaaaaatcaaggttctgttattaagaaggaagagagaatgaatgttgaggtagatctctaacactctgctatctggccttttagttatgtgatcttcttactccagtgattttataatctgcctcatctcaactacctatacccacatggacatatctaagacattgtcatgaataaccgcaacaccactaaagtctcaatttcaagcatcccactctctaaaactctctcctaccttttcagttcattcactctggtactccaactccagcagttctttgactccactgggctgcccatcaacctgctgtcttcatttcccagcccacctcatttaaaatgcatggcccaacattataatcacaccctaccacgcactctcaattactttgttgctctcctccatacttgcttagctaaacttcattttggttatctgcctgcatcaaaacagctaaacatgacaagagaaaaatactagtatggtgacttgccttttctgaaattcataaccactgaacataggtagaccttcagtgctactgccaatcatacttcatttttctagacaattctctgtcccacctttctagttgattactgcatataacctatctccgcaaacctcaaatatgttgtctcctttcctcacagtcagctaatcatcttctctttttttcctctaagaaaatggaaacaatcgaaagactttcacatatcttcactctgtgatgaggtttttagttggggctagtcacataggcaccctctgcttagcacatatcagaattccagactcccagaagaaaagcaagtgttcagcataaatcacattgtttgtacaaacagttttaaaaaagtgagccactcttatcagttaaggtggtaagaaacctcccaaaatccaagttcccaaatcccacccatgggccaaacttgcaagctaaagcagtcacaagcatggagttgtgctctaattccttgagggggcaatagctacataaattatttggaattctgtatgagagacttgttcccacacatcctagttgattttaattgtttattttttaggtatggcgaagcattattatggttctaagagtcagcaaactcctttctgcacaatgccgtttactggggatcttgaatactcgtctctagacccttgtctaggccgcgtttctcaaaatgtggcccttgaggcagaaacatcagccttgtacttgacacaagtcctcaggccccactccagacttacagaatcagaaactctgggtacacagaccagcaatctgcatatttgaccctctagataattttgatgtatggtaaagtttgatttagtcaaaaggagaggtggacctgtatctgttctgtcaggccgctcactgatccttaggcctttattgtactctattatctgctagtaccaatagcttctgacttgtgaaaattgggtgggtaggggtgagaaatggcatggagctggggtgtgttcaaactggcatcttcctttctctgagaattttaaataaacttattttaaggctcttttcaggccggacgcagtggctcatgcctgtagtcccagcactctgggaggccaaggcgggtggatcacgaggtcaagagatcgaaaccatcctggccggaatggcgaaaccccatctctactaaaaagtacaaagattgactaggcgtggtggcacacacctgtggtcccagctactcaggaggctgaggcaggagaattgcttgaacctgggaggtggaagttgcagtgagctgagatcgcgccaatgaactccagcctggcaacagagcaagactctgtctcaaaaaaaaacacaaaaaccaaacaaacaaaaaaagttcttttcagagtcttttttctctatttccctgggtgcaaattctctcatttgaagaatcttctgactatacaacatgacactggacttcctcatgtactttattatttttattactttagttatttttaagactatttatttagaaatgattgcagtcctccacaaaagttacaaaaacagtagagttcttatatat

SEQ ID NO: 94331 - DNA, 123763 bp, Homo sapiens
  misc_feature (1)...(123763): n = A,T,C or G
gtatttcccataaaatatctacttttgttgttatgttctctttatattttctaatacgtgtattaattttctcattttgattatattatctttgttgtttaatcaaagaagaagatcttggacataatttgcaattctttctgttttttgattcataaatcttatttatattggttacatactgtaacaaattcattgttaaatagtttgatggagatctcagtaaaataaatggaaaacagaactagatactagggttcttgcctctcagcatattatattttcctatacttttcaaagtcttgcacaaatttagtgcttgtcttgatgtacaagttttaagtagtaagtttccagagccttcatatctgtataaattgcttcataaaatgctcatttcagcaatttcacatatgggagcttcataacttattagtaaccatggtaatgatgacaaataaagcagttcaatcattctgaatatgttactatttacttccaaacgttcagagtttagagcatgtagatttaaaagttcagattactgttgccatgagccacacaaaagggcactgagtctcctgagatgggaaaacgaaattgatttctccgtgttttttatactccacaacactcttgaaaagcactttctgggcacataactatggatctactgctctggggtaaacagaatatgagatcacatgaaaagaaaacacatgtgtcgttcttttgattcatgcaagatcccttaagttcactagattcgtataaatacgtgggcgtatgtaggctccattcacctccaataaagcaagaggtggagatgaccaatgtttcttttaaaattgaccctggttattttgtttcattatcaaaaacagaaatttagtaaatatatagctcctaaaattagtaaactgtaaaaccatctcaaatgtgacattattctgtatatttttattggattttcagaaatgttatctggctgtgacacattaaaagaaatcaattaaaacttttaataattgaacatagaaactttgtataagattttaaaacttcacactttttgctgctgggcatggtggctcatgcctgtaatcccagcactttgggagggcgaggcaagcagattgcttgagtccaagagttcaagacaggcctggacaacatggcgaaaccccctctctacaaaaagtacaaaaattagccaggcttggtggcatgcacctgtggtcccagcaacttggaaggctgaggcaggaggatcacctgagcccagggaggttgaggctgcagtgagccatgattgtgccaccacactccagtctgtgtgacagagcgagactctgtctcaaaaaataaaaaaaacaaaaaccaaaaacaaacacacacacacacacacacacacacacacacacacacacacaaacccctttggaagttttaatatcttaattaaatggctctactcaatgatttcctaaatgttgtagaattttaataaatgacatccttccttgtttaaattgtaatgaaatggatatactatatataataaacaatatcaagatgtttgtattattaataatttatacaatgttttcagtataattaggcaacaaaaataattttattctctttaaattgtcagtgttaagatacatggagagacaaagtatttttgtctattgtgtgtaagttctattttaactcagtggttttcaattgggggtgattttgtgctccagagacacttggcaacgtctggtgacatttttagtcatcatgaatggcagatgagaggattctactggcatctagtgggtagaggccagggatgctgcaaaacacccccacaaactttaaaaatgtcatttaggtaactcttttcttcttgtagttgagttaatggaaataacccacacaaggaagaacagaagaaaaaagggagacaagtgtgtgtgtgtgtgtgtgtgtgtgtgtgtgtgtgtgtgtgtgtgtgtgtgtgtgtgtggtttctctaaggctaagaatgtaaaaatatatacattgcaatgcatttcgatggtacttaatttccagtcacaagcttattagaacttcagtttatgattcaaattagtcaactcagttttccttaaactatcatattcatgggctacgagaaatgcaaaaatgaaccaaatatagtctctgcccttcaggaacttacaattttgtaggacacaaaagtaaatcacgatggcaatagatgcacatacaattgtgaacaaaatgctataggaacactggagaaaaagaggataaaaagttactggatttgacaagtcaattataaaactgttaacaaaagaaaaatagaagaaaggtttctcaatgataatcaagatagacctggaacaatggcaagatgtttaaagataaaacatgaaagcccacaggatacaagttaaggaaatctgaaaacaaacacaaaggacagatacaggatatggccaacagcagggacttgctggtagagtggttcagaggaagatgggggagagagcatcagtgtagatgcatctgaaaagccaagttgggttctgatcttagaggtcagagagtctggattctccaacaatggtcctgagaggctaatgaagatttcaatgtgggaatgggttcattgtaaatgacacagagaaggacaatgggagatgggaaggacattccctgacagtgagtttccaatgtgccctttatttactaatcacaggctgttggactggcagcccactacgtgcccatgactacaaaaaacaggaaattatttttcattggccatcttaataaaaagataaatgagcttattttaataataattttagaatatagaacagatgatgttacaatcttttggtatgcttaattttatgcgcgcacacacacacacacacacacacacacacacacacacacaatttccagtatccttggtaagcaagaaactctataatgtggaatatttttgtctccatcacatatatcccctttttaagatgagaaatcatattaagcaaggatatttgaaaagctcatcaaattttgtaggttaatcagtagccataatcattatgaactttgtcttattcttcacaagttaacatttttctacttcagagaaagttaatcactaccgtttggaaataaaaattaattcagatcaactgagtgagtgtaattctgccaactttatgctcctaaagtagcaatttaaaggacagtttcttaaatgggaaaaaaaaagtatgtgtgtctgtgtgtttcatcttgtgcatggagaccaatgctttataatgggtctcatgtagttaaagcaagacatttcttttacaggtttagctggttccactgttgctcaggtgtaagagttttctcatgatttggcaagtcaattttctctttttactaggctaacagtattgcagccatggtctatgaaatagtattttccatccttaatcatcaatttgcccaccagttggaggtcacctagtcacatttagccctgacaacaggtacttcttttgccaacctctataaagggtgtgggggcgggggcgggatcagaccacataacttttaggttatatgctctcattaatattaaagacatatgaattaatcaatatctcagaatttctgatcctacgtttcggccagtgatgaccctgaaccctctactgtctgaaattcatcaaaagtcttatgagaaatgtttttgtggactgcctaaaagatgtgcacaagagatccctattactacaaatcagagatgacaggttgtttgcagccatttgctcatcccacacccatgacaaacattttttatctatttcagaactttttccttctgtgcatggactcagccaccccaactgagctattcagtccactaatatgaataaatgggagttgacatgtgagttgaaacttatgtgccattatggggaaagattatctaaatgctaccctgaattaaaccagaccattgtggggctgtgtactcagtcgaacaggaaattttggatggttcatgaaattgattcagtgccctgtgctttgtgattatgccaacagtttccattgagggaatgtgggtgtaacaacttatgacacttatttcccacgtagctcacagcgtcatcatgatgaggaactgggatttgccttggggctaaaaattatttttaaaaaaacaaacagtgcttctcaaaagcaaacaaaatcctgattgattggtttttatgaacaccgtaaaactttaaaatacttgttatctcctgttttctatggaagcttagagtgagatctcttgcccaccttcaaaaactgttctggatctgaaagtgtgcatacttgagtgttaatcttaccattggctacattatttattctccctccatgaatttcccctctggttccttaaactataatacttactttatacagtgttgcctatattttggtacgcggcctcaaatcatctgggagaaaataatgctataaaaatcaatgcagtaatttacacaggctgcacttgatcccatttccggtgtgtttaatttttcatgcaaaaaatgattagcattggcaacattttatataaatgagatagagttctcagagccagggtgagcttaataaaaaatgttttgttgaaaattgtcttttactctgtgctccttgtagctcaatattgtgaaagttcccactgtcttcaaagcagaaatggatggaaggtgggaagagaaaggaacttttacactttatatgtgatcataaaatcttgattactggcatatgtagaagtgtatatagtaaatctcactgccatggagggaaaaattgtaatcctctatacaagtgaaaagggaatactttaaatgaagattgagaatttattgtgaagggagctgtactaactgctatgtaagtggcttcctatgtttgctgccccaaaatactcctgctaattagaacaacaaaccagcacttatcaagtccttttccacctatcaactcctttattacaccatctttaattttctcaattcttgtgccatctaaacttgagttggggaagctcagtctgtgatctctttgactcttgtcttatttcttactggaacatagtacttgataaatctgtcttgaatgaatgaatgaatgaatggctaatggaaagtgtccatcctctaagaatgtccgttcagaaatttctggacagaaaagctggtaataacctcctcacttttttcctgtgaacccagaattgcgaatggagggagtaaaaaagcgtaatcttggagcagggggctgcaaacagaggtctgaatgtggtggtgtctagacaggacctagagagcattagggcaccaagtgcctaggaaaagtcatcaggaggacacatcaggaagtagaggagtgtgcttactccatgtatctccctagcatttaaagtccgctgactttaaatgggctggaaggaacacggttccagtttatctccatatcgggttaaaggacatgaaacctagctagaaggaacattgctccaccactggcccatcagttctgtttcctactcggtttttgcttaacgagttgtggtgtttagagttgggagatacatggagaaagtcactttttaggagaggatcagagatccgcaggctcatttcactctataaatgccgcggacatctggttccaggacctggacagtcctctctggagactggtgggcccctccaacacctccgtggcttcccgggatcaagtatcgcacctaaaaggagcgcagagagcgtgcaactggcgggagaggcgtgaccagagtggaaccaaaagtgggtggcctgggaacctaacgcgtgaccagaagtgaaggtaggtaagtgcgcatgcgcaggatgcgagtggccaatgaggaccacaaggttgtagcgtgtggcctgagaggacggccaggactggccagaaaagagaggtgtggaatgcagtaagaaaagtgacgcggaccagaggggtcttgcctgttccgagagaatggaaggggttagccacggtgggaacggccacggcgggaacggccccgccagtgaggagcgcaggcagcaaggcttagcggaagaggcgtgacccaggcgtaccgcaggggcgtggcccgaacgagctgactttagcccttacgtgaaaggcgtkgcgtagtcgcaagggtgtaaaaaagaaattcgaattcgcgggacrgtcggcctcaggcggagtagggacgtgrgcccaagggagggaggtggggtaggcagactagttgtgactggatgatcactgggcgaagggtggaaaagtggccacagatggaaaggcgggcwgcggagtagtgaccggcaagggaggtggcgcgaaaagggaagtagggacatgacgtagttggaacgcagagacgtgcctcgaacgtggggggcgcggtccttacgtgtgggcgtgccttgttgctctgaggggcgtaacaaagatggtggagcaggcggagggcagaggcgtcggcaagttagcgtgcaggcgcgtggcagcgacaggagatgtrtagccagagcgcagagcaggtgtggactccggcgctggggaagcgtggccagggcgagatttcagcctgggtcggggacagaatggggactgataggggcgtaacctggaatgacgaaatgacgtttgctgcgtagggacgtggctaaacgtgagggggcgtggccaagatggccgcgtgygggatcctcgggtaccgggagcgaacgaggaggttctggctcaggtaagtcgttcgggtaagggcgggcggcagtaaggagcgtgggcagcagcagggcgtggtctgcttgagagggcaggaactgtgccacttgccgcaaacatgaccgcgtgccgctatcggccctggagccagagaagcttttggtgcggcgaggttggccggggccctggcggggcttctctgaggaatgggagtgggaggctggcggcrgggaaatagccacttccccactctagccctctttctccgctatggggatcaccagacatccttttaggattctgtctmttaaaaagtagaacagctttcccagagacattgcgggatgagaggagtgtccagaaaccaaggagcagcaagctgggactccctcgggtctgcattgttgatattcccacctgactatgctaggggctatggacagacacagccaccccagagtagatcaaaagcacagttgtgtcccttggacaaatctgagtttttctgttgtgccttgccccagagccggaggagaggaacctccaaaatgcagacattcttggtggctgggattctgtgtgatattcagcgttaaatgctgctgytctgaggctgctggaaacgcgttagtattaatatctgtgtacttctctcacatttacttttgctggaaaagcttgggaaatgacttaacgaagatgcgtaaaccttaatttgtttatatgctccttattagccactgaataccacattgctttctgcttccccttcttctttactgataatctgaccatttccactatgcactttgaaagtcttgctggagtatggagaatagtcagaaatctctggtaagatgctgccccgcgcatctctcagaggagtcactattcatagcctgcatcagagttcacaatgaaccaaagttcaccccacctcccctgtcttcagggacttagtgaaaagctgcactgttcttgaatattttggaaatgaaaaactttctgggctattttaaatcagtacctgggctggaattaaccgaaaggcgaaacagcaagggcaccattctctgtgcctatacgtagctgccctgtgcttggaaccaagcaaaaaggctgccactgctcacagttgcaatggaataaaggttgagtgccttgtgattgcatatgaatattaaggaaatctgatggaaagagggaaattcatcatgtcactggccacactggggcagttagttgcaacacacaaatcaggtataatatattttgaaacctttggcaacctcagattgggatcacactctcaaggaagaagtgagtgagaggaggaagctaagctttcttaagacatagcagcgtaatctctaatttaagtttcaggaaattgcaaaaggcaggcttccttttgaaatcaggagttgagaaaatgaagagtcaatctgatgccaatcaaggaatttttcaatataattgtaaccttttgttagtacttttcctgtctctttcgcataagttgcttaatcaggcagagttcaagctatgaggcatttaataaatacattacttatgaatgacatttaaagacttttagaatcttttcttttttcacacatttctaaggctgcaaaacaacagaaaaagaacatgttagtaatatccaaggcatacatgaataatcagtgacagcaaaggatgtgtagcacagaaggcttagctctcctaggcggtatccagccacacactggtaattgttgaaatggagtattggatatatagatgatttattctcaccatttttttgtacaagtttgaagtttgccctaataaggggaaaacagattctaaattcagttgacccatggactattgctgtttaaacctgctaagtgaattcagatagtgaagttatttaaaaaccagatgctcttacctggctgcaggaactatcaagataagatattgaaagcttattggcagtctgtcttttaaatcctgagccagacttttttacatggcttcaacaaggtgatttttcatctccttagacattttgacatacacactcccactaaaaactgtatttacacaaacacagataaaactaaacaaaagtgattttaactttggtttgagaattgtcagcaccttttaggcaacgcagacatactttaggtgtcactggctgttacgagttcaattgcaccctcccatctcaaactcatatacgtttaagtcttaagccccagtacctcagaatgtgacctcatatggagattgggtctgtataaaggtaattatggtcattagggtgaccactagtccaatataactggtgtccttaattaaaagggaaatttggacacagacaagatgagaatggcttacgaaaattggatttaatgctgacacaagccaaggaattaccagaagcaaggtttattaggtgttctccagagaaacaaaaccaattgtgtgtgtgtatgtgtatatatgtgtgtgtgtatgtatgtatgtgtgggtgtgcctgtgtgtgtgcttgtgcgtgtgtgtgtgtgtgtgtgtttagagagagatttatttttaaaaattggctcgtgaatgtaggctcgtgaaatttgcagtgcaggccagcagactggagaccagggaagaattgatattacagcctgtcttactcagttttgtgctgtaacagaatacctgacactggataatttataatgaacagaaatttatgtggctcatgattctggaggctgggaagtccaagggcatggtgccagcatctgctcagcatctagtgagggctctctcttgcatcatcccatagcacaaggcagaagggcaagaacatgtgcatgtgaggggtgggagtggttgggggtgaagaaggagggagggagggaagggaaagaagccaaatttatccttatatcaggaacccactacctcagaaactaaccagctccccctaataatggcattaatccattcatgaggggagggccctcatgatttaatcacctcccaacacttttgcgttgcagattaagtttccaaaacgtgaactttggggacacattcagactggattgtgagcacaaactggtgccatggcacagctccagtccaaaggcagtctggaggtagaatttcctcttcctcaggggacctgtctttttcaacttaaggctttcgacggattgggtagggcccacccacatgaagggtaataatctttattccaagtctactgatttaaatgttaatcttatctaaaaaatacattcacagtgacatttaaactggtatttgaccaaacatctgggtaccatgacctacccaagttggcacataaaattaaccatccaagtagaaaggcctggaacagagcgctcattgccctcagaaggaaccaaccctgcagagaacttggacctcagatttctaacctccagaaccatgagacaacaaaaatttttaagccaaccagtctatggtactttcttacgagctaatacattggcctaaagacctccggtagggagtcaagcctagaggtaaggaacctccacaggattcactaacttcctaccagtcccctttaatgtaatggctgcacatctctggctccctgagttcagcgcacattagcaaagtgatgcatatgcaaagcaaagcgcatggcactgtgccaaaagactggcttctcatcctgctgtgctttatttcacaatgcacatagagatgattctcgctcctttcacgtaggtgtagtcttctctctagcttagatggagcaggatcaaggacagcagtacagaggagaagagctagttcacagccaattactagcatgaatgtgcacaaagagaggggaggatgaaagcacgtttgcctcctttctcagcatcactgaggaccatgatgtgggttttatatcttacattcttcttggaaagatggtgtaaagaaataaagttcagatttgtaagggaaatgtgtctttagtgcccctcaacttctacatttgtgccttttgccacccattcccacctaccccaacccccaccactaccccaccatggccatactgctgagagcccctcttttggcaagagaaggcagaatctgaggtggcaaaaaacaccctgctgcaaactggtttgctctgtgtttctcttacccatactatgtgcatttcaggaggctcctaagggagaaattacatacctggaaggtacagttcaagtcttggtcatctttgcatcatagcacccaccactgtgcttggagcaaaagaaatgacaatacattttgaaatgaaagtgctaactggcagaatcccagccctgtgagactagatgaggttcatactcagggagggtcctctttttagatcaggcaggatttggggggtcctttggatcttttagataggggtatgagaccctcctctcaaaggagaaatatttaaaagtgttttaaaagtatagacatccctacaaatgggtgatgacgtttgagaaaaggaaagacccctagtactgtctcagagcatgctggcagtcatggcacagttcttagttcttgaaatgcggaccaacatctttgtcaccaagggagcctactcgggtcagttggctagtactcccagcacccattttgaatgaggcactgtgtccctaagagatgcagctctgaccaaggcagacacggtccctaccaccatggggcttagatactggagaggatgcagtcataaagtacattcctggtgaggtattaattcgactgtgataagcactgtgaccacaaagcagttctgggctgacctggtgagcttgtggtcgggggagcttagaggaagtgacgctggtgtcagtcacctgaagtgggggtagggattcaccagtcacagatggagggagagtccaggaaaggaagggcatctgcacaggccagagggaaaggcaggagttggaagaactaaagtccatgtggctggtgggcgggcagaagcgcaaagtgaatgtgagtgaaagcaagtgggtctgtcatcttggggtgaccaatgagtttgaggaacaagagtggataattgactcccatttgccctccccttcacctcagggtgcgtattacgagtctgaatattgtcctacttagaggttttctcatgatcttaagtctctattgtttacagctttcacttctctgccctcttccctctaggttattgggttcctgcaagttatctgggaactgatcaaagtttcagggtaagatggtggtgatgaacaccctgagggtcactcgtcctgtgtccccatgcaaattgctgtggagaagcttccagattccaaggcccaggccattctgcagcctctgtacttgtacttacaaaatccagaaataagcctgagagtacaccrtttcattaaagagaggagaaaaggcttgttggttttataaaaatcacgcgtgttaagcgtttgtagctgtgatgtcatgggcattccagtgtgagattatatgccttatggactgtgagaataactgtttctctatttgtccagtaaaataaatgtggaacattctttcttgacaaatgttaaaatgttaaaatgatgtcatgcagaaactggagaaggtttcagatattctggaacctgttctttattatttctggttagcagttgtctttttactaaggttgatccacaaactgcagattatttctgtgaatcttaaattgctggaagctgcacatgaatgtttgcaagcagttcagtggcttcatgcttcagaatattctgtccagagttaagaattgcagaattaattctagctgactgatttgcaagtgtgtactctgctgtaaacacagaagatcatgtgacacagcaaatgttcttcctcaagcctttctcatctcgttcccctcctggaaatacaaggtactatctgcagctggatgttgcagggattctccactgtggcacgatggacattggggatggatcattctgtggcgtgggggctgccctttgctcactggatgttgagtggcatctctgatctcttgccagtagcactccccaaatgatcacattcagatacgtttcaagacattgctaaatgtcctctgggagggagggcaaaataaccctgggagagaaccgctgagatgataggagagatgtctgtgatggtggagagttgtgtttaatgaattggctaaatatatcttttgggtttttttaatatattttccactattcacaatgaatttacatagttttcaaatactggcttgtttcaggatttgaggtttctcagattgtgctcttcgggtttaccctttttgaacctccacgcacataagaaaaggaattccgttaataatgttgatttagctggatccattgccttgaaagtgcttcagaagaattttttattacaagtttattttgttttatcccaacattgactatgttctcattgaaatgagttggtcggggtcataacaaatttatgattgctgggtgtgcccatatcctacccagactggcttattccgaaccctgggactgcattctaaggcttaacgtggaaaaaatttagtcatatttatctagttactaacgttttgtgtgagtgtggggtttttgccttgatatttagtttgtctttatttgcagaaagttgaaagttaaatgcctaaagtccaatcagtctatgccattaggataacttgctgcttttagtgccaacagaaaccaaatagtggtcccccgaggagatggggttcacttgactaatagctatattatatgatgtgttcttgtttctaagttactagaaaaacacaggtggaagtcaacatttgattttgtttgtggtatgtttcactgttccaacctgttttccccaaggagaayattgtggtctttcttgccctgggcctttgagcaggtcctattcctatattctggaccctcatctgctcaattgtaaacacagttctcattgtttctgacagctcagtaccccagcagaaggctagtgtacrcttgtaaccaagaataaccccagattcttgagggttagaagctcagttatgaggccgggcacggtggctcatcccagcacttttgggagaccgaggmaggcggatcacctgaggtcaggagttcaagaccagcctgaccaacatagtgaaaccttgtctctactaaaaatacaaaaattagccaggcgtcgtggtgcatgcctgtagtctcagctactcaggaggctgaggcaggagaatcacttgaacctgggaggcggaggttgcagtgaaccaggatctgtactctgtctcaaacaaaaaaaaaaaaaaagaaagttgtggcagctacttctagtactttgttatcatcatcgtaggctcagtgcctgcctcagatgtttaagtctgaacattttaagaggaggcaaagcagaataaggagtgaatgaaagtaggaggttgtggcaaattcggtaagcagcatttcaggtcagcccagtgctctgtgctcatcatatctttgctcccaaggctctccacagataatctttagctgtcaactcagattgctgtttgctgttatctcaagtagcagacagtaactgttgatagtcctaactttagggacttgtaatataacaagataaaaataaaagcctacacctgttatccaagatgaaaataaaatcagtttcacttagcgtatcatctagtgaaatttagcgtgatgatcgcataaaaagatttaggtggccgggcatgatggctcacgcctgtaaccccagccctttgggaggccwtgaggggcggatcacgaggtcaggagaacgagaccatcctggccaacatggtgaaaccccgtctctactaaaatacaaaaaattagccaggcatggtggcacacacctgtggtcccagttacacgggaggctgtgaggcaggggaatcgcttgaacccgggagtcggaggttgcagtgacccgagatcgtgccactgctctccaacctgggtgacagagcaggactctgtctccaaaaaaaaaaaagatttaggcatgagatcttaggccataggaaaattaatttaataatgttaattcttaatgaaatataaagagtatcagctataatgtaaatagtacaaatttaatattattccagtgattcttaatgttcatgatctccctgcttttagaaagaaaagaaacatttccttttaggataacttggactagaatggcgctgtctaaaatgtagccacaattaaatgtagccactgtgggtatttacctgtaaatttaagcacattaacattttatagcctcatgtgcctacaacttaccatactggacattttcatctttagagaaagttgtatttgacagcactgatttatattataactcaactgtgttataaagttctattatttttccaattaattttgaagaaccaaagcctggagaacaatacttgttttttggtttttgttttttttttaacttttattttaagttcaggggtatgtgtgcaggtttgttgtataggtaaacttgtcatgggggttttgtacagatgaggacaagagttttaacaggcttgttttgcaatgtcttcctaaagacctctgatataggctgggatgcctcagactgtactgtctccattaactttcaaataatcttgagaaacagtgggaggattaggagtcccatggaattgcactaatggcttcagggttgtcttcagctacctgggactgacgattagccctggaactgaccgccaagaaatgtgggcttttagtctcctgtgctgataactgcatgtgtattctatggctaatggactcagcatccaagtgccttttagagccctgatgctctaacaaggcaatttgtgatcctgcgattatcctcagccaagtcatacagagggtccctgtgtatacacccatcactgcactaaggccaaggcctacacagatggtcttcagtaacatgaggaaacagcacatccctcgtaaaaagggtggtacatagcaagggaccagataaaaagcacatgagggtatagggcaacattgtcctatagacatataattgagccacatatgtaattctcagttttctaatagtcacattagaaaaggggaaaagaaaacaggtgaaattaattttagtaacattttatttaacccagtatatccaggatattatcactttaacatgtgatccatataacagttattaccgagtttacattgtttaccttgcaccaagtcttcaaagcctgttgggtgttttacatttacagcaccactcatttaggattgaccacgggggcagcatggaaacaccagcgtttggaaagaatgaggagaatggttagataagtgaggagggttctactagaaaaacacaggcacttggacacagaagtttccacttgatgtactgtctttagcacaggagcaccctgacaaagccggtaatttgggaaaactgagtggctgaactcagggggtaaagggaagtgagaaaagaggacaaatgaccaagaggctttgtgtgaagtccatggcgtagagttcagaactaggctagtggtctgggcaaggcgaggaagagctaaacctgaacgattgttaaagaaaaataatgtgatcagtgggggtaatgggaaataaagcaaaaagaagcaaacttcttcggtgatatacttcatctgattcatttgatccaccgtagttgttgaaagccagcttgcttgcagagcagtgggggaggccgataactaagtgcgtgtgcatataattataactatacccatgtaataatgttgtgaaggacaaaaccagaatgctgtgattaaaaattcaaggggatcatgttataggagggtagtcaaagaggagaggaggtgacaattaaggcaataacaggagccagtgccaagtggaatgaggggaatgattccagcagaggagaagaatcaggaaccgaggggcttgaggcagaaatgagctttctacatttgaagagcccagggacatacaaggaggctagagaaataggtggtgcaagcataaaataaatcaaacgcaggactaggcatataaataagaattaagaccaagtgcatcctcaccatgaaatctaaaggagttttcttgctcatcagtgacagattattgacacctttttaatgacagtgtgcccttcactcatttaaactgtgattgaaatagtcacaatctcttcactttctacatataagaaaaacctgaaaatgaagcctctcagaatgcttcgtggtcaccttcctgttttgagggaaagtatgagaactgccaagaaatcatttctatctgtattttgttaaaatggtagaaggggagggaagaggaaaagaaaagtgtgaatttatcattagcaaaacaagcccttggcaaaaagttggcttcaatagggggataatgaccaaggaccacctctccccacagtgggttggatggtctagcctagatggtctttgtttaaaaaggaggaggtgggtaggaggaaagaaaccttctggaagctgaacttgtaaactcaagggcataaactgatcgtgtcattatggtcattaaagagcaattgaaggaacaggctcagttttcttgggctggtatttgcatgagtctgagtgttgatacttcccatttcatgaatgagatggggaacaattaaggatgaccaaggcatcgtcttagggagctgatcgtcactccagttcttccctagtcttcatggtagaccctgattgaatggctttgaagaatgtgaattctcacattatcaaccacagtctgagtgtctgaggggaaggtgcgtagtctctttgtgtcaggaatcttttaaaatataatcagggcctttcaagggctttctagaaggaatctgcattccaatcagatttatagtattgaaatattgtgccagttcaaatgcatttttaatttttggctcctaaatttaacagaaaattattgttctttttctgttgtattttttctgttttctgttgtaaatctattataaggaattctttcatactaagaaaaatgaaaacattgggttcaacctgttgggtattatgctcactggctggggtgataggactgttgggaccccaagcctcagtgtcactcyatataccaaacctgcatgtgtaccctttatagttaaagttgaaattaattttttaaattaggtttaaatctctttagagataagagaatactatgttataggaagaaataggaaaaaaaaagaagaatattctgagtttctgcagactgagattctcacctgggccactattgacatttggggctggataacgctttgcactggtggcttcctcctgtgcttcgtagaatatttagcagcatccctggcatctatccactagatggcagtagcaccctcttccagttgtgacaatgaaaaatgtctctagatattaccaaatgtcctctggggccgtagtcactctccttgttgagaccactggtctggatgctcccaagagagctcagtgtctatactgccaggacacttttgcctaccaccacacaaaaataaagccaaggctaagattttaaacttccatctttgggctgctactgaagcaggagaactgtcgcccctgtaagagtaaaccagaagcaagtttctggtttttatggaaacaagaggatgtccctgccatattcgggggatttgactgggtgggagctgcctagttatttctcaaatccttcgacccattcttagtggtggggcaagatgcagagggtcattggtaatgatttctctcaattcatgtttctcctagttttcctattgtccttgattctacccatccatggtacttctaaaggacagggaaatggaccaccccaaactgatatacattggttctgctcatcacacatggggatctcaacaggccaatctgtgttaccagcaagtctactgatacttaccagggacttgctacagagacctggtgcttgactctggaagaaaatcagcatcagcaatgtcttcagtgcctatggaggatgaattgtatgtgtacaccttaatagataatctccacatccctgtgacacactgcaacctccagggaccttagcaatgccgatgttctacccaggttttgcaggatggctgcctggtcctcagagtttgcttacataggaggtgaactcaactcagcacgcacagttatgtggggcgagcatcttatgggatgcaggctacacaagtctttttttctaccagccaaccagttaaacactgacaatacttgattgaacatttcctttctcaaagttcttccatttctttcttttttttttaaatgagtctgttattgaaaatcgaattagtttgtctttgtatttagagctagtttgggggcttggggcttgggaaattctcaaagaagaaaagaaactcatttatgaatacctatttccacatggcgctaatctccatgcattttactgttatcacaggactgattgcacttggtttaggtgagcttagtaggcagactgagacgagttgggttttcaagatggcagaatgctgtttttctgcacagtgctttctgacttgtctttagcctttgctttagtcagctgcttaaggccctgaatggctaattgctaaagctcttagttcccattagccttgacagggtctccagaagtggaattgcctcatgtgtgatgctagatagtagacagtcttgataatagcctgacctgctttctcctagtgcatccactctgggagagcgtggacctggttcctgggggcgatcgmcagtcacccatcaacattcggtggagggacagtgtttatgatcccggcttaaaaccactgaccatctcttatgacccagccacctgcctccacgtctggaataatgggtactctttcctcgtggaatttgaagattctacagataaatcaggtgagggcaagatctggtggtcttgtaaggagttaaagaaacagtgtcatgttaacagaggacacatcaaactctctccatgatagtattgacctctttgtgagcaatggcatggaactcattggaatttaaaaaaaaattgtggtgaaatacacataatatgaaatttatcatcttaaccatttttaagaatacagtcaagtagtattatattaagtacatttccattagtgtacaatcatcaccaccatctatctccagaaatcctttcatcttgcaaaactgaaactttacccattaaacagtagcaccccattcaccctccctccagcttctcgcagtcagtatttggcttgcttgcttgcttgcttttcttttcttttttttggaaacagattcttgctctgtcacccaggctggagtacagtggggcagtcttggctcactgcaacctctgcctcccaggttcaagcaattctcctgcctcagcctcccgagtacctgggattacaggtgcccgtcaccacgcccagctaacttttgtatttttagtagagagggggttttaccatgttggccaggctggtctcgaactcctgacctcaagtgatctgcccgccttggtctcccaaagtgctgggattacaggcatgagccaccatacccagccagtattctgctttctgtctctgtgaatcggactactctaggcacctcatatgagtggaatcatacagtatttgtctttttgtgactggcttatttcagttggtataatgtcctcagagttcatcgatgttgtagtatgtgtcagaatttccttcccttttaaggcttaatgatactccattatatggatagaccacatttgtttatctattccttaccttttggcttttgtgagtaatgctgctatgaacatgggtgtacaaatatctctttttgactcagttttccgttcttttgggtatatgccctgaatgggctttctggatgatcactggactcacttttcagtgtatggaaaaattcccttctcttttatatggatgtttccttctactagtataggtaatattttctattaacaaatacatatatctgtatgtacagattttgtaattgatatagaagaaagggcatgaaatgaaatgaaagatttgccagaaatctattttctgtgtgtgtatgtgttgaatatgtactagttttccttggctggcttactttgcagataacttctatattaaatagtaattatgtttaattacattttaaaatgtaagattgcaatacagagcagaaggataattaggcaagaaaaacacattttatatttggggtcacctgataacgtgtatgtattttatcatttatatatttatgtttgtaacattttctgagtggcaactatgtgcaaggcactgcacaaagtaccaggagtactaattctcaaccacccaaagggcaaagtctagtgagggaagaatactcgaaattaaaattataaagcaagtgtgatttgaaaaatgtttctgaaagtgctatgggaccacagaggaaggcatgtgatacagaccactcagaggagtctatgatgatttcactaaggaggagccatttatattaggtattaaaggatgtatggaagtttgccaagaggattagaagggcattctagactgagggaaaatcgtgcaaaggcagatttgatagaatgttcaggaaatgaccaaaaaacaaaatgatgtgaccagaatgttgaatgtgtgttgtggggagaggcagtgagagtggtgatcatcaaagcataatagggtagatggagggcaggctcatcagaaactagttatttgtaaacaagagagtggcatagcttgatttcgtttaattagcagtttatgtttttagattaacccaggcaacaatgcagggccacaagttgcgattaatccaagtgatagatggtgagagattaaatgaaggcaatagaaatatagaaaatgagcaacttttaaaaagcatttctgaaataaaagcaacaggactaggaggtgagatcctcttccagagaacagaaagcaaagttaaccaagaccttgaggtgtctcacttaggagacttgggggaatggtgatgccagaaaataagttcatgagtggtggacaaggaatgatttgtagagaagttatcttaatccatttgtgttgctgcaaaggwatatctgaaactgtgtaatttataaagaaaagaggtttacttggctcatggtgctacaggctgtacaagaaacatggtgctcacatctgcatctggtgagggcctcaaactgtttcccctcatgttggaaggccaaggggagccaacgtgcagagatcacatggtaagagggagaggaggaggtaccaggctcttytcaacaatcagttctgtggctgaatgtgatggctcacacctgtaatcccagcacttygggaggccaatgcgggaggatggcttgaggtcaggaattggagaccagcctgggcaatatagtgagaccttgtctatacaaaaaaaaattttaattaaaaaaaaaaacaattggccaggtatggtggcccatgcctgtagtcccagctacttgggaggctgaggtgggagtgtcacttgagcctagcaggtcaaggctgcagtgagtcacagttgtgccaccgtactccagcctgggtgacagagtgagaccctgtctcaaaaaaaaaaaaacccaaatcagttctcttgggaactaagagtaagaactcacttccacccgaatggcaccaagctatttataagggatctgcccgcgtgatccaaacacctcccatgaagccccacctccaacattggggagcaggtgtcaacatgagacctggcaggaccaaacagaccatatccaaaccatagcaaaagtatagggaaatcataaggaaatataattgcttcttacagcttttttgtaatttaggttttgtttgtttggtttattggttttgtttttttttttaataggctctcactgtgtcacccacgctggtgtgcagtggtgcagtcatagctcactgcagccttgaacttctgagcccaagtgatccttccgcctcagcttcccaagtagcagggactacacgattatgtaccaccacgccaaactcatttttaaattttttgtagagatgagatctcactgtgttgccgaggctgggcttgaactcctggcttcaggtgatgctcttgccccagcctcccaaagtgctgatgtgagccatcgcacctggcagcaatttagttttaaatgttgtatcaacaataaaaagaacattttaaatggtcatctctcaaagaagaaatgtgtcttcaactcttttttttcttttttttttttctttgagacggagtctttctctgtcacctaagtggcgtacggtggcgcgatcttggctcacttcaacctccgcctcccgggttcaagcgatccttccacctcagcctcctgagaagctggggttacaggcatccaccaccacacctgctaatttttgtatttttttttagtagagacggggtttcaccatgttggccgggctgatctcaatctcttgacctcaaatgatccacccaccttggcctcccaaagtcttggcattacagatgtgagccaccacacccggccagtcttcaactcttgtctaattcctataaggagaacttacttttctcaatataaacattttctctcctttaaatgtaaatggattttggatgttagtatttcatgcaaagcagaatgggaacgagcaaatgttgatcccttactgaaatgcgactcagtttgctatatgtattttattttatttttctccccgagtccttttattccaaagaaatattaattgctgtccttgcctaaatttcttcctgatctttgtttctatctcattttggattgtcatatggttttcttggtggctttactttgggtgaggaaacatgtttaaatgtcataggttgactgaggctgtgggtttattctggagagattctgtatagtcacgtgttaaccctcttttcatggtgtttcagctgcacttagtgcattggaacgcagtcaaatttgaaaactttgaggatgcagcactggaagaaaatggtttggctgtgataggagtatttttaaaggtaaaaaatctcaccaactttaaatgaygtgttgtattctaggatgaaaagatagaacagtataatattgttatttactttaagaatattgggatccctacactggtaagataaatagtgattgttaaggatatattttaaatggcatgaaaccgtgccatccaatagagtggtcacaagccacacgtgacagttgggcacttgaaatgtggctggtgtaacttaggaaatgaagatttaatttacttctaattcacttaaatttcaattaaaaaactgatattcaattcagttattgaaaaacttttgggttgggcgtggtggctcacgcctgtaatcccagccctttgggaggccgaggcaggcagatcacttaaggccaggagttcgaagccagcctggccaacatggcgaaaccctgtctctactaaaaatacaaaaattggccgggcgtgaaggcaggcgcctgtaatcccagcttcttgggaagctgaggcacaagaattgcttgagcccacgaggcagaggttgtagtaagccaggatcgtgccactgcactccagcctgggcgacagaacgagactgtctcaaaaaaaaaaaaaaaaaaaaaaaraaaaacttttaagaatgtttggaaccatttggatatgtatatatatgttttcaagtataaattttttgaaatctaaatatagatcaagtatttttgatgaaaaaggtagcatccaaatkgagatgtgctgaagtgtaaaatacacaacagatttttaaaacttagtatggaaaaaatataaaccatctcattaataacttttcgtattgattacattttgaagtgataatatattgaatatatttggtaaaataaaatattaaaaaggatttcatctatttttactttttaaatgtggtcactagaaaattaattacctctgtggcttgtatcatacttctgtttttaagcattggtataaaaggataaaggcgaataaataaataatagttaaaatgtaagattaatgtattttaggccaggtgcgatggctcacacctgttgtcccagcactttggggaggccgaggcgggcggattacttgagtccacgagttcgagaccagcctggccaacatggtgaaaccccgtctctactgaaaatataaaaattagctgggtgtggtggcgggcacctgtagccccagctactcgggaggctgaggcaagaggatcacttgaacccgggaggcaggagctgcagtgagctgagatcgcgccactgcactccagcctgggtgacagagtgagactctgtctcaaaaaatttaaaaaaaaagaatacattttaaacggaagaatgtattttaagcagaatagaaagataaaggcaaataactaggaaatcttgaagggaactaatattcatgagtgctaagtgactccatatttgccaagtgcttagtttatctttctaagaattcggcaatattattgtctccatttttcagatgaagaaagtgaagctcagcgaggttaagtgctttcttgctaggtcacacagctagctaacggaggactggggttaaaaatccataggccacactctcatggggcccctgagctcttgcaggttcagcagctacaggcttcctgcatgcttccaactttagtctgcactagaggctgagcgttttaagggtacctgggatttgttttagtcgggtacagtaagacatgcagacatgggaatgactgtcatgaaggaagaagttgatcctrtttccagatccctagaagctggaggcatggcacactgtgcagagccacatgaggaagcaccagggttggtcaagaggcagagaatgtgaggggaaaatgcgggcaagagcttttattgtggtttcagtgggaaggaacaggcgaggcagggtaagcaggcttgggattggctagtttgaataatttcagagtgttctggggcctagggggctgtccccacttggctgatacctgaccgtggagtgattggtgcaggagaacagtggccccagtctaagagcctgataaaggagatggtggggctgtaagctctggattgcatatgaaaggtgctcttgcagttgtctgttctctctgggaattagccagccttgggagggacagtgcttgtggtgtcaacaagtccccagatatcaaagcattaaatacaaaagctattaatagaaaacgtgctttatgtactgagtctcctggaacatgcccttgaggacttaggggcctgcgccgaaagcctggccttcatgtgctgtaacctgtttgaagagcttcagcctccagggtccctgtgggccaaggcttaggaaggcccggggaggtgagtggagcaggagcacctttccctgtggactgcaggcacaacgtcagacagcctgctcatgtgttctgtgtccagtttagttcggtgatgtttataacattctaaattgccagtttaagtggtttcagactgtgatttgcttttaggtaatcaccagatggtcatttttaattcatatttcattccaattctacagtgagatgtccgttgtttttaatgttttctcatttgttgttctttagctaggcaaacatcataaagagctatagaaattggtggattccatgccatcaactaagtgtggggtagtatttttcctaaattgcctgaaatatattttgtgtttcaatctcaagagtggagacattaccaaggcactttgaattgggaagtttaagtaggtgaactgtattccagttctctttcaacactgccttagaaggagacctgtaatttatgaatgaccctggccctgggtcacattgcaggggacagaagtgatcatgtgggtgggccagtgarctttctggttttgctgcagtgccgctgaggacttggggactcaggaacatattgctgtcccctcctctgttcctgacaccggctccttctaagtccttgtgaacacacccagagcagccttctgttctgtagctgccatcccacaggcagggagcagagcgcagttctacagaaacttgccttgtccagctggaaagaacaatgacccacatccttcaggttggatgcctttgtccagccccccaagattatttcttctatattcagaatctcaaagggctgtgctctggaggcccatatattgtctccttctccctttcatcccccactgtatccttctggtccccacctctttccccctgctttcctctccatttccctcttttttcctctctccccttttagtccaggtttctggctcctcctgatctgcatttcattttttgtttgtttctatcaacttttattttagatacagggggtaccatgtgcaagtttgttacataagtatgttgcatgatggtgaggtttggggtacagattccatcactcaggtaatgagcacagtaccaaatgggtagttttttaaccctctcccccctccagtaacccccagtgtctattgttcccatctttatatctgtgtgctcaatgtttagttctctcaagaacatgcagcatttggttttctgttcctgcattaattcgcttaggatgatggcttccagctgcatccatgttgctgcaaaggacattatttcattttttatggctgtgtagtattccatagtgtatatattacattttctttatccagtccgccgctgatgggcacctaggttgattctgtgtctttgctattgtgaatagtgtgacagtgaacatatgagtgcatgtgtctttttggcaaartgatttattttcctttgggtttatatccagtaatggtattgctgcattaaatggtagctctgtttttagttatttgagaaatctacaaactactttccatagtggctgaactaatttacattcccaccaacagtgtatatgcattccctttttgccacagcctcaccaacatctgttgttttttgactttttaataatagccattctgactgttttaagatggtatctcgttgcggttttgatttgtacttttctgatgattactgatgatgagcatttttcatgtttgttggctacttgtatgtcctgagaaatgtctgttcatgtcctttgtcccttttttaatggggttgtttttctgcattgcattttaaaaggaaaattctcagtctcccttgaagaagtgaagcctccttctttatgcactggccactgtctaatacctcccagcaatactcagaggagactacctgctggaacctcactagaattgagagatcaaatggttttggctgttttcccactggagaatataaaaaatacacagttaattttagaaacaaaggctgggcatgattccatcctaagcagcaattcttcaggtagctgcccagaagggcctggagctcctctggaccactgctgatctccagatactccctgagaaccgtcacctcggcgtccaattcctgagtggttttcactactaaataatgactcagtgacccagtctcttggccaggacgctgttatggaatttgggtcgtttggcacttcctgcctggtgcccacctgtctagattactggacccaagtaggtccagtatctccctggtccagccctgtcttgagtccatcacctttatcattaagaagcagccagtagaggttgatgatgatcaggtacgttctctccacaattttcatctaaggaaatcctcgtctccccttttaaaacaaggctgggctcagactgtggcatcagttttaacatcttgtaatgcttatacatttttattgaagtrtaccaacgtcttatctcagtttggacatgaatttagagatatttcaaattagctagagagaagagttaaaacatagaagaacataagctttttacatctatatttgacagtgacatatgtttttattatacatgcattgtgtagattctctatgaaaattaagacccttttaaataaaaaaacgaaggctggaaatgggtgtattcaaaaccctttaaaatccttaagggagttttgctatagaatctcaggataaagacagactccgacaatattcatccagaaattttcatgtaagtcagttgtttgaaacttgggatttatttttctcttagaaactaagtctaagtggtggttactacatcagcacacaaaatcctgtttaattcataaactamactgtaataataactgcgtttacttgttcatattgggtttttattgactaaaagcttccagcctctttttcatgcagccaggataacagtgataccaaaacctatcaaagattagaccatcctacccccaaaatataacaataggccaatatctctaaaaaatatgtaacaacagaaaaaaaagctaaataaaatagtagaaatagaatctagcagtgcattagaagaaatatatactttgtccaggtagggtttattccagtaatccacagatggttcagtactaagaatgatatacttacaattaatggatttcatcccatcaacaaatctatatgatcatttccatggatttcctaaaatacgttagacaaaacccaccatccctttaaaawtttttttaataaaacagaaatgaagaattccctaactggatgaagtagatttatctcagctcaaaaataaatagtatgtttaaygtggaaaggatatcattaactccatggttattagcatactaaatattaaatttaattgaattaacctctggcaggagccaataaagttaggccaaaaaacataaagaacattagagaaacactaaaaactcctasaaagataattcagcaattagtggagtaccatgtcaatttatagaaatcaattccgttggcatatataactcacagttagttaaaagacataacagaagaaggaaacctacttataatagaaactaaaataatgttaataaacaacataaaatgttaagaaagctataaaacatttctgagggacacagaagacttgactttataaaattcataccctgtttttacataggaagatattataaagacacctttgatgtcagttctccttaagttgattccataaatttaatatggttttaataaaaataccaacagaattttaaaactagatatagtacttctagagttcatgtggaaaagcagataagcatgaatagctggaaaaattctaaaggaggaaaataaggaatgattagacccataaggctttaaagccacaataattaaatagtatgatactagcacatgaataggaagataaatcaaggaagaaaatagttcagaaatatgtccaaatacatgagaatttactttatggtaaagataggatctcagctcaatgcaggaaaagataaatccagtaaatggcattgggggacaactgagcaggcatttaggagaaaaagttggacccatcgttcaatcctgacaaaaatatattctggatggaacaaaactttaaaggtaaaaaaatgccatagaagtacgaggataagcataggaaaattctttcatacatccaagtggaggaagcttttctaactataaatcaaaacccagaagtaatcaagaaaacaactagcaattagactacatacaaaaattttaaaatcctttctgatgaaaatcaccgtaaacaaaagataaatgacaaacagggaaaacatttgcaactctgttccctcattcagctactatttattcaatgcctactatatgccagctactcttctaggtgtttgagacatcatagtgaacaaaacagagagttaattgccctaatatacaaagagtttctagaaatcagtttttagataatcaacagcaaatggtataaacagacagcttacagttaaggaaacaagaaacccaataccatgtgaaaaaattttcagccttgcttataaaaagtgacgaaacaagatgaaactacactgaaatacaaattttcacatatcagattagcagaaaccccaaaattgtattgctcacagtgctggtacaagtgtggagcatgggcagcctcatgtgttactggtaggtggtaatgacacatgaataaagatataataggctaaaaagtatgttgttttactaatagttaattacaatatcaaaggaagatacaatgctaagttggtactattgtagtagctatcagagtgcagtttaccaaacagcaatttatcctacacataaactgcagacctaaacaataatacatatacatagttattctttgcaccattgtttgcaaacaacctaaataccagtcacctctatggcattcctcctccaaaatttgtattccctcatctaaatcatgagaaaagacaaaaccaaactgaaaaaggacttctacaaaatacatcaccagccgtcttcaaaagcatcaaggtcatgaaaaacaaggcagaaaaactccagagtggaggagaccaaggaggagtaggttctggagaagacaaaggacacttgggcaatctaaagtctggagttcacttaacagtatcaacccaatgttaatttcttagtttgatgaatgcatcgtgattatataacattagaggaagctggatgaaaggtctcaacctcagcaccactgacattgagggcagatcattcttggttgtggagactgtcctgtgcattgcaggatgtttaattgcatccctggcctcgactcactgagtgcctatagtaccacctccccaggtcatgacaaccaaaaatgtctccagacattctccactgtcaattgcaaactcaccccttgttgaacaccactgatagacactaatccctaatatcaactaaccaatgaaatgctgtacctcttgttgtatgagaagaagaaacagacatcttctcaagtctatgagaatggcttttaactaatcaacaccttgattaaccagtagaaggcatatttagtgatgattcgcttatgactgcctgtacctcaccgggacaaaattgtggtttgttagagagtctttagccacaaacagaataacaaccactggcttatattgcaaaaaggatatgggaaattctatagatattggaaagaaaaatatattataagaagtctaggccgggtgcggtggctcattcctgtaaccgcagcactttgggaggctgaggcaggcggatcacctgatgtcaggagttcaagaccagcctggccaacatggtgaaaccccgtctctactaaaaatacaaaaaattagctgggcgtggtggtgggcgcctgtaatcccagctacttgggaggctgaggcaggagaattgcttgaacccgggaggcggaggttgcagtgggccaagatcacgccattgcactacagcctgggcaacaagagcgaaactccatctcaaaaaaaaaaaaaaaaaaaaagtctatacctactctgatgccattatcttgagatgtcttagatatgaataaaaagtcattccactcattatgagaactgtctttagaagaaaattatactgaattataccataggaatatctctaggttttgaaaatcatatacccagagatgattccataaataaggaatcaggcaaaaaaccaaaggaattcattggtgagaggagagtgttagggatctcattcccctgcaactactggctgaccccaaccctgcattgcaaaacacttggccccctctgacctcaaaaagcatttggtgcttcctcattaagctctatttattgtctttactattcacccatctgcctcagtctgggccaaatctattgcccaatcttcaattggttgcgacttttttgtctcttcccgattctggcattccagagggtcaataggttccttctccacgtgcttttgagggaaatgccccccccccaaaaaacttttcacaccaccttgaacagactctaaacttaggcactacagttactaagcagcctttggattctttgtttttgaagttagatcttttcagctattagtggaaaatgtgcctcactctactccaggattaccaatagaaatgaaaggacagaaatggcattagtgtttagagaagattatgtatatatggctgtrtgaacactgaaaattatgagggtcaacataaaatcagcattacaggtactaaaacataaatcctgatggctttcaccgttttcttaagagcaaaattgcaaaaagtgatattaacagtcatcctagacgaatatgagcaaatgatttgtttttccttaaaagagcctccaagtgtattgtgatcattttcacactgatcaaagagagcacccttctgtcaacaggtatctgcagttttcaggacctggcagaaattcttctatgttctgcctttaaaggtcaggtacaaaagcagagacagctgccaggcccctctgcccagagctaagtgtctgggaccatgagtgggaaggactgaggcttgagcctccttggtcctccagacagcatggggcgcyacttgccccttctgcagctgcrcgcsgcaaagctgtggcctggccgtggcctcctgccccatgcaacagttggtggacagaccgtacctggcacacggcgccttgtgcactttccaacattttgatgctaaccgtcgctagtcactgagccctgacatttgatctctggccttgaccgcagatttcggaaacttctggcagcccagtgtctactggaaggcccaagccgcttgccagaaagctgcgccccgcccaaaagcactgggttctgcagtccaggcccttcctcagctcccaggtccaggagaactgcaaggtcacctacttccacaggaarcactgggtccgcatccggcccctccgcaccactcctcccagctgggactacacccgcatctgcatccagagagagatggtccccgcccgcatccgcgtcctgagagagatggtccccgaggcctggaggtgctttcccaacaggctgccgctgctgagcaacatcaggcctgatttctcsaaggctcccctggcctacgtgaagcggtggctttggaccgcccgccacccccacagcctgtccgcagcctggtgaccgtgaaaatcgccccgccagagagcagaggaagcccgacgcccaggccatctgccttcaggtctgtgatgagaaacggagtggcctgttccgttgtgcccaggtctaggccgctgagcagagccctcactcccaggcagagttgtctgaatccttcctggcggccgcctgctgccctgacgcctcaggcttgcctgcacctggaaggagcttcgccaggtgggccatgagcctctgagcacacccagcctgctgcccggctccaagagtcaggcccctgccaccacctcctgagcctccagccctcagcaccttcaccctactgaccgcggttctacccccacaccagccaccggccccaccggggcacttcccactgctccagccgaccactcagcgagccccaggcccacctctcctctcccttaaagcccttcccttgcccttgcccattcgctcctgccttctccctggggacaggaggcatgcttctccccagtttccrcaataaaatatttgttgttaataataatagrtgtctttattatcatagagattgtcatattctttctttcaaagacgacaccatggtttctccagcttggcactactacttgggccagatggttctttcttggtggggggggggagggnnnnnnnnnnnnnnnnnnnnnnnnnnnnnnnnnnnnnnnnnnnnnnnnnnnnnnnnnnnnnnnnnnnnnnnnnnnnnnnnnnnnnnnnnnnnnnnnnnnnnnnnnnnnnnnnnnnnnnnnnnnnnnnnnnnnnnnnnnnnnnnnnnnnnnnnnnnnnnnnnnnnnnnnnnnnnnnnnnnnnnnnnnnnnnnnnnnnnnnnnnnnnnnnnnnnnnnnnnnnnnnnnnnnnnnnnnnnnnnnnnnnnnnnnnnnnnnnnnnnnnnnnnnnnnnnnnnnnnnnnnnnnnnnnnnnnnnnnnnnnnnnnnnnnnnnnnnnnnnnnnnnnnnnnnnnnnnnnnnnnnnnnnnnnnnnnnnnnnnnnnnnnnnnnnnnnnnnnnnnnnnggacagaaaacattttcaccagttttctagaatgcttggggtgtgaatgattcctgtggtctggtcttactagcaatcaggaaatgcaaaattgttacaaatgagctactattttaaacgtttcaaattggcaacaatttaaaagttaaataataccaagggctggtaaagacgcatggaattggaatcccaggtgacgctgtggaagcaaggagtccagccactctggaatggcatttggaagtgattcccagaacagaaaacgcagctaccagaaaccctgtggcacacatacacagacactggtgaggatgttctttgcggcactcgtcaccatagcagagaattggaacaacccaaatgtttatcagtacgggactaaagtaaatatagtatatgctgtcgagggaatactgttccacagattaaaggaaagaagccaggagcagtggctcacgactgtaatcccagccctttgggaagctgaggcaggcaggtcactttgagtttagaagtttgagaccagcttggacaacatggcgaaatcctgtctccacaaaaaatacaaaaattagccgggtcttggtgttgcgcgcctgtagtcccagcttctcaggaggctgagataggagaattgcttgagtctcggcggcagaggttgcagtgagctgagatcacgccactgtactccagcctgggtggcagaacaagactcaaataaaaaaaaatataaaataaaaaaaaaacaggaaagaaatagcgcagggtttctcaacatcagtagaaccaggctagataactctgtgtgagaatactctgtgtattgtaggatgtttaagagcaaacctggcatctgtctaccagatacccttaggactaccagcagttgtgacaatcaaaaatggctccaggcctataatccccgcaatttgtgaggccaaggcaggtggatcacttgaggccaggacttggagaccagcctgggtaacatggtgaaaccctgtctctactaaaaatacaaaaattagccgggtgtggtggcacatgcctgtaatcccagctactcaagaggctgaggcacgaaaatcacttgaacccgggaggcggaggttgcagtcagctgaaattgtgccactgcactccagcctgggtgacagagtgagactccgtctcaagaaaaaaaacaacaaccaaacaaacaaaaacggctccaggagttgccaaatatcccctgaaggacaaagtcacccgctgatggcaaccactgagctaagagctactttttttttaaaaaaaggataaatctcaaaagtactttcaaatgaaaaagattggaagtattttgtgtagcacaatgccatttattcaaataatatattttattacataatatagtgcttataatttaattcatatttatattttatttatatacttatatrgcaattgttcattatatatgaattaaaatattcataaaattgaggtattttgaaatcttaatatgtaatatattctatattaagtttaatataaagatttcatcatataaattatataaaaaatataagattatttctggcatgatagaggaggccagaaaccaggtaggaggtaatttggataccttacccatattgttatttttatctaaagcctctttaaatactgttcaaacatgaatcacatggtattcccctttagagagtcatagaatatagccataaactaaagcaaattcccttctcatggagcttgctgtctaaggggttggagacagacgataaacaagtaagtaaatgcatacactgcatgctggtggagggcaggaaggcaagtgctataaagaaaaatagggagggttgcattaaactctcaacccaactggggccccacatactctccttgtcccaattaccatggaatgacactcttactatgtatgcaagttcatcaaatatttcagtgttttctttggtggcaactcatactttaatagagtaccacacaaataaaatgaagatactttatctacttagaaataaagattcccataagatttaaattgttgctgaaaatattaaaccttacattttcaatggagacagttttggttacacacaaaaagtcctggactgaagctctaaaaatctagcttttagtctgaaattttccactcccccatctctgtgattgacaaggcattgcaatgtgaatgaggtacaagaaggggcttgggttctgtgtgcatcaatggtgacacttttggcattttgggtggggtactccttgttatgtaagatatatatatatatatatatatatatatatatatatatatatatatatatatatatatatatatatatatatatatatatatatatatatatatatatagatatatatatatatatatatatagatatatatatatatatatatatatatatatatatatatatatatatatatatatatatatatatatatatatatttagatatatatatatatatatatatatatatatatatatatatatatatatatatatatatatatagatatatatatatatatatatatatatatatatatatatatatctatatgtgtgtctatatatatatatatatatatatatatatatctatatatggtgaggggaaggagatatgtagagagggagggatatatataagtgtatagtgatgtataggggtggggagagggagggagaggtggggtgtgtatacggagcgattgggcgatatgtgaggtagagggagcgnnnnnnnnnnnnnnnnnnnntttgtgttcttgtaatcttcgaagtatgatgggggtttgtctgttgttagatcggaatttgacagtcatgactcttgcgggcggtcgtgttagctttttagggcgattaataagttttattatcgacatgggaaggggtatttgtggggagaaaacaatgctagacctgtggtggcgtttggggaaaataccagtagggaacttatacaggggggtcatatgtaacgctagtgtcgtaccgtggcaggttatgggtaatgagggggcatggttcaatagcgacacgtgatgagactaaaacgagttgacgacgatgcgcgaattggtttgacctcgatacggcgataggaggtaaccgagttgcctgagggcgaaaaaaggttgtgggtcactccagatggggtccacataaataatccccaccctctaaataccatagcactctccagtcatggatatagctccaaaacaacccctcaacatttctggatgctgaggcaagaaagacttctaaatctttgacatttattttcacactccacttgcctgcttcttgccaaaaattttctaacaaccatctatagttattcagcaagggctggtaattattcattcatttatttgggcttcatattactttcttatttttttcatattrctttcttcttgtgaattatttcacttttagaaattttattctttgtatagttttagagtttacacaataattagttctttgaaatgctgtcttgctcatttgacgtagctttttgtgggcgttaaccccaaagctgctttccacaagacacatctgagctgtcagttgtattaaaatataatagtgagtgtgtgataacacaagtccataaattgcttgacactcctccctccagaagtgaagcttaggtctcctcccctaagtataagggtttagagattcccttctgacagttacagtttggaaagggaaacttgacaggcaccacgtgatccaagggatcaaggtgaacttaacagtgatgtcatgtgcatatcagggaccctgacaccatatgctgagaagggcacttcacctcattttcttctccaataatcactgtgttctggctaaattatgagaaaacagcagataatatcccgttgagaacttttacaaaatacccagtcaaccctcttcagaagcaccaaggtcatgaaaaacaaggaaagactgagaaacacagagttgggaagactaaggagaaggagatctaatcgcctattgtaatggatgcatcctggttaggtataataatagcattaggggaactgggtgaaggggccagagcaggctttcacaacctcaacatttggggccacctcattgctgagggaaccatcctatgctttgtaggaagtttaccagcatccctggcctgcacatgccagcagtacatccctttcaccatagccccctacctggccaaatagtgaacccaacagtaagtacctctgtatagttccaaatgttctggggtggggaaagggcacaaattgccccaggttcagaaccgttgttacacaggaactctatctctgcaactattttttgaatctaaagttattttaaattatgacatatatatgtatatgtattgatatggtttggctttgtgtccccacccaaatctcatctcaaattgtaatccccatgtgtcaggggagagacctggggggaggtgattggatcaggggacagtttcccccatgctgttctcataatagtgagttctcatgagatctgatggttttttgtttgtttgtttgtttttggttattggtttatttggctggagtgccttggtgtgatcttggctcactgcaacttccgtctcccagtttcaagcaattcttctgccacagcctcccaagtatctgggactacaggtgcatgccaccatgtgtggctaatttttttatttttagtagagacagggtttcaccatgttggtcaggcttgtctcgaactcctgacctcaggtgttccaccctcctcggcctcccaaagtgctagggttacaggtgtaagccaaaatgcccagccagaccctatggttttaaaaggggctcttcccccttccctcgcctgccaccatgtaaaaacgtggctttgcctctctctcgccttccaccacaattgtaagtttcctgaggcttccccagccaygtggaactgtgagtcaattaaacctccttcctttgtaaaatacccagtttcaggtggctctttatagcagtgtgagaacggactaatgcatgtgtatatctataaattgatatatagatgtattttagcaagagctaagcagttattgaaaaagttgcctaggcactataaattaaactacagataatgacataaaccactggataaattacaagttctgattggcatcattgataatgacataacagctagaaatatactttgaaaatagtgagatatattcaaatgcaagatattggcacctgccaggtgcagtggctcatgcctgtaatcccaacactttgggaggctgaggcaggaggattgcttgagcccagcagcttgagacgagcctgggcaacacagtgagaccctatctctacaaaaaaaaatttttttaaactagctggatgtgatggcatgcacccatagtcccagctactcgggaggctgaggcaggaggattgctcaaatccaggaggttgaggctatagtgagccatgattgcaccactgcactccagcctgggtgacagaataagaccctgtctcaaaaaaaaatgttttaaagacgttggcacccatatgttgtaagaatagtcttagtaattattcaaaattttaaaaacttggcttttttctagatgtccaatgcactgtccattgcatgacagagccaaaacttagcttttttctacattcacatgtttcatatgtttgttattatgccatccactatactaatgccttaagtagcaccatttctgtcatttcttacaggattggcattaggaaaaaaggtgaatagttttacttgcttagggtctttaatggaagaatactaaacatccctcctacattatggtgctgccaagagtagtaaaatctcagattttaagaaaacaaaaaagttactttgggctcaataaatagcagtcataaaaatatacctttagagatgtgtttatattttgttcacatacatgcagttgaactaggaattaataagcccacttcccacagtagsaatgttgtgggaagggggccaggggaaagcctagccctgctctgaaagcagcaaaggctgtatatgaagatggagacacactctgggctggtgcttcctacttgcttggatgatgctttcagaaactaactgacgtcttggcctccccaagagtaagaaaccgaggtccaacaagagctaacacccaggcaacagggaactgcttctactctggccattgtgtgccaaatccaccatgggagcatcctcctatgggactgaggcgaaaaagagaaagaaattgtgggcgggggtgggggtgggtgggacactgttttcttgcatccactgcacctcaatagacaggcctctggtttaagagtcaggatgttaaacatgcttcattcactcacaactatttactaagagctaaccttgattagccagtatggttaggaaaagagttcctactacagcggcctttagattccatgccccatcccatgcaggaatttagtgatgctaagactcttgaaaaccaagaccagagtcttgagcccaccagagcattaaataccaaagtggaagccagtaacccccacggtggcagaatttgcacatagttccatgccctatgtgagaatagacccaggacatggggaggacaaagagcttctagatttcacatggcttgtctgcattctttgtcaggagggtctctaatccctgccctgatttgaacttcatggcctccaagcaaagagcacctattttaatttgatcagttgcagggtcactagggagactatcaaatactttgtccatcagcaacaaatagatttctttgttccctgggacatgagaacatgagacccaagtctttcctgtgcagtgagcccctgtattcctgaagcttggcccatgtgggtcactcagtaagtgactgtgaaatgagtggatggatgacaaaaggttaacatctcgctgtttctggaatttttccccaagagaccctgtcaaacatttagttgggtaggagctgcattaataagagagggaagaaggaagagagattacttccttaaaacttcccctacccggatacaaatattcagagacacatcataacaaaaactatagtgaaaggagaatcctgaatatactgtagattgaggtagccaaaaggaattgtaaacataaagcgagaaaatttgtgctaaaagagaagtcacatgaagaacacagctcagtagttaacttctttagctatcaaaggatagacatttcttctcattataaattttgtacaactagtgacttcatggtctttcttccaaatgtcactacattgaatgtcctccaagattttcagagaatgaaaaattaaccaacaagcacttgttcagctggacatgtctttaataaacaaaccaaagtaccattagtgtaactaaatagaaatcctgcattttcaaggtgttaaatatagatgagtctgatgaattcacttcagtaatcattttgaccagtgtttttaccaagaaattatattaactcagacacaaatgtcttctttaagcaagtcgcgaaaaagaggtaaaagtgtttactctccttcctcaagtgtgggaagccctggtctgaaggtttctctaagaattggctccactgccatttttcatcaatggcgctagacagggccaactgcctccaaagagtagtaagaattgggctcttgtttttggaaatcaaaagaactaaataggcactgggctgctgttttacaagcacaagactgttaatccccttaccttggatacagcagcacattgttcctttttagatcacaagattcatccttgaataattaggtagaggcagaaatccattatatatcctacaccatttagctcagaaaaagaaagccatgcctgagctagacctctacctctcttgctaaaaatgataaattatctaaaagccgacatttgagtaaactaagcagatgaatttcccagttgacctgagaaatagtcaggggctgtagataaataagagaaggaaggagagagaaaatttcccagttgacctgggaaatagtcaggggctgtagataaataaggaaggagagagaaaatttcccagttgacctgggaaatggagtaaacgttatagcttccttagaaattactttcaacattgtaaaatccttgtgacatcattttagtagatctggcctaaatcttataattagttgaaacacccagtttttcaaccaataactgcagagttgacatttcctatgtaagtcccaagaaaacctcaaatagaataacctatagatattagagcattcttctatcaactaagttttttcatctaccattctacttttttttttttttttttttttttttttttttttttttttgagatggagtctcactcttgtcacccaggctggagtgcagaggtgtgatcttggctcgctgggacctcagcctcccaggttcaggcgattctcctgcctcagcctcctgagtagctgggattacaggcacgtgccaccacgcccagccaatttatatatttttagtagagatgaggtttcactgtgttggccaggctggtctcaaactcctgacctcaggtgatccgcctgccttggcctcccaaagtgctgggattacagacaggagccactgcgcccggcctatcttccattctgcttttaaggaaaaccagcaaataacaagaaaaccatttaatgtaaagatttgtaaataatcayttcaaaagaagtgccttgttgctgtcacatttagtccatcttcatataattcttatctgggccagtttcttgggcatgggacatgtgcagttacacaagcctgtgctcttaagagggtcttacccatagtttaatgttctgctgttgtagtcttgaaattcttaatgatttaacaaggggtcctccattttcattttgcactgggccctgcaaattacatagcccatcctgatttctacarctatagaatagcacaatgggaattccatatggattaataatatgtgacacttacggctttttctatacgcttccaagtacttcatataaattacttcatttcattcaatggtagaattgrtagatgcttaacttttaatgaaagacaaagtcagattcactctaaggattaaaaaatatatgtaacattacattttaaagattttcaaaaacaatttgttgtggaaatgaattattgtcatgagatattccccactagacggacttcctgtagggtcaggggtcctggtcttctgtagggatgagcaagcttttctgaagggccaggtgctaagtgtctcaggctttgtctgttaggactacccaactctgctgttgtagcaagaacacagcctgttagcagcagatactcaaatgaccaagcctctattccaatgacacttggtgtgtggacactgarattggaattgcagataattgttaggcatcacaaatctttttcattttccaactgtttaaaaatgtaaaaatcattgttagcttgtgagctgtataaaaacaggtaacaggctggatttggcccacaggccatggtttgctgactgctgatcttagccctcatttgactctcagtgcccagcacatagcaggctttcagtagaggtcacttaatcctgtggctccagccacagcagtgtagttccacgggctggcctcatggacagcagtgaaggaagaggttgatgttgttcacactgttccctttgggcactctgtcagctccttcttcctcgcctcttgacagcatctggggcagatggtgtggctttcctgtcacttccggctactaaggcatccaggccagcctaaccaaaactgccttcctgcctctcacctacagctgctctccttccagcagttctggccagagcagggacctgagtggtgggctccagccatttcctccgggctccactccctactccctccctgcctgtgctcccctccaccatgcttcattctcctcacttagggacaggaaagcaaaatgatgggrgtgtgagatagacaaggaaagaccaaattcttcttcctggaccagggcccttgtggttctccckgctgtgaggggtcctctgtggtggtggtccagatgctctccactcagaatgctcctgtggagccttcaagggcccctccagggacctctgcactgcatcttcccctgacatgggtgacatgctctcactgacttcctccaccccacstcagctctgcgcccaggggtgtacacctccagcctcactcgctgccttgtccttgccctgtctcacttgaggacatgggcctaacaggcaatgactccatcctgttcccttccaaagcctctgcttggccccaggaatatatcaagtgcagactactcagaaaactgccctctctccccccagtcacaggcgctcaagccaaccttccaccatgaaacttctccagctacgaggcagccactagcttcagagtatcttcaagttttctgaaatattcatggaataaggaataagaaaaaaataaacagccaatgtccaagacccctgaatccatctttggaaaggataattctactgtgttagtttcctatggctgccataacaaataccacagactagatggcttaaacaacagaagttaattttctcatagtctagaagctggaagtccaagggcaaggtatcagcagagttggtttctcctgaagcctctctttttgccctgtaatagctgttctctccctgtcttcatgtaatgtttttgtgtgcacatctgtgtcctaacctcctcttcttttaaagacaaaagtcagattggattaaggctcaccctcatgacctcattttcccttaattacctttttgaagatcctatctccaaatacagtcacattttaaggtactggggtttggaacttcaacatatgaatttgggagggtagaggacaagattcagcttataacagctaccctccagaatttttaattcactcagtctcactttggaaccaaaagacctctggaaggtagatttaaaagctaacccatttgccaagctactggtgttttccatccacccaccacactagagagaggtagtctctttgcaaagttattttcaatgccatcttgcattatgtggtgccctttcccataggaaaaggctgttcatgtaggagtgcagcttcctttatgtcagtgcatatggaatccaccccagcacctgaattgcatgttaaacacatcctgcttcattaagctgccctcatcactcatcgccttgacagccagtattgctataactcatactgcctggcagcaagatcagcatgtccctccatgcagggcacctggccaagaaccaactcttcctgcctggaacatttttcccctggcaggctcctttttgttaatccagtcccagcttaaatgacacttcctcacaaaggcctcctcctgaccacccaagataaagaagtccctgccatcccaccccaccatatcatatcattatcaaggtagttagtagttcttttcgtttgtaacgtgtttaccatcaatttctccattggtctacagatgccatgaagagcatttcctaaggacactcaagttgtcacttgtgtgttccaattttggcttgggaaattttgtgcaccgtgggcctaacagccatcttttatgtcactgtgacctatgcagttggctgctactttttcatgcaactacacacaagtaaaggtgcaagtatgtagacagtggtggccccaggggatggtttggggagaatttagcccatgacaagttccatcagtacttctctcataggcactccatataaatgtgagatctcagtgaaaggggagcttgctgccaaaatgtagtttcaacacaagtcccgtataatctctccacccatcaacaaagaaaatttgaagccaccactgtctgtgagggtaggctttctcattgactactgaaaactagaaggaatgtttcatatatcattaatggctattttgctcataggatggaattttttttttttttttgagacagggtttttctatgtcacccaggctggagtgcagtgatatgatcataggtcactgctgccttgaactcctggactcaagtgattcttcctactcagcctcccaagtaggtgggacaacaggtacacaccaccgtgcccaattaattttttaaaaatgttttgtagagacggggtctcactttgtactcagactggtattgaattcttggtttcaagttatccttccacctcagcctcccaaagtgttaggattacaggtgtgagccactgtgcccagccaggatggatttcaaactaatttacattgcagtgaaacaactcccttgggcatgaaggaagaactggctttagatgttcccttgtactatctgtaatataacttcagataggaaaagaataacttgctgaaatacaaataaaatccaaatcctcatttcggtgaagaattttaggattctctttcctcaaagttattttcataaatataaggaaaaataaatttgagtttcactatccccttggtgcctttccctgcttaagtagcagaagcacacaaagacctctaatctacaaacttgaaaatcaagaaagactattgttgattaagagttggtacatgctgtaaagatagggaaggcttattaacacaatgtagagatgatgaatgagcctgttcaagtgtagataacaatgataagctcagagcagcagataaaaatgaagatcctacctcccaggatggcatctggaagtggatagtattctgccagctttggaaactggatgaaaagcaaatctggcagaggtacccatttcattcccagcttgctcagtagctggtgattggaagaaactctgcaacagtgttcaatccctggacaggaaaccctccttccatgattcttctttaacatgggtctgagaaaaagagaaatacagtattttttaaaatgaagatgctagccaactctcaccagaacacatacttaaattgtttttcagatcttgaggatgatttaacctgatctgtcctttcattgattcctcttaaaaccaagagcttgagctggctgggtaggggtccagttttggtcacaaaagaaagccccaagctatttagatcagaacaggattgatgtagttctagattgggttgggtatcctgccagtggaaccaacttatcctgggcaagtgtgaacagattgaaagcttgttcattgaaatacatagcatacttctcctagggcattcaaaacatttcaaagaaagagcctccatgcataagtgaaattgagcatatatactaatgagaaggtgtacaactcacaagaggataaggaaagagataatagctctcaacatatgtatactctgtgacccaaatttctattcctaagtaaatacccaagaaaaagcatacagaaaaaacacgtacaagaaggtccatagsagtttagccacctgttgtgcatgtatctgacacataataggtgctcaataaatgtatataattgaacatatctttatatcccacatatggtttcacaggccaagtgacacatactagttgtgtcatcagttcatacttctagcatgtactataaatactttaataaaaaccattttattaacaatttccattttagtctattattgctttaataaaacattggaatgaggtctttaggaatgatttactcaagcttaagataactatgcagaagggcccagcaataaagaaagtgttattagaaagcaattttttcaaaatgaacactcaggtacttcacttaccgttttagttgccagagctgctctgtctcactctaaaagcattttcttgcaaaggggttggttttgatcaacccaaaaatctggcagctgtgaaaatcaaagttaatgctatagaacagcgttgtccaatgggacattctgtgatgatgggaatgttctgtgtctgtatatggcagccactacacatagatggctattgagcactcgaaagagtggtaataatgacaaaatgtgtcaaacagagcccagtgattcctaatattttatgcaactggaatgaacaaaaaacagatctacaactgaatggctccaaattatttactgaaagtttaccctctgtcattttaggtggtttaatattttctgttgaaactcataaaacagtcacaggctcaaatttcaagcctcaacacatctgcaaatttagagaaataacaagtcctttaaatcaaagatgcactcaacagaaaactggtttgtttttgtttattttttttatttttgcttggaacagagctggatgcaaaattaggttgtttattgctgttttttaatattatttttattgctgttttgacagtggttattgtccagccttttctcttactggcccatgttaatgtatttttaagtttcaaggctaactacctggttgacagagttccacctgaatagcaatttctggccaggcacggtgactcatgcctgtaatcccaacactttgggaggtggatcacttgaggtcaggagttcgagaccagcctgcccaacatggtgaaaccctgtctccactaaaaacacaaaaattagccgggcgtggtggcgggcgcctgtaatcccagctacytgggagtttgaggstggagaattgcttgaacacgatctcatcactgcactccagcctgggccacagagtgaaacttcatctcgaaagaaagagagagagagagagagggagggagggagggagggagggagggaagaatagcagttaccaggaaaagaggtcacaacatccttttggaatagaaaacaaaaggcaaacaaaaaaggaagaaaaacccactctgcacttaaagctgcctgagccattctgtgacccagattaaaatatcagaaaaagaacaaagccaccacctaaaaggtttaatgattaacacccatcatttgggttaatattttcatagaagtcacctgtctcctgtcagttatttatggaaatctacagattcgttgtttttttccagactctacctcaaaagaatgtttcctctgctgactcaaagttggaatccttccctcaccccttctgcgagtctctggttacgtgtatgatgggaagaattgagtcctatctagaggttttttggcatgcaccttccaccttttcggggctaggatacctggttcatagacagactatcttcattcaggaaacaaacgtgactcctttctctctggtaaacaaagggtgcccttccatgaagggcctcacctgactcaccacagcgggtgaacatcccaggagagcttcagagcttcctcttacctacttgagggtagagggtgggaggagggagaggatcgaaaaactacctatcgaatactgtacttattgtctgggtgacaaaataatctgtacaccagactcccgtgacacacaatttacctatataacacacttgcacatgtacccctgaacctaaaataaaagttaaaaaagaacgctgaagttgcaacaaaacctcagagatgctctgagaattaagataatgagtgtaaaagaatctttccccgtgggcattccacagatgccaatcgacgccccgcccagaggttgatgtcagggctttcctctctaccatgctgcctcttcataaattcagtccccaaattctaccccattcctcgaaaatcatgaatggcagaattagattgggtgaccttggtgttaaatagaaatattggattttcaaagcaacaacgaggaaaatatcaacaatgagacttctgcagcactttgagaaacacatcatttcttcctccttgcaagggtggtattttattgtaaaggacccatgtccatcagctaaatccaactgaggaagctttttctctctccttcatcttggtcgcaaggacacggagtcaggaaaagctgtactaaaagaagagggagccacaacttagtccagccatcctagcaatgtcactatattaagtgcaatggaaatttccagaaggaagagctcacctagctaacccctggaaaaaaaaaaaaaaaagccagactagatgaagtcatcttgggaaatgttaaactaagtaaagtcatgatggtaaggaaaaatcaatatacatagagatagagattataacaaagcattttatttgcatcaaggaagaaagctatgctaaggacatagaaacctgcttcagctttcctttagccttacacttcataaaagtatcaagtggctttctttggcttttgcttagtcatctatatagctagggttgaagacagtaaaacactgagtcttagtgtaagtcattcgtttgagaagacaatctcttttgaatgatgatttctcgatgtttgttgtatcatctttttaaaaagagcaatataaattcttcttagaaaatacaaagaagcacaaggagaaaagtaaaaatcacctgtaattccaccagcgtcaaagaatgaccaatgttaatgttttctaaatatttggaacataccattctaagccttgtgttttcttttgtgtgtatatacataaattcttaaaaacaaaacgaatcatgctattatacagctttgtcatcttctttgctgaacttaactgtgttctgtttttgtttttttttktttttttttttttgttgttgttgttgtttttatagagataggatcttactctgttgcccaggctggagtgcagtggcaccatcatagctcagtgcagcctcgacctcctgggttcaagcaaccctcctgcctcagccgccctccgcccccacaatagctgggagtacaggcacatgccaccatacccagctaattttaaactttttttgaatggatggggtcttgcttatattgcccaggctggtctcgaattcctgagctcaagcaatcttcctgtctcagccttcttgattgctagaattacagacctgagcactgcatccgatccacagtgttactttgagtgtattcccacatcttttaataactgtctaatatttcattcattttatagatctgttgtatgcttttaaatttattttttatttttttaaattacagcaagcaatgctataataaatattctggaaactgacaaatttttattcacttctattaatatctttggtgtaaatttaaattttggagtcaaaaggtatagaaacatgtagggttttagtatgtgttaatttcctttcaaaaggattatgtcagtgtacagattatttgctgtatatgagtgtccattttccaggatcccgcgccatatattattggctctcaaaactcttttggcaaaacaagtggtatagcagtatgtaaatactgcttccatttgcaatcatttgtttcatagtacaactgaacatttttatatgttgaatggtcatttgtatttctttttctgcttatttgatcctttgcactttttctgccaaaattttcattattctcaatttttttttgcatgaatttgtgtgtgcacaggcattccttttttttttttttctttttgagacagagtcttgctctgtcaggctggagtgcagtggctcaatctcggctcactgcaacctccacctcccaggttcaagcgattctcctgcctcagccacctgagtagctgggattacaggcacaccaccatgcctgcctaatctttgtatttttagtagagctggggtttcaccgtgttggccaggctggtctcgaactcctgacctcaggtgatccacccaccccagcctcccaaactgctgggatgacaggcatgagcctccacaccctgctgtacagacattctttgccagttgttagttcccctttcaatttgatatatgatttttttgcattttcccagaaagcaatcctattatttcatgtcatctgcatatactttaaagtttctctcctgcttttcaatagtaatacctagttgttgatgttgttgttttgtctcattgtagtggcactatcacaacagagtgacataatggtgggataacatggacacttgtcttcttccttactgtaatgggactatttctactccacataatctggtgagtcactgttaaatatgatttgttttctgataaaagtatccttttatttccagtttactaaaaattattttaatcagtaatcaattttgaaatgtaactatcttttcagtatgtattattatgatcattgggttttttaatcatttagtacttttatactgataaatttctttacattgatctaacccttatataagttaatttttatttcaatttttcattatttgattttgactattttagttattttcagcaagctactagacatattttgctaggtttttcctaagatttttagctctgttttcatgaagaatagcatataggtttcttttcaggagctaattcttgaagatttttcctttttattgccaccttgaatatggtatagaaatatttctagcattttctgtgttttgaaatactttaaaaagcatatgaaataaacactttatggataaataatctgaatcatgcatatttgtggtgagaagttctctgaaaacttctcatttcttccayggtcatttgtatcagatttcatgaatctttctaaatccatttagactctacaatttccaagacaatcctttaattcattcagatttttcagtattctcatgagcattataggatattttctataaaatatctgtttttgttgctatgttctctttatatttgctagtgaatacattacttttttctcagtttcccattggacatgccagaagttttgctagttttttgttgttattttttcaaagaacgtgctcttggattaattttcacttttattctttctgtttcctgattcattcatcttagttcattgattaagttatagttgttttgctgttttgtttataactcttgagttgactaataagcttgtttacttttggtcttagttaataatgaaaacatctgtggctatggattttcctccgagtactactctggctatatgacataagaaatatagatgtatagtaatctcattatcattaattttcagaatagtctataataacagttttcattttttcctataacccagttattacatttaaaagtattttctaaatttctaagttcttttcagatttaactctaaatatatatgtatcatattttaaatattgttcttattaatctcaagcacatgaatacatatttaatcttagagtttatgggaggaaatctgtacagtttacttttaatatccaaatatattttgtaaataacttcaaataagcatctgacaatattcatttattattgttatttgctctggcattctccttttttttttttctttttttaaatttcaacttttatcttagattttcgggggcacatgtacaggcttgtttgttacaagggtatattgtgtgatcctgaggtttggggtatgattgaactcatcacccagtgagcatagtactcagtaggtgatttttcaacccttgtcccccaccctcctcctcttgtcatcccagtgtctattgttgacaatattctttttaaaggaattgtaagtgaatattgcactgttacatttctgtttttaaaataaaagcattgtcttgactttcacattattttaaagcagatatatcatattaatatgattaatactattaaagggcatgaagtggaaactttcttaaggtagtaagatttttatatcaggataaagctaattcttgcccatgggctgatgtactcatatgtttagatttgtttgaccacagcaaaaaaaaattgctaaatgtgcggcccaaagtggcaagatttcagttaatgacttgtatgggtcctatgagataaataaaaagacaaaagctcaaatgacaaatttgcgacactgccaataacttgatttcaaatatgaagacaccacaggtgacatgtcacatagaaggtacaaaaaacaaattcattgttaaatagcttgatggagatctcagtaaaataaatagaaaatggaactagatactaggattcttgcctctcaagatattatctgtatttttttaaacttttcaaaatcttgcacaaatttagtgattgtcttgatgtgcaagctttttttgtttgtttgtttgtttttgagacagagtcttgcttcgtcacccaggctggagtgtagtggcacaatcgtgactcactgcagcctccgcctcctgggttcaagcaattcttgtgcttcagactcccaagtagctgggactacaggtgcacaccaccacgcccagctaatttttgtattttttgtagagacagggtttcaccatgttggctaggctgatctcgacctcctgacctcaagtgatctgcctgcctcagcctcccaaagtgctaggattacaggcatgagccaccatgtacaagttttaagtagtaagttttcagaatctttatatctgtgtaacttgcttcataaactgctcatttcagcaacttcacataagggagcttaataacttattagtaactgtggtaatgatgacaaataaagcagtttgaatcattctgaatatgttactatttacttccaaatgttcagagtttagagcatgtagatttaaaagttcagatgactgttgccatgagccacacaaaagggcaccaagtctcctgagatgggaaaaagaaattgatttctctgtgttttttatactccacaacactcttgaaaagcactttctgggcacataactattgatctactgctctggggtaaatatgagatcacatgaaaatgaaacgtgtcattcttttgattcatgcaagatgccttttaaagttcatcagagtcataaaagcatgtgggcatatgtaggctccattcacctgcaataaaacgagaattagggagggctgatgttccttttaaatttgactctgagtattctgtttcattatcacagaaatgtagtaaacatataatgcctaaaactagtattataaattgtgaaaccatttcaaatgtgatattactctgtaaatttttattgggttttgggaaatttatctggctgtgacacattaaaagaaatcaaataaaacctttaatggctgaatatggaaacgttttataagattttaaaatcatgcatttttaaaaccagcatctaaattatttagcaccattcagaaattttctagaagttgtagatttttaatcacatgtgatccttcatagtttaatgcaatgaaattgatatgtctacataataaagcaatttcaagaggtttataataattagcccaatatttgctgaataattaagaggtaacaaaatggttctattctctttaagctatcattaggttaagatacatatggagattaaagatttttgcctcatgtgcaaagcctattctattttaacccaggggttctcaatcaggggcaattttgccccccagagaacatttggcaatgtctggagagacatttttggttgtcacaattgcagtgggcagggatgggggtgctactgacatctagtgggtagagaccagggacactgctgaacatcccgcattatgtagggtagctccaccacaaagaattatctgggtccccaaagacaatagtgctgaggtggagaaaccttgtttcaacctaatgttgctactttcattgtataaatgattttggggccaggtgcggtggcttatgtctgtaatcccagcactttgggataccaaggaggggaggatcacttgaggtcaggagttcgagaccagcctgaccaacatggtgaaaccctttctctattttaaaaatacaaaaattagccaggcatggtggcacgtgcctgtaatccaaggtacttgggaggctgaggcaggagagttgcttgagcccaggaggyggaggttgcagtgagcggagatcacaccactgcactccagcctgggcaacagagtgagactgtctcaaaaaaaaaaaaaaaaaaagatgattttggataatagatcatgtatgccttcctagtttcccaatattagaaatagtaacttagggtctagtgttttagagacaattttggtgctgacaccttaattggcatcattacttttattgttgacatgtataaataaataagtcctatactgaggaaacctcctagatgtaggtgtagtgaattttctctatacctgcttaggtaacaatgattgagttcaatcttgaactcagtcttgactgctgcctagcaacttcttgtctcagtactgcacagtttaccttgaagagttctgaacttggacttgttcatcttaaactgagaagaatgcaaagagtttgcttataaacttttgcactgcttgtacaaaatgaagttttaatttaacttcagtcttttctctttttttttttttttttttttgctgggattacaggcgtgagccactgtgcccaccctcttttctcttttaaaactctgtttttctctacggtgagcacagcattttgatatgttattcttatgaaggttccccctatattatcactatcagcctaacttatcaatttgcaaatttcctctgtttgtccttttattaactaccattttaaaatttgaggttatttccattaacccaactagtaagaagaaagaaattagcagttaaaggcctaaataatgtttctctaaagattatcatttaataaacttatgggatactgcttaaaatgaaagatcagtcaaatatatatacaatatgtgttataagcttataatttatcatttattccatattctttttttaaatttattacttttttattttttattatgggtacataatagttgtatatatagcatacatgtgatgttttgatacaggcatacaatttataatgatcaaatcagggtaattggggcacccatcacctcaagaatttatcatttctttgtgttaggaacagtccaattcccctcttttatattaaaatatacaataaattaggccaggtgcggtggctcatgcctgtaatcacagcactttgggaagctgaggcaggcagatgacttgaggccaggagttcaacaccagcccggccaacatggcgaaaccctgtctctactaaaaacacaaaaatttgccaggcatggtggcatgcacctgtaactccagcttcttgagaggccaaggcacgaaaattgcttgaacccagaagctggaggttacagtgaactgagatcatgccactgcactccagcctaagcgacaaagcaagactctgtccccctgcctcaaaaaaaaaaaaaaaaatatatatatatatatatgtgtgtgtgtgtgtgtatatatatgtatgcacacacaataaattattgttaactatagtcaccctattgttatgtgtacttttattttaggaaatactggtaaatagcttattgaaatgttgtagcaatatatactttcatgagaatgcatgactttgctaatatcctcacattcaccaacactggatattattactcttaatcttagccatcttataagtaaaattaatttctttttgtttaaatttgaattattagtgaggttgggaatagttgtgtattcttttgttttaactttcaggttcaggggtacatgtgcaggtttgctatataggtacattgcatgtcctgggggtttggtgaacagattattttgtcacccagataataagcattgtacctgataggtagttttctgatccacaccctcctcccaccctccaccctcaagtaggccccagtgtctgttgttcccttctttgtgtccatatgtactcaaggtttagcttctacttgtaagtgagaacatgcagtatttggttttctgttcctgtgttagtttgcttaggataatggcctccagcttcatccatgttgctgcaaaggacatgatctcattcttttttatagctgcatagtatttcattgtatatatgtaccacattttttaaatccagtctactgttgatggtcgtttaggttgattccatgtctttgccattgtgaatagtgctgtgatgaacatacatgtacatctgtctttatggcagaatgatttatattcctttgggcatatacccagtaatgggattgctgggtcgaatccagtcctagctgccagcatcgctatactattaactgattgtaacctcaatactactttctttgaccctgccagtggaggtgactctatcttatatcaacatttattctgattttttggtcaccccaaagtctatatccttatcctaccaggtttcggaataatctcccatattgtaacatattattccgggagaactccaaactgctttccacattgactgaactaatttcccaccagcagcatataagtgttcccttttctccacacccccaccagaatgttattttttgactttttaataatagcagtgctgatagatgtgagatgttctctcattgtggttttgatttgcatttctctaatgattagtgatgtcgaggtttttttcatatgcctgtttgaccatgtgtatgtcttcttttgaaaagtgttagctcatgtcctttgcccactttttaatgggggattgtttagtttttgcttgtaaatttgtttaagttcctcacaggttctggatattagacctttgtcagatacatagtttgcaaatatcttttcccattctgtaggttgtctgtttactccgttgatagtttcttttgtgtacagaagctgtttagtttaattaggtcccatttgtcaatgtttggttttgttgcagtttcttttggagacttcatcatgaaatctctgtgaggtcctatgtccagaatgatatttcctaggttatcttccagatttttatagttttagctttacatttgggcctttaatccatcttgagttgatttttgtatgtggtgtaaggaaggggtccagtttcagtcttctgcatatggctagccagttatcccatcaccttttattgaatagggaatacttttgctcttctttttttttttttttttttttttgtcgattttgttgaagatcagatggttttaagtgtgccttatttctgggctctctattctgttccattggtctatgtgtctgtttttgtaccaataccatgctgttttggttactgtagccctgtagtatagtttgaaatcagattatatgatacctccagcgatgttctttttgcttagaattgccttggctatttagcccgttttttggttccatgtgaattttaaaatagttttttctagttctgtgaagagtgtcattgatagtttgataggaatagcattgaatctgtaaatagctttgggcagtatggccattttaatgatattttaggttcagaggtatatgagcaggtttattatatagttacattgtgtgtcgtgggggtttggtatacagattattttgtcacccaggtaataagcaagtctctgcgagtcagagtcaccgtgtcccacttctgtcctttatgtttgttttcaggagattgccttaacttgaatcctgtgggctttcgttttttacctttaaacttcctgccatttttccaggtctatcctgattatcacctcctttgagaaacctttctttgcttttgctttagttatagctttataagtgacttgtcacatctagtaacttcatcctttccttgtcctgtgctcccatagcattttgttcacatttgtacatgcatctattgctgacatgatttacttttgtgtcctgcaaattgtaagttcctggaggacagggactatatttggttcatttttgcatttttcatagcccatgattatttgattgtcgaatataactgaattgactagtcttcatcataaactgaagttctaagaagcccaaaactgttggaaatgaagtgtcttgaggtatatttgatttttttttctcattcctagcttaggattaaaagcgacaacaacaaagaaaaccaaacaaaaacccaacttccagaatcgatcataaacaaagaatcctggaatgtttttgtcttcatcctgatattttatgtctttttttttttttttttttttttgagacaaggtcccactctatcacccagactgagtgcagcggcgccatcttgggtcactgaaacctctgcctcctgggctcaagcgagcctcccacctcagcctcttgagtagcggggactacagacatgcgccaccatgcctggccaatttttttattatttgtagagatgaggttttgccacattgctcaggttggaatgccctattttaagatgagaaaatcttatgaaactagcatattcaaaaggctcaccaaattttgtaggttaattaacagccataactgttatgaactttgacttatttttcacaggctaattttttttacttcagagaatattaattactactgtttggaaataaaaattaactcagagaaactgagtgagtgtcattttgccaacatatttataaagtggaaatttaaaggacagtttcttaaatggaatgcatgagcatctgtctttttgtgtctcattctgtgaatgattcccaataaggaataatgagtcccatgtagtcaaagcaagactgtattgactcttctgatattttctcctagatactcaattatttacactgcttcttggtgttatattgaaagttttccatggtcttggcacataatgcttatttttctgggctaaaaactcatgcagccatgcatggagttaggattttcagtctttaatcacttatttggctgcctggttggagtttaccctaaagtgttcagccttgtccatccatactttacaaagagatagaggtagaggaggctgggtgcggtggctcacatctgtaatcccagcactttgggagactgaggcgggcagattacctgaggtcaggagttggagaccagcctggccaacatggtgaaaccccatctctactaaaaatacaaaaaattagctgggcgtggtgacacacgcctgaaatcccagctacttggaaggctgaagcagaattgcttgaacccgggaggtggaggttgcagtgagctgagatcgtgccattgcactccagcctgagtgacagagcaagactgtctcaaaaaaacaaaaaaagaaagaaagaacgaggtagagggggcattagatcacgtgccactttgtttagatgctctcattttcataacagaaccttaaactaagttcctcctggttggtatacaaagcgtataaattaatcaacacctcaacatttctgcccttaggttttggcccgtgaaaatgaccttgaattctctaccaagtgatagttatcaagtgtgctgtaatgagaaatgttgttttggtaggactgtaaaagacctgcatgcaaggtctccattcctacaaatcaaatatgtcacataggttgttgtaggtagccactcacgcatcttgtacccacgataaacattgttaatcagtcacagaacattttccttctgagcatggactcagccacagaacttcacaacacagtttatttaggcagctaatatgaatggatcagagttgacatgcaaattgaaacctacttgccatgctggggaataataacctaaatgctaccatggattaatccagaccattccctgttggggtgattggacccaacaccaggtcttgggggagatgaagtccgtcggactcaaaggaatgagaaaagacagtttgagagagaaagtgggaccagggggccatcactaagtatggaggctgtgaaggccccgagctctggaagcccagactatttattggtgatcaaacaaagaaacaggtggtgagaatgtggggttgaaaaggagcgttgcattaagcacatgatttacagctgtgatggtttagcatatgctctgctacttgagataacggagagcaggttcttttaactcaagatacaatcgctcctaggagagcaaggagccagcaagtctagacacattccagggccatgaggggttttatgccctgagccctggattctatctaagcaggaggggttttatgccctaggcttagattatggtgcagcagggtagccttccaccctttagcacagagcttggtgttccagaggccacaaggggttttagaccatggaccccggacatggtccaagactcttttacattatgtcagacatgcaagccctgcatcagcttctcccaacactcagcttttctcccaacaattcccaacgtgtgtacagtctatggagttgaacaggaaggtttgtatagtcatagaattgacttaatggactgtgctttgtgattgtaacaatagcttacattgaaggaaactgtgtaattctttaggacacttatttcccacttagctcacaaccttatctttctgaggattcagggtttcttttggcattgaaaatcaagaaaaactgtagttctcaaaatcaatcaaacaagcaaacaaaactctggcttttagtttatgaacactgggctgggtgcagtggctcacaccttataatcctagcactttgggaggctgaggtggatggattacctgaggtcaggagttcaagaactagcctggccagcatggtaaaaccccatctctactaaaagaaaaaaaaattagccaggcatggtggcgtgtgcctgtagtcccagctactcaggtggctgaggctcgacaatctctcgaacccaggaggaggaggttgcagtgagccaagatgatgccactgcactccagcctgggcgacagagcgagactctgtctcaattatatatattattaacactggaaaaccttaaaatgatggtgattctctcttgctatgggcattcagaagcttagagccaaatctctggcccacctttagcaaggacattttcctctgtgctaagaaggaaaaagttcaggcttggtgacttgtttattttatcattggctgcattattctctttcctttaaacttccctttccgtggttccttcagctatttcttttatccaatattgtctttaattttgaaactgcctcaaatcatttgtggaagaagatgagctgttgctaactacataaaaatgaacacagtaacttaatacaaaccatatttggtcccaatttttgtttctgttttcaggcaagaaatgtcttacatttgaaacattttctatacatgaggcagaattctcagggtcagggtgaacttaataaaaatgttttgttgaaaaattgttcttttctctgtgctccttctagctcaactttgtgaatgttcccactgtcttcaaggcagaaatagaacagaaggtgggaaaagaagggaactaatatgtgattctaaaatctttactgtttaaaaaaataaaagtgaaatatttattgctggtagatgaagaattatgtgtagcaaatcttgctgctatgagagggaaaaagtgtagctctatacacaagtaaaaagggcatacaaacagtgaagatttattgtgtaaaagactgtagtaagtactataaatgtggcttcctgtgtttgctgcccagaaatatcctactaatcagatcaagaaagcctggctatgaaaaaatatggcatcctggccaggtgcggtggctcatgtctgtaattccagcactttgggaggcccaggtgggtggatcacctgaggtcagctgttcaagaccagcctgaccaacatggtgaaaccccgtctctactaaaaatacaaaaaattagctgggcatggtgttgcatgcctgtaatcccagctactcaggaggctgaggcaggagaatcacttgaacctgggaggtggaggttgcagtgagccgagatcagccattgcataccagcctgggcaacaagagtgaaactctgtctcaaaaaaaaaaaaaaaaagaaaaaagaaaaaatatgacatcctaaataaccactgtgtttaatgacatatcagattttacattctagttcaagcttatctcagcttgaaccagagtacctagcagttcataggctagcacttgagtagcactgccttctatcatttatagtttagttcctggcatataactaagcagtcactgaacagataaaggaattaatgaatcataaaattattcatttagcaatatttaaagggtatttgctgatgccccaggtactgtgttaactgccaggagtacaaagttgggcaaattggtcagagtccctgctcttagggaatttacattatagtaaacaaccaaccaacaaataatcaaataatttcaaatactgagaaacactatgaagaaaataaaataggtaatagagatggagaggtgaagctgttactcaaagtgtctttttgttttgttttgttttgttttgttttgagacgaagtctcgctctcacccaggctggagtgcaatggcgtgatctcggctcactgcaacctccgcctcctgggttcaagtgattctcctgcctcatcttcctgagtagctgagattacaggtgcccaccaccgcgcctagctaatttttgtatttttagtagagacagtgtttcgccatgttggccaggccagtctcgaactcctgacctcaggtgatctgcctgcctcggtctcccaaagtgctgggattataggcatgagccaccgtgccagcctcagagtgtcttatagaacctcaggattgcatctcctggcagcatgcttgaaatctagaatctcaagtcacatcgcggaaccactgcatcagagtctgcattgtaacatgatcttcgggtgatctctgggcacagtgcagattgagaggctctggatacaacttcagatatggttgtcaggaaaaacatatctaaagaggtgacattttagctaagtactgaataatgagaaaactccagccatgtaaagatccgagtaaagagtggtccaaacaatgggaacaacaaaagaaaatgttcagagacaggaatgaacatgggaagaccagtataggtggatcagagtgagaaagggacctggaactctctacactctggtatttatcaaaaaccctgtggtgagaaattatttatttatttatttatttttgagacggagtttcgctgttgttgcccagccgggagtgcaatggtgcaatctcggctcactgcaacctctgcctcccaggttcaagcaattctcctgcctcagcctccctagtagctgggattacaggcatgtgccaccatgcctggataatcttctatttttcgtagagatggggtttctccaggttggtcaggctggtctcaaactcctgacctcaggtgatctgcccgcctcagcctcccaaagtgctgggattacaggcatgagctgctgcgcctggccacgagaattgttgattttgagtgactgcacaaagttctgcatgcaagacctctatttctacaaagcagaggtaccaggtaggttattgcatgcagccacttacctatcctacacccacagcattgttaactgagtacagaactttttctttctgagcctggacaaagcccccaaacttctcaacatagttattcaggcagctactacaaatagttcagagttaacatgtgagttgaaacctatttgccatcctggggaaagatgatctaaatgctaccctggattaagccagaccattgagggcttgtgtattcaagtgaacagaaatatgttgatggttcatggaattttttttttttttgatacagggtctcagtctgttgcccaggctgtaatgccgtggtgtgatcacggctcactgcagcctcagcctccctaggctcagatgatcctctcacttcagcctcccaagtagctgggactacaagcatacatcaccacactcagctaattttgtagagatggggcttcaccatgttgtccaggccggtctctaactcgtgggctcatgcaatcctcctgcctcagcctcccaaactactgggattacaggcctgagccactatgcctggccaattcatagaattgatttaatgcactgtgctttgtgattgtgccaacagtttccattgaggggatttgggtgtcactccttatgacacatagttcccactaggctcactacatcatctttatgaggaaactgtatttctctcaggactaaaattcaagaaaaactgcttctataaaaacaaaacagccgggcacggtggctcccgcctgtaatcccagcactttgggaggctgaggcaagtggatcacctgaggccaggagttcgagaccagcctggccagcatggtgaaaccccgtctctactaaaaatacaaaaattagctgggcatggtggcgggcgcctgtaatcccagctatttgggaggctgaggcaggagaatcacttgaacccgggaggcagaggttgcagtgagccgagatcatgccattgcactccagcctgggcaacaagagtgaaattccattaaaaaaaaaaaaaaaaaaaaaaaggccgggtgcagtggctcacacctgtaatcccagcactttgggaggccgaggcgggtggatcacctgaggtcgggagttcaagaccagcctgaccaacatggagaaaccccatctctactaaaaatacaaaattagccgggcatgatggtgcatgcctgtaattccagctactcaggaggctgaggcaggagaatcgcttgaacctgagggccgaaggttgcagtgagctgagatcgcgccattgcactccagcctgggcaacaagtgcaaaactctgtctcaaaaaaaaaaaaaaaaaaaagggaaaagaaaaaaagccagtttttatcttatgaacagtaaaaacctaaaaatgattgctatttcctcttttctatggctattcaacagcttagttagggtcaaatttctggcctacttctgacaactgttctggatctgatggagtgcaaacttaaatgttaatcttatcattggccacatcattctccttccattaagctctcctttcactggttccttcccctatttttaaatctactaatgtctatattttaggacgctgcctcaaatcatttgtggaagaaggtgaagtagaactacttgtataaaaataaactcagtaatttatatagactgtatttggaccaatttctgtgaattcatttttcaggcaaaaaatgactgacagttgaaacattttataaatgaggcagagttctcagggtcagggcgagcataatgaaagtgttctgttgaaagttgttcttttctctgtgttccttctagcccaacattttgaatattctcactgtcttcaagccagaaatgcaagggaggagaagaaaaaagaactgtgtgatagtaaaatctttattgttggcatatgaagcaatataagtagcaaattttacttctacaaaggggggaaattatatatttctatacatgtggaagagtagatattcagtgaagattttttgataatttattgtgtaaagaaatgtactaaatactataaaagtggcttcctatgtttactacccccaaatattcctactaatgacctgagattaccaactccttttccacctattaaccttttgccacatcttccccaattttctcatccaaacccaagttggggcaacttcagactgtaagcttcttgaggcttgtcttgtttgtcaggggagcatgtactcaataaatgaaatttgcatgaatgagtcagagatttatgtacacaggggaagaaagctggttatagcttcttcatatttttcacgtggacccagagttgtaaattgagggaagaaggatagcagagtaatctcaaagcacaaagtgggggtgatgtcttcacacgccctcagcagcaacggggcactgggtgcttaggaaagcccatctgaaggagacatcaggaagtagaggaattctgttttttccactcatctgcctagtatttaaggtcggctaagaggctagaaggaacacatccacagttctgctttagaggatatgaaaattgggctggaaggaacacgggtccacagttcgagttcagaggacataaaaactggctcaaagaaactcgggtaaattggacatgaaaactagcgggaaaggacacgttcagtgtttgtttccctactgagtcacctgttcccagcacataaagtcgtggtgtttggagatgggaggaaccgagggaaagtcactttttagataaggctctgaagccccaggtctagtttcaatccactaatgcggccagcggcgagcaggaggagggaggattggtccggcgggggcggggccagagcagggctcagaggcgtggcccaggctagagggaagagcccagggggagcgcagaggcggggctaggagggagcaggggtgaatgggggcgtggcccgggcgagaggggcgtggctgtagctaaaggggtgtggccagggtggagggcagagactggcacagtttggttgggcgtgaccggggcaataagtacggacgtagtggggcgtggatctgccaggtgggggcgtggcctccattgaggggcgtggccctggtatgtggggcgtaacagggcacgagggggcgtagcttcgatggccggacgtgcaggctgcggatccccgtaggcgagcgagcggctaggttcgtgatctggagagacgctcaggtaaggacgggtggccgagaggagtggggggcgaccagggacaggccgatccagacagggccgtgattcttcccacgactctccgctctggcgcaccgggttccggagctaggagagctgttgatcctgcgagtattgtctgggtcccggcagggcgcccgggagtactgagtggggcctaatggggtgtcgaactcccccaccccagccctcttcctccactatgggagttaccaaacggctgtcatcctttaaggttctttgcacaggacgcgataacagctgttccagagaaaagggggtgggggcgcgggagagcagttccttggtaggtagggttgccaaggttggttgaatccaaataactccagaaagtccagccttctgtgaaatagctagagacgggggtaagggcgacaaatctgaggttgcggttccagaaaccgaggctcagtaaactggaactccctcagatctgcattgtatccgcaccacccactatgctaggggctgtggagagactcacagccactcacccccaagacagggtatcagcatcacaactgtgccatgcgggcaaatctgagctttcttcaccctgcagttctttcttctggcctttttgttttgtgctcagccctaaagctgaaggagaggaacctccaaatacaaaccttgttggttttcgtgattcttgtggcattcaatgttaaatgcttctgccccgaggcttgtggcaattggttaatattgatgtcagtgcccttccctcctgtgtattttcgctgggaaagtttgagagataaggggagttgatgtgtacaacttagtttgaaaagaacttgttctctcctagccactgaaaaccgcgttgctttctgcttcccattcttcctttactgataatctggccatcactctgctgtttaaaagtcttgctagagtatggagacaagtagtgctatttctgtggtgagagaagctgccccagagcatacccttgaattgtccctgcacatctctcaggagtggccactcttcttgggtatgttggaagtggaaaaccgtaaagctttctaggaatattttttactgaggtttttttttttttttaacctcagcatcagggttggaattcactgaaatgccaaaagcagcaagggcaccgttctctgtgcctgtacacacctgccctcttctccctggagccaggcaaaaagctgcaaccactcacaattggaacgcagtaaaggttgagtgaattgtgagtgaatgaatgaatatgaatatttgggaaatttgacggaaaggggaaaatgcatttcatctgattggtggcactgggcaattaattgcagcacaaagagcagttattagaaacatattctgaaacctttggctaccacacattgggatcatgctcccagggaagaagtgggtgagagggggaagctgagctttctcagtcaagatatcgcagcataatctctaatttagatttcagggaattgcaaaaaggcttgttgccttttgaaatcaggtggtgatcaaaggaagggtccatctgttgaaaatgaaggaatttttttccaatgtaattgtaacctttagtcagagtacattcttttttttctgtctgttttgcctacatatgaatggcttaatcaggcagagttcaagctgcttgtcatttaataaatacaagatttatgaatgactcattgagggctttcaaaatctttgtttccacgcatttctaagtctggaaaacagctaaggggcaggttagcaaaatccaaggatatacataaatcatcagtgatggcaaagagtatataacacagaaagctcccctgtagtccatcgagcccagggacccatctttatggacaaacttatgtacggacagattctccctgaaatacagtaatgtatggtattagttgatatgtgctgtgtttgctggttaaacattatttttggtttcacaaacttgggttttatgaatgcagtgagtaagtttaaataaccaactcttaaaaaactataacttctaatttaacagagaggatagaccttaggcctgaacaaaaataacctcatgtattgttataggtattgcaatcaagcattagctaaattgaatttctgtttacttggattttcctggaacctcctcacctggatcttccaagctctgcgccttccttgattgcctttgaccgttctcagtctcagcatccttcatggctcctttttgtgagtctcccttgatatacctgtaactgctgggaggaggggattctctttctatctgtagcttcctgactgctcctgagcaccagagctgtgttgccaactctctcctagacctttcctctcagctatcccattgacaccttaaatccaatatgattagagggctgggcgccatggctcacgcctgtacgcctgtaatcccagcactttgggaggctgaggcgggtggatcgtttgaggccaggagttcgagaccagcctggacaacatggcgaaaccccgtctctaccaaaaatacaaaaattagctggacgtggtggtacgcctgtggtcccagctacttgggaggctgaggtgggataatcacttgagcgtgggaggcggaggataaagnnnnnnnnnnnnnnnnnnnnatatatatatatatatatatatatatatatatatatatatatatatatatatatatatatatatatatatatatatatatatatatatatatatatatatatatatatatatatatatatatatatatatatatatatatatatatatatatatatatatatatatatatatatatatatatatatatatatatatatatatatatatatatatatatatatatatatatatatatatatatatatatatatatatatatatatatatatatatatatatatatatatatatatatatatatatatatatatatatatatatatatatatatatatatatatatatatatatatatatatatatatatatatatatatatatatgtacatatatatatatatatctatatgtatctatatatatacatatatatctatctatatatatatatatatatatatatatatatatatgtatatatatatatatatatataaataggtatatacatatatatatatttataaataaaaataaatatatatacttatatatatatatatatatatctaaatatatagatatacatatatatatatatatagatatatatatatagatatatatatatatatatcactagatatatatatatatatatatataaatatatatatatatatatacatcttaaagtgctgggattacaggcgtgagcctctgcacctgacccggagaccctgtctcaaaaaaaaaaaaaaaaaaaaatcccatttgattagaggtatgacctgccatcatctttcccttccctgtttctcatgacaggtttgtgggggattttgtttgtttgtttttttttgagacagtgtctcgctgtgtcgcccaggctggagtgcagtggcacgatctcagctcactgcaacctctgcctcctgggttcaagcaattctctgcctcagcctcccgagtacaggcgcccgccaccacgcctggctcatttttgtatttttagacaaaaatctctagacgaggtttcaccatcttggccaggctggtctggaactcctgacctcttgatccacccgcctcggcctcccaaagtgctgggattacagatgtgagccactgtgcccggcctaacaaattctatttttctgtacagggattcatcctcgtcttactgctagcatcactccagccattaaatgagatcttcctccacttcttccttttattctcctttaactgagtgacagaccctacattttaaaaatcacaatggctatctttgaataccaagtaccctgtccaactatactgtcactgcccagttcagtgcttcatattctcttactcagattattggagtttcacttcaaactccacatgcttaaacctgagctacttatttcccacccaaaacctgtttctcccactgtctcccctatctcagtttgtggtaactttatctttccagttgtgtagaccaagaatcttccagtaatccttaactcctttctttcacatcttatgggctgtatattcaagatatatcaaaattcaaccacttcttaccacctccactgtgacatctctggattagttcaagccttggattatccctaaagggttttcctacttctttcctacttcctgcttctttcctgttcctccctgtttctactccccaaggcaattttcaacaggacatgctgtgatgtttttctgtttttttgggttttttttgagacggagtctcgctctgtcactctgatgccaggctggagtgcggtggcgcaatctcagctcactacaacctccacctcctgggttcaagcaattctcctgcctcagcctcccgagtagctgggattacagacgtgcatcaccatacctggctaatttttgtatttttagtagagtcgtggtttcaccatgttggccagactggtcacgaactcctgacctccagtgatcctctcctcccgcctcggcctcccgaagtgctggaattacacgcatgaggcaacacgcccagcctgagtgatcttttaaaaatgtaaattactgtatgtaaatgtaaaatgttactgctctgctcggaaacctccactgtctcccctttttacttagagcagtgattttcaacctgtggtaaccctattcccctcccgcaggggacatctggcaatatctgtagatattttttgttgtaacaactctggtatagggtggaactggcatctattggatgctagccagtaccgatgctcctaaacaccctacaatgcacacagcattcccccacaaccaagagtcatctgatcaaaaatgtcaacagtgccaagactgagaaaycctaacttagagaaagaacccttgcagtagcccagaagtcttgatctgtcatccattacctgtgaacctcatctcctactgccttcctcctggttcactctactcctgccatattggcctccttactatcccttgaatatgccagacatacgcccacttcaggatctttgcccaggcagttccccacgcctgaaatgtccttcctttagatagccatgtaactaattccctacctcctccaatcctttgctcaaattttatcttctcagcgaggcctcctgtgaacaatatatttaaaaatataataccctctctcaagtggcactccaaattcatcttaccctgctccactttttactagacatattcaaattgtctctacaactgacttgtttattacatttgttgtttattacctgtatcccctactaaaatgtgagctccataagggtaagggctttgttctgttccccaatgaacctagaaccatgtttcatacttaatagatgttcaattgatatcttaatgacaaaaagaataaaagagtgatagactgaatgaaggttggttaaaggaatcacctcctcactgactttcctggctccactcactcccatccatcccgtactccattgtcagagtcatcagaaaccatcactgctttctcctgtacccatggaataatatccaaaaggcttccagtctcttggaagttcatattccccaaattaatctcaaatcctcatctagccccacctcctgctgcatcccctgggcatctgcttggccagtgcattgacaaatattaatagcagacttggaatgatgggaagttcagaaatactcttggctttctttcagaaaaacaggtttgaggtttgtggggttttgtttttgttttgtctaaaggagaaaaagaaaatcttcagagtcagggtcccctacagtgagatcagcaccattctggggcacagatagaggtccagacttttggaccactacaagcaatctaccactgagtgtggaggagaatgactgagagggtgaaggtgaggatgaagtcaggccctctggagccctcctgccccctagccctagagagtcagtctggatgtacaggagaaacttcctctaggccaggcgtcattggcctccagccttggtgtcatgcagacagtgtgattgcagaatggagggcagtcctcaaggcatgaccatggccctggccgtcagccccagcctgccatgcctcagtgctttccggatggctctctgtggagcagagtcaagggtcatttcccagatgtctctgaatgccatgctaacaggcctcagacccacccccgaccaacagcctcttgtgcagggccctgtgccttggcctcatgtgtgttcactcatctgtttgtacagctctcctggctggcggccatgcccttggccttgtcttatcacaagcttccctttgaaggcagagcccacacatcctttctgttgactttgcattgtacttgccatcatcttcccaaaaattactatgtctcattctaactcgattgtgagcaagaaaggaggccttttccacttgtttgcccacatccccctgatactggaattgtttattgagtaaacctaaagttcttcccattttgactccaattgttctcttcagcattggggcctcatcatcccctgccacctcctcatcatcgcggaaggttcccctgtccatccctctgcctttgcctccctgttaaattgtctctctcctacaatacatttttcagatgccaccctttcctgaaacttagagcccctgcgccacatattcccattgcactaaatcaaggccgtcattgtgtccagctttgattaagaaatttctgtttatggccaggcacggtggctcatgcctgtaatcccagcactttaggggccaaggtgggcagatcacctgaggtcaggagttcgagaccagcctggccaacatggtgaaaccccgtctctactaaaaatacagaaattagccgggcatggtggtgggtgcctgtattcccagctactctggaggctgaggcaggagaattgcttgaagctgggaggcggaggttgcagtgagccgagatcgcaccactgcactccagcctgggtgacagagcgtgactctgtctcaaaaaaaaaaaaaaaaaaagaaaagaaaagaaaagaaaagaaaaatctgtttaattatactaagtaaaataagccagtcacagaaggacaaataccgtacgatcccacttacgtggggtatctagaataggcaaataaatacacagagacaaagtaaaagcgagattgccaggggctaagggatagaggaggagttattgtttagtgagtacatagtttatgttggggatgatgaaatagttttgggtacagatggtggtgatggttgcacaacattatgaatgtatttaatgccactgaatttgtacatttacagctggttaaaatgataactattatatatgttttatcacaatttttaaaaggtaacaaaaaaagaagtatttgtttaaatagtttttctttgtagattgcaagcttgtgggagtggggaaagagcatgatcttttcatctttacacagcacagtgctcgacatgagataatcactcactgttccttcagttcaggactggaaatcaatggaaaggaagaacagttaaggcaagctttccccatatcttttagaaggttttgaaatttcattttaatgtcaaatcagttttatcagagggaatcctgattagttgcagttgtttgtttggggatatttattgactttaaaagaaaacaaaaaaatgatactaaaagtcgtccaaaatgactattttcatagctttttgcatttatatgatgggtagcattttaacaaaatcaatttgagtaataataacttgtatttatataacacttagcagctttttcaaagagctttcatagcttgcaccatttgaagccacagaaagcgtcaacttctttttttttttttttttttttttttgagacggagtctcgctctgtcacccaggctggagtgcagtggtgcagtggcatgatctcggctcactgcaacctacacctcccgggttcaagygattctcttgcctcagcctcctgagtagctgggactacaggtgcacgccaccacgcccggctaattttttgtatttttagtagagatggggtttcgccatgttggccaggatggtctcgatctcctgacctcatgatccaccagcctcagcttcccaaagtgctggggttacaggcgtgagccactgcacctggccaaacttcttgtatagtgtaactgagcaactatttttcctgctccttgggttctagattcttgcataaatttaagggtgtactttaagcattaatcttaaccatttcagttcatattrttgtaaccactcaagggattcttcctgcctgctgcacaaagaaagaccacggggcattgtaaccgcccagtgggttcacattgcccgctgcctggacagaatcgatttaccaagacaggggaattgcaatggagaaagagtaattcacatagagccaactgtgtgggagaccagagttttattattaaatcagtctccccgagcatccagggatcagtttttaaagataatttcgcgggtaagggcttgagaagtggggagtgctgattgctcaggttggagatggaatcatagggggttgaagtgaggttttcttgctgtcttttgttcctgggtaggatggcagaactggttgagccagattacgggtctgggtggtgtcagctgatccatcaagtgcagggtctgcaaaatatctcaagcgctgatcttaggttttacaatagtgatgttatcccaaggagcaatttggggaggttcagactctgagccagaggctgcacaacccctaaactataatttctaaccactagctaagttgttagtcctgcagaggcagactcgtccccaggcaagaagggggtctttttgggaaagggctgctatcaattttgtttcagagtcacaccatgaactgaattctttcccaaagttagttcggcctatgtccaggaatgaacaaagacagcctaaaggttagaagcaagatggagttgattaggtctgattttattcactgtcataatttcctcagttataattttgcaaaggcggtttcagcattgtagtaaagaaagagtttaagtagacacgaggctggccacaccatgtgggagatggaattagtactgaaataatctcctccaaagctcataggttacgggtttttcaaaggcagtttaggggaatgggtggaggtggctaggcttgctgctgattgtttgaggaggagatgagatcaaagtgtcctttgatttcaaaaatacaatgagggataagttgataggatgtctgggaatttgcttcaaaataagctggggaggaaaaatggcaggagggggggtagaagatgtataaataaaacttgattggccatgaacagacaattgttgaaatggaatattgggtacrtgggtggttttattatagtgttctcactatacttgtataaaatttaagttttccataataaagtttttctttgttaagaaaaacaaagcagagtgagattctaaattgaagttgccaatggcctattgttctttaagtctgctcagttaattcagttaaggaagttatttgaaaacagggtgctaatgacgcggctttgttttctggggtaaataccctgggttcggtgtctcacacggagaagattaacgacagggacacacacgtggagttcaggagaggaaagtttaataggcagaagaaaggagagaggagagcagctctttctcttgcgagaggagagcagctctctctcttgcaagagaggcgtccaaaaatgggacaagtggcggactgcagcagattttataggcaggcttgaggaggcggtgtctgatttacataggggccacagattggttcgaccaggtgtgacatttacatagcacgcaggaaggctggtcgccccaccctaatcttattttgcaaaggggctttctacttggccagtgccatcttgtctgctccttactgtacacttagctggcaaagggaagatgaagccgccatttggaacatgcctagtcctatgtagtatttttctattggcacaactgccagcattcacctgtgcaagcttccagcttgcttgtctatgtctgcagctcaattttacaggctgctctttgttaggaaagaaaatgatttgggggctgctttttattaaaaggaaaaccttactgaggactcccatatcctcactatctgcctaagtaatttcttcttaactcctatatcactattatttagctcaaggcaccatcaagataatcccttgaaagttgattaccagtccatgtttgatatcctgagtcaaacatttgcatctcttaaataaggtgcattttgacatacatgctccgttcaaaaatgtatatacacaaacacacacataaaactataagcaggccagatgcagtggctcacacctgttatcccagcactttgcgaggccattaagcaggaggattgcttgagtccaggagtttgagaccagcccaggtaatatagtgagaacccccccccccgcccccgccaacccccatctctaaaaaaaataaagttagccagggatggtcgggcacagtggctcacacctgtaatcccagcactttgggaggcttgaggtgggaggatcacttgagatcagggattcaagaacagcctggccaacatggtaaaaccctatctctatgaaaaatacaaaaaagagcctctgcacaggtcggagggaaagaaaggagttggaagatctgaagcccacgtagctggtgggcaggcaggagtgcaaatggatgtgaggccgagatcttagcaggcccagagcacatggccttgcagccacaccacagtcatggttgcacaaaggatgtcctgaacatctgtttgaatgtgtctcaagtactcagactaaacacttctaaatctgtagtggaatgaatgtgtaaccaagaagaattgattttttttttttcaaaatttcagaatggaatagggatagttttcagggaaaatggatgaagcagtattgtggtggggaaagtgttcaaagttaatattaccataacttcagaacaccatagtgaataccttggaaagcatcatcttcatcttctgagactttgactgtgaccatgtgaaaggtagagagagaattcaggattaactttgtctgttttcccatgttcaagggccattgtgttacacctaaaattggcaaagagtcatagattatatttaagctcagatttcaaaactgtccatgactattttggcaggatgtatcttgggttttttgttttgtttttgtttttgtttttttgttgttgttgttttgtatgcaatctagatgcagatgtttgtttttagtcagcctggagggagctttaatgttggggttcttcgtacatgtaaataccatgctggataattaattgggatttcctggagcaatttttttttttttaagaaactgtactgtaaacagtttttcattcttgtggataaagagaagcttttctctggatttctaatattcgccaaccctgagggaaaggcaaagcatgtgagtcagtcctcaggaccctccctgccctccactgaggggaccaatgagtttgaggaacaagagtggataaaccgttgactctcatctgccctccctccctccacctcagggtgtgtactgctagtctgaatattgtcctgcttagaggtttctccatcatcttaagtttctgttgtttacagctttccctcctctgccctcatccctctagattattaagttcctgcaacttaactgggaactgatcaagatttcaagctaaagatggtggtgatgaacagcctgagggtcattcttcaagcctctccaggcaaattgctgtggagaaagttccagattccgagattcatgccagcgaggccctgcagcctctatacttgtacttacaaaacccggaaccgagcctgtgagtacaccacttccttaaagagaacaaaaagggctccagcctgagtgacagagtgaaatctcatctcttagaaaaaaagagaaaagaaaagagggagcaagygtgcaagagcaaaaatactcatctttataataatcacacatgttaaacatttgtagctatgctgtctttggctttccagtgtaggattatatgccttatgaactgtgagaataactgtttctctgttgattcatgaaagtaaatgtagaatgttctttcttgactaattttagcatgttaaaatgatgtcatgcagaaactggacaagagacagatcccggtttttaatattttggaacctgttgtttattatttcttggtagcaattgtctttttttttttcttttaaacaaaggttgatccacaaaccacaaattatttctgggaaccttaagtttctggaagttgcatgtaaatgtttgtaaacagtttactagcttcaacgttctggaatattctgtcctgagttaggaattactgaattaattctagctgatcagtttgcaagtgtgtgctctgctgtaaggatggaagattgagtgaggcaggaaatggtcttcctcacacctctctcatctcgttcccctcctggaaatacaaggcattgcccatgtccggatgtggcagggattctccactgcggcatgatggacattgaggatggatcattgtgtgttgtagggggttgtcctgtgccctggagggtctttagcagcattcctggcctctgcctactagttgctagtagcaccctcatgaagctataacaaccaaaactgtctgcagacattgccaaacatgctctgcgtgactgccctagagagggcagttgagagaatgggaaaggataatgtgtgtatttgtgaacagataactttgagttaatgaagagatgaaatggctaagtattatcattaaggaggaatttttcatgttttccattatttaaaaaacattggcacagagttttcaaatgttggactgcactgaggtctaggtttctcccctttagtgtttattttctttgaccccatatgcacataataaaaagactgagtaagaatggaatgcttgtaaattagtaatgctaatctagctacatccaagggcttgaaactgctctacaaatatattttcactgtaagtttattttgtttccttcaacattgactgtgttctttttcaaataaacggaccagaggcataataaatttctggttgctaggtgtggtttcctacaaacatgccacatcctactgagactggcttattctgaacactggcactttgtggtctatggtttatattggaaagtattaatagttttgctttttttttttttgacagttgaaattaaacatccaaatccggtatacgtatgtagttaggatagtttgctgcttttagtgctgacaaaaaaaaacaaacagtagtggcttcgggaggggcagttttacttagtgaatttcccacaacagatgacatgttcttgtttctaagttactaggaaaaacaggggacagtcaccatttgattttgtttgtagcatattatactgttccaacctgtttgccccaagaataatattgtggtctttgctgctctgggccttcgagccggtcctgtttctatgttctggaccctcgtctgctcaattgtaaagacaattctcattgtttctgacagctcaataccccaacagaaggccaatgtacacttgtgaccaagaatgaccccagattcttgagggtttgaaaagataacgtgttaatgaaaaaagccaaattctaaaatatttgaagaggttcattctgagccaaatatgagtgactgtggcccatgatacagcctcaagaggtcctgagaacacatgcccaaggtggttgggttacagcatggtttagggagacagaagttacacgcaagacataaatcaatacatgtaaggtatacattgtgaggacgaaactctgattttttttttatcttgcccaaattcctatctaaggggtctggggagtcatgccccacaaatcataaattctcaccagatgggttttattcaaccctatatatcgtgatttactttccaagctgactttggcataacattacaagacaaagaagaaaatcaaaatattttaccccaaaacatgtttctttgccatgttttgaaatagccctgcaaagctgttctgcatgggggaaaatttgtatctgtaaagaatctctgggccaggcgcgatggcttacgcctgtaatctcagcactttgcgaggccgaggcgggcggatcacaaggtcaggagatcaagacyatcctggctaacacggtgaaaccccgtctctactaaaaatacaraaaattagccaggcgtggtggtgggcgcctgcagtcccagctactaaggatgctgaggcatgagaatggcgtgaacccgggaggcggagcttgcagtgagccgagatcgygccactgcactccagcctgggcgacagagcgagactctgtctcaaaaaaaaaaaaaatctctgttaacatagctagatcttttttttccagaccctcccaatcctaaagagattaactaagatctgaataggaaatatttctcatctattgtctctaagggcagctactataagacttcaaaggaactttgatctccacaatctttatcttaacctgaacattccctttctaccaatcccaggtctttagacaaactcaaccaattgtcaaccagaaaatgtttaaatttacctatagcgtagaagcccccccaacccccaccccagctttgagctgtcccgcctttctggaccaaaccaatgcatttcttaaatgtatttgattgatgtctcgtgcctctctaaaatgtataaaaacaagctgtaccctgagcaccatgagcacatgttctcaggtcctcctgtgggctgtgtcacaggccacagtcacccatatttggctcagaataaatctcttcaaatattttacagagttcgactcttttcgacaacacttggtttggcctagaaaggtaggacatctctaagcaggggcttacaggtcataagtaagtggattcaaagattttctgtttggcagttggttgaaaaagttaagctttgcctaaagagttgaagtcaactgaaagaaatgcttgagttaagataagggggattgtagaagccaaggttcttgttatgtagatgaagcctcccagtagcaggcttcagagagattagatggtaaacctctcttatgggaccttaaaaggtgtcagatctctcctggatcaggaaaagacctggaaagggacaggggctctctacagaatggacatttctcccacaagggatggctttgcagggccatttcaaaatatgtcaaagaaatatattttggggtaaggctgggtacagtgactcatgcctgtaatcccagcactttgggaggccaaggcaggtggatcacctgaggtcaggagttcgagatcagcctggccaacatggtgaaaccccatctctactaaaaatacaaaaattagccaggtgtggtggtatgcacctgtaatcccagctactcaggaggctgaggcaaaagaatcacttgaacccaggaggcagaggttccaggtgagctgagatcgtgccattgcactccagcctgggcgacaagagcgaaattctctcccaaaaaataaataaatgaatttcggggtaaaatactttgatttctttcagagcctgctgtctgtcatgtgatgctctaccagggtcaggttggaggtaggtattgtattgctacaaagattctgttatgtcagtcttatgatctctatttgagtgttaaagctggtcagttgtgcctaaactctaaagggagggtatataatgaggcatgcccaacctctcttcccctcatggcctgaactagttcttcaggtttctttgggatccccctggccagggtaggggggatccattcagtccgttgggtagcttacaatttcatttctggttcacatgtgcaaagtccttagctagtgatgtcacgcagtgaggactcagtgttggcagctacttctagtactacagttgttatcatcatcataggctcagtgcctgcctcagatgtttaaatctgaccattttaagaggaggcaaagcaaaataaggagtgaatgaaagtaggaggttgtggcaaattcggaaagcagcatttcaggtcagccctgtgctctgtgctcatcatatctttgaatctttggctgtcaactcagattgctgtttggtgttatctcaggtagcagacagtaactgttgatagtcctaactttggagacttgtaatataataagataaagataaaagcctatacctattatccaatgtggaaataaaatcagtttcccttaggtatcatctggtgaaatttagtctaatggtcacataagaagatttaggcatgagatcttagaccataggaaagtgcatttaataattcttaattgaatgaaatataaagaatatcaggtaaaatggaaatgatactgatttgttattccaatgattcttaatgttgatgatctccgtacttgtagaagaaagataaacatgttaggataatagggactaaagaagccagcagtgtataaaatgcagccactaaccccatgtgggtatttacatgtaaatttaaattcattaaatttttatagctacatatgcctagatcttaatatactggacatttctatcatcagagagggttctatttgacagcagtaatctatatcataactgtactgtgtttgaaagcttttctattatttctccaattaattttgaagaataaaaataaagcctggagagtaagaaaaagcttgttttgcagtgttttcacaaagaattctgaaatatagactcaggatgcccctagattgtcttttattaacatgcaagtaaccttgagaaaaaatgagctgattaagagccacttagaattgcattaatggcctcagggttatcttcagctgcctgggactgacaaatagccctggaactgaccatcaggaaatgtgggctgtagtctcctgtgctgataactgcacaggtatcctgtggctaatggactcagcatccaagttccttttatagccctgatgatgctctaacaaggcaatttgtgattctgcgatcatcctcaaccaagtcatatggagggtccctgtgtatacacccatcactgcattaaggccaaggcctacacggatatctkcagtaacatgaggaagtagcacatccctcataaaaagggcagtgcatagcaagggaccagataaaaagcacatgagggtataaggcaatgctttccggtagataaataacgtaagccacaaatatgagccgtatgggtcattctgtattttctaataggccaggtacagtggctcatgcctgtaagcccaggactttgggaggccaaggtgggacgatcgcttgaggccaggagtttgagacctgcctgggcagcatagcaacaccccatctctacaataaaataaaataaaaatatgagtaattctatattttgtaataaccgcatcttaaaaagtgcaagttaaacaggtcaaagtagtttgactaatatactttatttaaccaaatatatctaaaatattatcactttaacatgaaatgaatataagaattataaatgaaattttaatattatttattttgtactgagcctttgaagttcctggtattgtacatttatatagtacatctcaatttagactagcacacagggacagtgctaccatattggggagctcaggaacagagagaataggtgttgaggagtaagaacagttgaaagatgctttatttaaggtgggagtgtcagagaaggggcttgaactgaccttgaaagcctagtagaattttaaggaacaaacgaataacagatagatacgattaggtgaacctaagaagtgttcagggtaaaccagcttgcctggtagagagatggtggctgtgaggtaatgggtagagagccttggtatcaatttgtttggttttctgtatcagtaaaataagcatttagtacctcttctgtgccttgtaccaagtaaagccctggagactatagaaaaagtggaggacacagacctcatgggcttggagttgacacaggccctttgggcagataaagcaaacacagattacctgaggaatggttggatgctaaatggtatgaaagcaaattcagtgtgtgttcagaaaaagcaaagctcaggatggttggagaatatgtcatcagggagataagacttgaactggaaaagatttctataagtgttaaggaaaaggaagggcttctaagcacaagccaaagtggggctaaaggccaggtgtgggggctcatgcctgtaatcctagcactttggaaggccaagacaggaagatagcttgagcccaggagttcaagaccagcctgggcaacatagtgagaccctatctctacaaaaaattttatttaaaaagtttttagccaggcgcagtggctcatgcctgtaatcccagcactttgggaggccaaggcgggtggatcacaaggtcaggagatcgagaccatcctggctaacaccgtgaaaccccgtctctactaaaaatacaaaaatttagccgggtgtggtggcgggcacctgtaagtcccagctactcgggaggctgaggcagttgaatggcaggaaccggggaggcagagcttgcagtgagccgagatcgcgccactgctctccagcctgggcaacagagtgagactccgtctcaaaaaaaaaaaaaaaaagtttttaaaaaccaaagtagatggccgggtgcagtggctcacacctgtaatcccagcactttgggaggccaaggcgggtggatcacgaggtcaggagttcaagaccagcctggccaagatggtgaaaccccatctctactaaaaataccaaaaattaggccaggtgcggtggctcacgcctgtaatcccagcactttgggaggccaaggcgggcagatcacaaggtcaagagatcgagaccatcctggctactgaagacatggtgaaatcccgtctctactaaaaaatagaaaaattagctgggcattatggtgggtgcctgtagtcccagctacgtgggaggctgaggcaggagaatcgcttgaacctgggagtcagaggttgcagtgagctgagatcacgccactgcactccagcctagcgacagagcgagactctgtctcaaaaacaaacaagcaacaacaacaacaacaaaaacccacaaaaattagccgggcatggtgacaggcacctataatcccagctactcgggaggctgacgcaggaaaattgcttgaacgcaggaggtggaggttgcagtgagccaagatcgtgccactgcactctagcctgggtgacagagcgagactccatctcaaaaaaaaaaaaaaaaccccaaagtagacataaacttgtgtaggcaggcagttgtaagaagagtagcatgctaaggggaacagcatgacaagaaaagtacataggaacaccagagtttgggaagaatgaggaaaatgagattagataagtgagatgggttctaataggaaaacctgggcattgaacatagaagttacaacttgatatactgtttttagcgtaggagcaatgtgacaaaggtggttatttaggaaaattgctgagtggcagaactcaggagtagaggagagttagaaaagaggaaaagcaaccaagaggctttgtatgaagtctgggggttagggttctgaactaggccgctgttctgggaaaggtgaagaagagataaacctgaatgattcttaaagaaaaataatgaaataaagcaaaaaggagaagcaaactgtcttattctgtttgggctgctataacaaagtacctcagactagataatttatacacaacagaaatttgttgctcacagttctggaggccaggaagtccaaaaaaccaaggtgccagtagattcagtgtctgatgagggttctctttgcttcaaagaatttgccttcttgctgcatcctcacgtggtggaaggagctcagaagctttctcaagcctcttttataagggtattaatcccgttcatgagagctctgccttcgtgactatgtcacctcccagtggcctcagctcttaataccatcaccttggggaaaaggatttcagcgtgtacatttttgggttttatttttttatttttatttttttattttttgagacagggtcttgctctcttgcccagactggagtgcagtggcacaatttcagctcactgcaacctccgcctcccgggttcaagagattctcctgcctcagcctctcaagtagctgggactacaggtatgagccaccacacccagctaatgttttgtatttttacaagaaatggtgtctccccatgttggccaggctggtctcaaactactgacctcaattgatctgcccaccttggcctgccaaagtgttgggattacaggtgcaagccactgctgcctggctaaattttgaggagacgtatacattcacaccatagcacaaatcttcccagtgatgctcctcatcttattccatccacaagtattaaccgaaagccagctggcttacagagcagtgaggaaggcagataattagacacatacgcatataattataactgcacctatgtaataaatgtcatgaaagaaaaatcggagtgctatgatttaaaaattataatatgaagtgatcatattataagagagtagccagaggtcactttgtcaaggaggtaacaattaagcccaagacctaaagataatgggagcyagccctgagccaaatgaggggtagttgatttctgtggaggaggagcacgaagaaagggactaaggcaggaatgagctttccgtgtttcaagggctgaaagaaggacagtgccaaagctggggaaataggtggttgcagcaaactgaatgttcatgaccccctaacatttgtgtgttgaaatcctaaccaccaaggtgatggtattaagaggtggggctttggggaggtgattagatcgtgagggcagagttctcatgaataggattagttcccaatataaaagagaccccagagagctccctcgtaccttgtaccatgtgaagacagcaaggaggctgtctatgaaccagaagacaggaccttgccggacacccagtctgctggtgcctcgatcttggacttcccagactccagaactgtgagaaataaatttctcttatttataagccacctagtctatgacattctgtcatagcaggctgaatggactaagacagtgctaaagcacaaaataaaccaaacctaggactactcatataaacaactaaaatcaagcacttcctcaacatggaatcctttgcagggcttttgttgcccatcagctagaaattactgacaccttttttttttttttttttttttttttttttttgagtcggagtcttgacctgtcgccctggctggagtgcaatgacacaatctatctcagctcactgcagcctccacctcctggtttcaagcaattctcctgcctcagcctcccgagtagctgggattataggtgcgcaccaccacgcccagctaattttttgtatctttagtagagatggggtttcaccatgttggccaggctggtcttgaactcctgacctcaggtgatctgcctgcctcggcctcccaaagtgctgagattacaggcatgagccaccgcacccggccaacactttcttaatgacagtatgcctttgttagcataaaccacagttgataaaatcattatctgtttatttcattttccctatacaagaagaacctgaaaatgaagcttctgttagaccacttaatcatcttatttttgaggtaaaatatgagcaacaaccaggaaattgtttcgatctgatttttgcttaaatagaggaaaaggaagggagtaggagagaacaaaagtgtcagtttatctttagcaaaacaaacccttggcaaaaaattggcttcagtaagggggcagtgaccaaggaccccctccccacacagtgagttggatggtctaacctagatggtctagtttagtaaaggaggagggaggtgggtaggaggaaagaaaccttctggaagctgaacttgtaaactcaagggcataaactgatcttgtcattatggtcattaaagagcaattgaaggaacaggctcagttttcttgggctggtatttgcatgagtgtgagtgttgatacttcccatttcatgcatgagatggggaaaaattaaggatgaccaaggcgtcgtcttagggacctaatcactccagttcttccctagttgtcacaggagaccctcattgaatggctttgaagagtgtgtactctcaaattatcagccacagtctgagtgtctcagaggggaaggtgcatagtctctttgtgtcaggaatctttacaaacagaatcagggcctttcaagggctttctagaagttaaaaaattaacacaatttgaatcatttttcagatcatttgaatcctttcaagtcatttgaatttgagcttttcccccccaacaatggcagttggatatgttacagggcatatgtttattttattttttatttttgcctttaaaagagatgtttattcatgatgaatatgaatccaagtgtttgggtggatataacagaaccaaatgtaacagaaatttaagatcatctttccctctaagatgaaaaatacggtatattatatgttattggataaaattactaaacatttttagaccctgaggttgtatattttatgatgttggctgctgcgtagttgccatgattgctttttcaaattgttaatttctttcttttttaaaatttctatttttattttacattcagggtttacatatgcagatttgttacatgggtatattgcatggtgatgaggtttgggcttctattgatcctgtcatccagatagtgaacatagtacctaataggatgttttccagaagggcatatgtttaataagataccacagggcaacaaaaaaggaggaagatgtggctcctgcccacaaggaatttgcattctaattagattatgacagtatggcccagattccatttcagatgtgccagttcatgtgcattttccattttagttttctgaaacagaaacttcttgttctttaaagttcttgttcttcacaagttgttttatactgaggaaagaaaaaaacccagaacattgggttcagacctctccagagatgacagtactgcattatatgaagaaatagaaagaaaagagtattatgagtttgcatgcaccttttatctttagaccagggtttatcaactttggcactattggcttttgggtcaggatgcttctttgtcttgtcggggggagcccatccagggcattataggatctttagcagcatccctggcctctaaccactagatgtcactagcaccctctcccagttttgccatctgaaaatgtctccagacattgccaaatgtttttgggggactgaattgctttctctgttgaaaaccactgatttaggcactctcaggagagctctttgtctgtattgctggagcatttttataaataaaacaaaacaaaacaaaacactgaggttaagatactgacttacggtcaggcgcagtggtttgcgcctgtaatcccagcactttgggaggctgaggtgggtggataacttgaggccaggagttcaagcccatccgggccaacacagcgaaaccccatctctactaaaaatacacaaaagttagccgagatatatatatatatatatatatatatatatatatatatatatatatatatatatatatatatatatatatatatatatatatatatatatatatatatatatatatatatatatatatatatatatatatatatatatatatatatatatatatatatatatatatatatatatatatatatatatatatatatatatatacatatcatatatatatatatatatatgtatatatctacctctctcccccaagacagggtatcagcatcacaactgtgccatgcgggcaaatctgagctttcttcaccctgcagttctttcttctggccttattgttttgtgctcagccctaaagctgaaggagaggatcctccaaatacaaaccttgttggttttcgtgattcttgtggcattcaatgttaaatgcttctgccccgaggcttgtggcaattggttaatattgatgtcagtgcccttccctcctgtgtattttcgctgggaaagtttgagagataaggggagttgatgtgtacaacttagtttgaaaagaacttgttctctcctagccactgaaaaccgcgttgctttctgcttcccattcttcctttactgataatctggccatcactctgctgtttaaaagtcttgctagagtatggagacaagtagtgctatttctgtggtgagagaagctgccccagagcatacccttgaattgtccctgcacatctctcaggagtggccactgatgaactactgcagtgaactcgatctcaataannnnnnnnnnnnnnnnnnnnnnnnnnnnnnnnnnnnnnnnnnnnnnnnnnnnnnnnnnnnnnnnnnnnnnnnnnnnnnnnnnnnnnnnnnnnnnnnnnnnnnnnnnnnnnnnnnnnnnnnnnnnnnnnnnnnnnnnnnnnnnnnnnnnnnnnnnnnnnnnnnnnnnnnnnnnnnnnnnnnnnnnnnnnnnnnnnnnnnnnnnnnnnnnnnnnnnnnnnnnnnnnnnnnnnnnnnnnnnnnnnnnnnnnnnnnnnnnnnnnnnnnnnnnnnnnnnnnnnnnnnnnnnnnnnnnnnnnnnnnnnnnnnnnnnnnnnnnnnnnnnnnnnnnnnnnnnnnnnnnnnnnnnnncacacccggctaatttttaatagagacagggtttcactgtgtctcgatctcctgacctcgtgatccgccaaagtgctgggattacaggcatgagccaccatgcccagccagtgtcatccttattcttagtggtggggcgagatgcagagggtcgttggtaattatttccttcatgtttctcctagttttcctgttgttcttgattctacccatccatggtacttctaaaggacagggaaatggaccaccccaaactgatgtacattggttctgctcatcacacttgggggtctcaacaggctgatctgtgttatcagcaagtctgctgatacttatcagggacttgctacagagacctggtgcttgactctggaagaaaatcagcatcagcaatgtcttcagtgcctgtggaggataaattatatgtgtacaccttaatagataatctccacatccctgtgacacactgcaacctccagggaccttagcaatgccgatgttctacccaggttttgcaggatggctgcctggtcctcagagtttgcttacataggaggtgaactcaactcagcacgcacagttatgtggggcgagcatcttacaggatgcaggctacgcaagcctttttttctaccagccaaccaattaaacgctgacaatactgattcaatgtttcctttcccaaagttctcccatttccttttttgaaaataaatctgttattgaaaattgaattaatttgtctttgtatttaaagccactttggggagttgggggttgggaaattctcgatgaagaaaagaaactcatttatgaataccctatttccacatggcaccaaactccatgcattatattgtgatcacagcactgattgcacttggtttaggtgagcttagtaagcagactgagatgtgttggttttgcaagatgccaaaatgctattcctctgccaggtgctctctgacctatctttatcctctacttttgtgtatccattaaacccctaagtggctgtattggtcagggttctccagaagcagaaccaataaggtatatagagagatggatgagagggaatttattagtggaaattgctcacatgattatagaggctgggaagtcccatgacaggccatctgcaagccagagaccctgagatactggtagtatgggacagtccaagacacaggccttagaaccagggaaactgatggtataactctcagtctgaggccaaatgcctgagaacccagagaggtgctggtgtaagttctggcgtccaaaggctgggaagcctgtagctgttacccaaggacaggagcagaagagtgtatccaagattcagcagatagatggacacattcagtttttccatgtttttgttctctctggccccccagcagtttagatgatacctgcccacattaagggcagatctttcccacctagtccactcagaattacatgctagtctcctctgtaaacacccccagagaaacaccccaaaataatgctttaccaggtttctaggtatcctttaatccagtcaagtcagcagctaaaagtaaccatcatagtggctaattcctaaggcttttagtttccattagccctgacaggttctctagaagtacagtagacaggcttttttttttttcttttgagacatggtttgggtctgttgcccaggctggagtgcagtggtgctatcatggctcacarcagcctygacctcccgggctcaatcctcccactttagcttccccggtagctaggactacaggtgtgtaccaccacgcctggataattttttgcatattttgtagagacagggtttcgccrtgtttcctaggctggtctcaaacttctggcctcaagtgatccacccgccttggcctccccaagtgctgggattataggagtgagccactgcactcggtccaacagtcttgataataggctgacctgctttctcctagtgcatccactctgggagagcgtggacctggttcctgggggcgatcgccagtcacccatcaacattcggtggagggacagtgtttatgatcccggcttaaaaccactgaccatctcttatgacccagccacctgcctccacgtctggaataatgggtactctttcctcgtggaatttgaagattctacagataaatcaggtgagggcaagatctggtggtcttgtaaggagttaaagaaacagtgtcatgttaacagaggacacatcaaactctctccatgatagtattgacctctttgtgagcaatggcatggaactcattgatcttaactttttgaatgtgtgaaaaaaaattccttctagtttttatgcatattttcttcaactagtataggtagtrtttttaattaataaatatatctctatctctctatgtatagatttataattggtatagagcataggtgtgcaatggaagttttaccagaaatttattttgtatgtgtatattgaatatgtactaatttttttcctttgcttgttgactttatgagaacttttacattaaatagtaacattgtttaatcagagttaacttagcagattacaatacacttgaaatggggccaaaaggatattcatgtgtgcattaggttgcaaagactagtcatgtattagagaaatggaaacttatgatctggtaattttgttaaataaacagtgttacctacctagtttaaaagaaacacaatttaaaagagtttttaaaattcaaatattatattgattttgaatcttttttttcaccttcctggatgtaaactaatgtgaatgatttcaaagtttacctgaaacttatagtgtctatggaagacagaaggtggttaattttgtgaaggtttattttccctttttttttgtttgcttgtttgttttactgcatttgatgatgtcaaatagtccaaattagtctcaaaataattattatttggaatagtttaaagtggttatcaaccagtggtaattctgccaactttcccccatacccctccatatccctcactccccgctgtaggatccgaaggcgtttttcattgtcacaacttgggaaatgaaattggcatctagtgtgtcaaagtcagggatgccactaaagatcctgcagtgcgccggatatccttaacgaagagttgtctagcctgcagtatcaatagagctgaagcggagaaatcttgatctcaaggaaacttgttttctctcatgaatgttaggaaatgagtccataaaaatgataatgaggccaggagcggtggcttatgcctgtaatctcagcattttgggaggccgaggtgggtggattgcctgagcttaggagttcgagatcaccctgggcaacatggtgaaaccccatctttactaaaatacaaagcattagccgggtgtggtggcgcatgcctgtaatcccagctactcgggaggctgaggcaggagaattacttgaacctgggaggcagaggttgcagtgagccgagatcgcgccactgcactccagcctggcatcagagtgagactctgtctcaaaaaaaaaaaaaaaaaaaaaaagtaaatattcactcctgcatttatcctggctctgagtctcaactgtgtctttgttttctttgtattttcctagtgatgctctgatacttagacatggcactctggcctaactacaaacagactgctcctccagtgggcttaatctctgtctggttttctcccttctgatatgtgtctctgccatgattcagaaggtatttgagtctgtctaagaatttaggtgtttccatgtccccaactttcctttctcctccatggtatgacgcagccycaaaaccatgaacatcttactttcatatctcaaagtaggaagttctttttcccccagattcatgggcatctttcttttcccccctttttttgcgttgttatttatttaaattttatatttgtgaattcacaggttgatgtgtttcattatattgtttctaattctcttaaagtaacttactatacaagtaaaagcttcttgtaccacataaaaccatctcatgtgccatcctttgggaaacattgtttaaggccatctgggtctgttggtggaatagctagagaagggaggaataaaaaagataagaaagaaaaatgatactgatatatgttcttttaaaatatatttagtgggtataagtttagttttgttttgttacatggatatattgtgtagcggtgaagtctgggcttttattatacccctcatcatgcatctttcttaatttccccaaaactmtagagtgtgcccccttctcaactggaagtccataatattaccttgtttatacggattccagaaatcttcaaaacaacaagctaaattcctgtgttctggatgactgtctggcactctggtgagctctacttgtcccccatggggctctaccattatccttgccagacgtaaactaatgggcagacccagtctataggataccaaccctcatccatttactctgcatgcatagtaatccttttgaattctcaaccccatctagggccctagcagcctgctttcttctggggatccttggtattggtcagctttctaaagcccttgacagtatagggactgtctgttgccaatatatcattgcttcattgagttggaagtctyagaaagttgcttaatgagtttcttaactaagtgacttgagcccaagaactttcagggtaaatagctgttttatcttttagtcctctctttttcttttgaacaatagattctagaatttttttttttttttgagacagagtctcgctctgttgtccaggctggagtgcagtggcatgatcgcagctcactgcagcctcaacctcctggactcaagcaatcctcccacctcagcctcccgagtagctgggaccacaggcatgtgccaccacgctcggctaatttttttgtttgtttgtttgtttttgtttttgtttttaagacggagttttgctcttgttgcccaggctggagtgcaatggcgtgatctcggctcactgcaacctctgcctcccgggctcaagtgattctcccacctcagcctcctgagtagctgggattacaggtgcctgccactacaccctgctaattttcggtatttgtagtagagacagggtttcaccatgttggccaggctggtctcraactcctgacctcaggacctcaggtgatccacctgcctcggcctcccaaattgctgggattacaggtgtgagccactgcacctggcctttttttttttttttttttgagatggtgtctcactctgtcgcccaggctggagtgcagtggcgtgatcttggctcactgcaaccttcacctcctggcttcaggcaattatcccgcctcagcctcctgagtagctgggattacaggcacatgccatcacacctggctaatttttgtattttagtagagacgggtttcaccatgttggccaggctggtctcaaactcctgacctcaagtgatctgcccaccttggcctcccaaagtgctgagattataggtgtgagccactgctcccagctccggcaaatttttgtattttttgtagagatggggttcctgagatcaagtgatcctcccacctcggcctcccaaagtgcttggattataggtatgagccaccgagccaggcctcaagaattcttatctacccatttgcatgagtaatcttagatggaaaacaagtcatcaacgtttttgtcataatagcttctttttagatacctacaaacccaactgactaaatcaccccttgaacctgtcttccctgggagtgtcagtcacacacttacaaaatatgcaagaaaacttgtagagagtttgctaatttttttgtttggttagaaagaactaaaactgatagcccttttaaattatgctttaataattattttctttaagatagcatcaatttttagtaattacctaattttctctctctctctctctctctttttccacctttcagtgactgcctcttatttcctgtttattctttgctgctatttctccatgttgttgcaaaacaatcaatagcatgcaaagaggaaaaaaagagtgaatgaacataaaaaataaaaagtgaaagaaagcaagacattttagaaacaaaggcaagaaacaattctagaaaagtaaaaacctaataaatatcgatgtctataaatttcaaagacaaaaccctaagaaatgctgccacagtgtgctttgtgaggattggaataaagtgcaaggaaaaggagctggggaaggtatgtgacaaaaacatcataccagtccttttgggatgcagctaaagcagtgcttagagggaaatgtatagatgaaaatgcctacaatagagaagaactttctcaagtcagtatctcagctttccgccttaagaaactagaaaaagaagaacaaactaaacccaaaagcaagtagagagaagggcataataaagaacgagcagaaatcaatgaaatcaaaagttggttctttgggaagatcaacaaagttcacaaacttttaattgggggagaccaagaaaaaaataaaagaagactcaaattrctaaactctggaatgaaagagaggacaacatgacctacctaccttgataggattataagagaaggtatgtgaacatctcataccgcagtcctctcctgggtgttgtttggtatttggttcccctgagtaggacaccgttactgatttgaatgagtgcatataagagagtcgaaatactgtggggaagggcactaaattgtccctggatgatccctgtcaattatcatctcctctggaattcctcttattggcactgtcaacaggcattaaggagatggagaggtgagtgcctttgttctcctcctcagggtgcttcctgctccatcctgcttccctgactttacacttctttgcggcagtgccagtgaacctagtaagaatgctttcacaaacatttaagttctccttccctgttttaggtcctacatttactttaaaacacacatacacagtttaaaacacacacacacacagtttaatgatttttaaaggaaatttacagagttgtgcaaccatcactatagtctaattttaaaacatttccatcaccccagaagcattccttgtgtccatttcctgcatttgcttttatttatgtgggttctgtgtatttcctttctcttcaccatccctttctctgtcagctccttctctttcacattgaaaaacaaaaggagggagtgaatattacagattgcttactaccagccagactctctgctgaatgttttatatttgttatgtaatttttttagaagtttaatcctttctcatcttagagcatggaaagaataaaatatcaggccaagcatgatggctcatgtctgtaatcccagtgctttgggaggccgatgtgggtggatcacttgaggtcaggagttcgagaccagcctggccaacatggtgaaactccttctctaccaaaatacaaaaattatttgggcatggtggcacacgcctgtaattccagcttcttggggaggctgagacaggagaatcacttgaacctgggagttggaggttgcagtgaggcgagatcgtgccactgcattccagcctgggcaacagagtgagactctgtctcaaaaaaaaattaaaaaataaaagaataaaatatcaacaacctcaaatacataagtatatatttatttgatatgtgttatgactgctttgctttccaattcactatcttctgtctacctgccccatttctttgtttctttcctttttttctgtagagactgggtctcactatgtttttcaggctggtctcaaactcctggcctcaagtgatcctcccaccttggcctcccggagtgctaggattacaggtgtgagccactgctgggcctgccccatttcttgatgactatatttccttctttcctgcattcatctgccccacccaaccccacctttttcctttaatcttgctgaggttaccagtgacatcccaattaactagcctgacagctgcttgacagtctatttctctctctctctctttctttctttcctttccttttcttttctatgttttatttatttttattttttagaaagagtctttctctgttgcccaggctggagtgcagtggcgtgatcttggctcactgcaagctccatctcccaggttcacaccattctcctgcgtcagcctcccgaggagctgggactacaggcacccgccaccatgcccagctaatttttttttatttttagcagagacggggtttcaccatgttagccaggatggtcttgatctcctgacctcatgatccgcccgcctcagcctcccaaagtgctaggattacaggcatgagccaccgtgcccggccaaaaacatcttatctgggccagccgcagtggctcaactgcctgtaatcccagcactttgggaggctgagatgggtggatctcttgagctcaggagttcaagacaagcctgagcaacatgacaaaacctcatctctacaaaaaaaaaaaaaaaaaaaagcctggcatggtgatgcacgtctgtagtcccaactactcaggagactgaggtaggaggatggcttgagcccaggaggcagaggttgcagtgagccgacattgtgccactgcactccagcttgggcgacagactaagaccctgtttcaaaaaaaaaaaaacacttgtcaatattttgcctataatatattggtaataatttgtgtgtgtgtgtgtgtgtttgcgacagagtctcggtctgtcactcaggctggagtgcagtggcacgatctcagctcaccgcaacctccgcctcctgggttcaagtgattcttgtgcctcagccacctgagtagctgggactacaggcatgggccaccacgcccagctaatttttttttttttttttaatttttagtagacatggggtttcaccatgttggccaggctgatctcaaattcctgacctcagatgagccacccgcttcagcctcccaaagtgttgggattacaggtgtgagccaccaggcccggccagtgtgttttttcaattgacatatttgtatacatttaccaggtacaatgtaatcttttgatatatgtatgcattgtggaatgattatatcaagcaatgaaaatatccatcacctcacatgcttaccatttttttttttgtagcgagaaaatctactgttactcttttagtaattttgaaatgtgcaatagattattatcaactatggtcaccatgctgtgcaataaatcttgaaaacatattcttcctaactgaaactttgtaccttttgaccaacatctcccaggtgatcatttttgacttgcaaatgtcctattccatttcaatgaaagggaaagcaacactagtatcttcaaaacttgaaaagcaaagtgtctgtgcataaaaaaagaaagatccttttatccccatatttcagtattataaagtcatgttggataaatgtgctgagagaaatttgcattttattgcacrcaaaagaaaactggacacaataatataggatataaaattaagtcaagagttggcctttaacaattgtttgtagcttgttatgtagttaaatcttgatgttatttggtcttgtccttatacgtgcattgacttcatgaaaatcaaatttataatcacttgtatataattcagtgtaatccatttaagacagttcacatggagggtccattggagatttggcctttcacccacattcctccactgcacaaataactcttccctgaattgttggatgtgccattttagtgatcaagggaggacccctggaacacaactaccgattgaagcagttccattttcactggggggccatcgatgcctggggttctgagcacaccgtggacagcaaatgcttcccagcagaggtatgttgagaaggtcaggaacagtgacaactgtagagaagtggggataattctgaacttttagttgtaagacattattagaatcaggtgattcctataaatgctaaatagctttctcaggcagttttgatcattctcagctaagacatgtaaaaatgttaacttctctcatctcaaataatatagttgaaatgaaccttaagatcctgaaactgaattcttctggaattcgaaagtggactcaaatagtagcccaaagtaataacccagggaacattgtggagccacaggttgaattaatgcaagtttgcggtggtgggagcctaaatgaaggctgtggcaatagaaatagagaaaaagggcaagatttatcaagcatttctgaaattaaagcaacaggacttgaaggtagggttctcttcaggataggagaaggcaaagttaaccacgactttgtggtgtctcacttgggaggctgggtgataatgcactcataactgatgaatgaggaatgatttgtagggaaataaagggagattttaaggaaatagaatttcttcttacaacttttttcctaattcaattgtaaatgttatgtaaaaaaagcccatttaaaaatttattttatattttttatatttgtttcattttattttgctttgtgagacagggtctcactctgtcacccaggctggagtgcagtggcacaatcacggttcactgcagcctcgaccttaagcaatcctcccacctcaagacaacaggcgcacatcaccatgccctgctaatttttttttttttttttttttttgggacagagttttgctctgtcgcccaggctggagtgcagtggcgtgatcttggctcactgcaagctctgcctcccgggttcacaccattctcctgtctcagccccccaagtagctgggactacaagcgcccaccactgcgcccagctaattttttgtatttttagtagagatggagtttcaccgtgttagccaggatggtctcgatctcctgaccttgtgatccacccacctcggcctcccaaagtgctgggattacaggcgtgagccaccgcgcccggcctgccctgctaatttttaaatttttttgtagagacaaggtttcactatgtcgtccaggctggtctcatactgctggattcaagtgattctcccaccttgacctcccaaaatgctgagattacaggtgtgagccaccacacccagcctaaaagcacattttaaatggttattccttgaagaagaaatttgtctttaactcctgcataatttccatatggaggatctatttctctcaatataaacatcttctctcctgtagatgcaagtggatttcgaatattggtatttcattcaaatcaagatgggactggacaaatgttgattgctcactgaagtgtcactttgttatatgaattttctatttttctccccaaataaatccctttattctaaaataatattaattgctgctcttgcctaaatttcttcctgatctttgtttctatctcattttggattgtcatatggttttcttggtggctttactttgggtgaggaaacatgtttaaatgtcataggttgactgaggctgtgggtttattctggagagattctgtatagtcacgtgttaaccctcttttcatggtgtttcagctgcacttagtgcattggaacgcagtcagatttgaaaactttgaggatgcagcactggaagaaaatggtttggctgtgataggagtatttttaaaggtaaaawatctcaccaactttaaatgacgtgttgtattctaggatgaaaagatagaacagtataatattgttatttactttaagaatgttgggatccatacattggtaagataaatagtgcttgaagtacaggattgttaagaatatattttagggccaggcatggtggctcacgcctgtaatcccagcactttgggaggccgaggcaggcagatcacttgaggtcaggagttcgagaccagcctggcttccatggggaaaccctgtttctactaaaaatacaaaaattagccaggcatagtggtgcgcacctgtaatcctagctactcgggaggctgaggcaggaggatcgcttgcttgagcctgggaggtggaggctgcagtaagccaagattgtgccactgcactccagcctgggcaacagagcgagactccatcccccccaccaccaaaaaaatatatatattttaaatgatataaaaatgcacagcccaatagagtggtcacaagccacatgtggcaattgagcacttgaaatgtgtctactgcagttctggaaccatttttcattttatttaattttaatttcaatttaagaacttaaatgaagcagggggcacctttcactgcaggcatgctgaccttgtcagcaaacagcctgctgatttgttctctaatttaattcagtaatgtttataaaattataaattacaagtttaagtgtaatttcagtcatgcagtttgtttttatgtaatcaccaggtagttaattttaattcacattctgttacagtttctacagtgagatgtccattgtttgtaatattttcttacttgttgttctttagctaggcaaacatcataaggagctacagaaattagtggatactttgccgtcaattaagcataaggtactatttgttttccttaattacttgaaatatacttttatgtttcaatctcagagcggagacattaccaaggcactttgaattgggaagtttaattaggtgaactgtattcagccttagaagaaaacttgccatttatgattccaggggacagaagtcatcattctgtgggtaggcagtgagctttctggttttgctgcagtgccgctgaggacttggggactcaggaacatattgctgtcccctcctctgttcctgacaccggctccttctaagtccttgtgaacacacccagagcagccttctgttctgtagctgccatcccacaggcagggagcagagcgcagttctacagaaacttgccttgtccagctagaaagaacagtaatccacatccttcaggtcggatgcctttgtccagtcccccaatattaattcttcaatattcagaatctcaaagggctgctctctggaggcccatatattctcttcttctccctctcatcccccactgtatccctctggtccccacctctttccctctcctttcctctctggaagcccgtatattatctccccccatcccccactctgaccttctggtccctacctctttccctctcctctcatctccattttcctgtttttccctctctttccttttagttcaggtttctggctcctcctgagctgcatttcttcttaaaaggacaattctcagttagcctctcgaaaatgcaaagcctccaaccgggcgcagtggctcacgcctgtaatcacagcactttgggaggccgaggctggcggatcacgaggtcaggagatcgagactgtcctggctaacacggtgaaaccccatctctcctaaaaaatacaaaaaattcgccgggcatggtggcgggcgcctgtagtcccagctacttgggaggctgaggcaggagaatggcgtgaacccgggaggcggagcttgcagtgagccgagattgcaccactgcactctagcctgggcgacagagcgagactctgtctcaaaaaaaaaaaaaaaaaaagaaaaaagaaaagaaaatgcaaagcctctttctttatgcactggccgctgtctaaaacctctcaacaaaactcagaggagactacctgctggaacctcactagaattgagagatcaagtggttttggccgttttcccacaggggaatataaaaaatgcacagttaattccagaaacaaagccaggcatgataccatcctaagcagcgattcttcaggtagctgcccagaaaggcctggagctgctctggaccactgctgatctccagatactccctgagaaccrtcacctcggcgyccaattcctgagtggttttcactactaaataatgactcagttatctcttctcttggccaggacgcccttgtggaatttgggtcatttgacccttcctgcctgatgcctacctgcccagattactggacctactcagggtctctgactaccccacccctctccgagtctgtcacctggatcattaagaagcaaccagtagaggttgatcatgatcaggtatgttctctccataatttcaatctaaggaaatccttgtctgcccatgtaaaacaaggctgggctcagactgtggcatcagttttaacatcttgtaatgcttatacatttttattgaagtgtaccaacgtcttgtctcagtttggacatgaatttggggatgtttcaaattaactagagagaagagttaaaacacagaagaacataagttttttacatttatatttgacaattacatatgtcttcttatgccttgtgtattttatatataaatattaaactctatacaaaatcaagacccttttaaagggaagagtgaaggctggaaatgaatgtgttcaaaactgtttaaaatccttaagggaattctgctatggaatctcaggataaatacagaattcaacaatgtttgtccagaaactttaatgtaagtccattttttgaatttgggatctatttttcccttagaaactaagtctaagtagtatttactatgcaaacactcaaaatcctgtataatgtataatataaactacaataatatttactcatacttgttttatgggatttttattgattataaagcattttcataagaaaaaaagcttccaaattctttttatgaagccagcataactgataccaacactcaccaaagattggacccccctctgaagaatataaaagaaaaaaaagctaaaaagaaaatattagaaacagaatccagcagtacatcagaagaaatatacactttgtccaagtagcttttactccagtaatacaagtatggttcatgttaagaatgatattaatgtaattcattctatcagtggatctaaatagaaaaatcatattatcatttccagggaagttaaaaagacatttgtaaaaatcaccattcagtttttgaaaatttttaataaaacagagctgaatagagacttccctatcttgataaaagagattgatctcagttcaaaagcaaatagtaggttttgaatggaaaggattgttaccgtattaagttttatattaaattacattctggaagtagccagtacagttagactggaaaataaaaaataaattagagaaacaataaaaaacgactacaaaaatcagagataatttggtaatcagtggaatacaatatcaatttctagaaatcaatacatttgacatatataaatcacaatcagctaaaagatatgatataaagatataatgtaagaaaggctcctatttataatggaaacaaaaatataaaatacttcggaataattttaacaaggaaagctaataagaaaacttaaaatgttcctggaggatacaaaagaaggcttgaattaataaagttaacacattataggatcaaaagacataaaaacacctttttttgtcataaatgacaacctaagttgtcattctccatgaattatttattcaccataaatttatgtattcccaataaatatgccaataggatttttaaattgatatgctatttctaaactcatgaataaagacaaacacataaatagccagggaaaattctagaaaaatacgggataattagactcacaaagttataaagcctcaataattaaatagcgtgttcctggcacatggataaagagatcaatcaagggaagtatattagcgttctccagagaaacagaaccaataggatatatattgtattagtccattttcacactcctataaagaactacctgaaactgggtaatttatgaagaaaggaggtttaattgactcatagttccacaggcttaacaggaagcatgactgggaggcctcaggaaacttaaaatcatggcagaaggcaaaagggaagcaaggaccttcttcacatggtggcagaagagagagagagagatgggggaagtgccacacacttttaaaccgtcagatctcatgagaactctttcactatcacgagaacagtaaggaggaaatccaccctcatgatcccctcccctgacacagggggattacaattcgacgtgagatttgggtagggacacagggccaaaccacaccagatatagataaagataaaaaaaattaagaaagacaaagttagataaataaccctataaaggttaaataaccttaactctataaccctataaagataaataaagaaaaagatagataaagttgtatcataaggtattggctatgtgattatggagactaagaagtcttacaatctgccatctgcaagctggagacccaggaaagacagtggtgtagttcaaaggcctgagagctggagagctgataatgtagatttctatcttggtctgaaagcctgagaaccaggagctccgaagaaaggagacgattgatgttccagctcaagcaatcagagcaaattcagccttcctctgcctttttgttctattcagaccctcagtttattggatgactcccatctactttagggagggccattcactttactcagtctaccaatttaaatcctaatctcctccagaaacaccttcatagacatacatagacacagtatttaacctgtctgtgcatcccatgacccaatcaagttgacacataaaattaaccatcacaggaagaaaataataatttcagaaatatatccaaatacatatgagaatttattttatgataaatatagcatctcaactcagtaggcaggaaagatagagtattcagtatttggtaaatgctgttgaggaataattgagcaggcatttgggggaaaaaaattggatccatcattcagaccttacacaggaatacattccagatatattacatgtaaaaactaccaccatgaaagtactaggataagcataggaaaatccttttatgcctgcaaatgtataggctttgtggcctatacatttagtctgtttctattctttggattaaaaaattgacacatttccttgacttatattccttctagaaaaacaaatggacataacattgaaaaacaaataaagcaaatacatcagagggtcagtggcccatgtgaggactttgtaaatacgatttcaacaaaattttaaaatttatttttcaattatataatttaaaattttattttctggtctaactgtactggctacttctagaatgtaatttaatataaaacttacggtaacactgaaaatttagtaaggaaaacagtgctacctgtcatytataatattatcctagttgcctrtaattttaccactatcattgtttggggaaatccttctggtctcttgtctgtccagatgcacataagtccttatggtcttttatctatataaatatacacaatttttgtatgaaaatggaatcattctgtacataccattttgctgctcttttcactcagtgatgcctggaacrttttttttttttttttaagacggtctctagctgttgcctgggctggagtgcagtggcacgatctcggctcactgcaacctctgccttgcasgttcaagcaattctcctgtctcagcctcccaagtagctgggattacaggcgcccgccaccacgcctggctaattttttgtatttttagtagaratggggtttcactgtgttggccaggctggtctcgaactcctgacctcgtgatccacccgcctcggcctcccaaagtgctgggattacaggtgtgagccaccccacccagctgcatggaacattttatagataatgaacatcttcagtattatttttaaggactatatactagttcatttcatagatcagatgtcatttatctttgatacttagactatttctaatcttctgcaattagctgaataaaaagaaacattagctacttgtacagctttctaattagtgagggcttttgtgtaatttgcatgtgcagccgctgtgtgatatgttcattgcttgctttcagtcgtagttctgcctcttcagctctatttgccctgaagtctttgttgcaaatgactcttcgcttgcttgtctactgtgccccaggctgtcttctcagttgttacaatgaggcagattgaatgaggggaaatgtgaatggattttcctgctggcctgaagtaaagtattttgttttcttttttttttttttgacatggagtttcactctcgttgcccaggtgagagtccagtggcgcgtgcccaggtgagagtccagtggcgcgatctcggctcactgcaacctccacctcctgggctcagtagctgggattacaggcatgagccaccacgcccagctaattttgtaattttagtagagacagggtttcaccatgttagtcaggctggtctcgaacttctgacctcaggtgagccacccgcctcggcctcccaaagtgctgggattacaaatgtaggccaccacgcccggcctaagtaaagtatttcataacacaattgggtctgaaaccaaggggctactggttgatactgcagccacatcagagaacaagccgttgatattctgggttgctccttttgcattgagttgtattgtctaatattgtaaccactggacacatgtaaccatttacatttaaatataaatacattaaaaataaaattcagttcctcagttacactggccacatttcaagtgcccagtagccacatgtggcttgtgactaccgtaatggaccgtgcagaggacatttccgtcattgcagaaagttctattggacagcaccagcatagagcatcctgtctccagttaagacacctacatgcagcctggtgtggtagctcacacctgtaatcccagcactttgggagacctagctgggaggatcacttgaggccaggagttcaagaccagcctgggctgaacatagcaagaccctgtctctacaaaaaattaaaaaattagctgggtgtggcagcatgtgcctataatcccagctacttgggaggctgaggtgggagatcacctgagtcccagaggttgagcctgcagtgaatcatgatcacaccactgcattctaacctgggtgggtgacagagtaagactttgtctttaaaaaaacaaaaaaaaaaagaaagaaagaaaaggaaaaaaaaaagacgtttatattcattgctttgcccacaatacccaggtgcagtgagcaatcaataatacttattttatgttcatgattcagttaaattgttttataaacccactttttttggtgttgttagtatatgcatcagggctttcctttctcattctgtaagctggctgttttgctcatttaaagaggaagttcttgagaatgaaagagatgaattaactcatccttggtaaatggataatatgtggggacagggcctttgccccaagtctttggatcccaagtgccctcctggtttcaccacctcttgctgctctcctccccrcaggaccaccatcaggatcaccaccaccactgggcattttattccctgtcaagtggtgaaggcgttcttacccagaaataacttctccttctgtatctaatttgcaacgaatgctcagaattgtaaaaatgaaagtaatttattcacgaggtaaagcgagttttctgttgaaattatttatgctttctgtttctrtttctagcttgagcaatttcggaccctgcttttcacttccgaaggggagaaagagaaaagaatggtggacaacttccgcccccttcagccactgatgaatcgcactgttcgttcatccttccggcatgattatgtgctgaatgtacaagcraaacccaagccggccaccagccaagcaaccccctaaaacattcatatctaggcagtattttgcttttgctttaatatatactagcttactataaattgttaactagactattctaagtgcctgcatttgataatatttacagatgtgcatttcttagcatgagagtgcttcatcagtctttgaggaaggctattcggtaccagcaagagacacaagtttctcttacagatacctgttggtaattgtaatgccttttttttttctttaagagactaggtcttgctctgctgcccaggctagagtgcagtggccaaatgatagctcactgcagccttgaactcctaggctcaagcagtcctcctgccttagcctctagagtagctggggctacaggtgctggccgcctggcccagcttgtaatatctttttatgtctgacatttttgagctatctttttatgtttatccattagtggttctatagcactatacatagggattataatcaaaatttttaacatgtggtaaggcacagacactgaccagaactcaggccttgcagaaacagcctatgggcccmgactggtacttcctggctgaatattggccatggttttagatgtattttattttataacatgaatgtgtattctttcataagggcttatcagtcagtatatttgccccagtgtttagttgttacaaggacatgatatgcttacttactatcagtttatgatgtagaaaatatattttgtaattataagaaaacaagacttttcctatacccagaaatccctttgcatttccgaagatcagatattttgcttaaaggtctgatcatataggaaatatatgcagaacattttaaagaaaatgcctggctgggcacagtggctcacacctgtaatcccagcactttgggaggctgaggcgggtagctcacttgaggtcaggagtttgagaccagcctggccaacatgatgaaaccctgtcactactacaaataaaaaattagccaggcatggtggtgagcacctgtaatgccagctactcgggaagctgaggctggagaatcgcttgaacccaggaggtggtggttgtagtgaaccaagatcacaccactgcactccagcctgggcaacagagtgagactctgtgtctaataaaaaaaaaaaaagaaaagaaaagaaaaaatgcttaaagtgcctagaacttagaattctttcattgcacatttccagaaatatttttcttttcttttttttttttttttttgagatggagtctcgctctgtcccccaggctggagtgcagtggcactatcttggctcactgcaacctccacctcccgggtttaagcgattctcctgcctcagcctcctgagtaactgggactacaggcacatgccaccacgcccagctaatttttgtatttttagtagagatggggtttcactatgttggccaggctggtcttgaactcctgacctcaggtgatccacccgccttggcctcccaaagtgctgggattacaggcgtgagccaccgtgcccggccttccagaaatatttttcaaaggactagtaatctaatagcctatagtttatattattattttgtattatttgcacgctgttacatagtatataatgataatgttttctacagtgaaagagctatcccgtcttccctttacaactgtctgaactttatttactcattagtcaaggttctttgcaaggcaggtgattaacttaaatatctcagtttatacagtggtttaaaagacttttgttatggtaatagggagagaaacttgtcagataggctaaaatctagataattctacatattctgaggaattcatgctcctgtggctcttgcttataaatatcttggaatgtttctgaatgcctctaagcctatgttcagactctgttgcgtcaatgactggtagtatttctttcattaatatgtttgtcatctggtctgcaagatagggttggatgaatatacttaacactactgaactgtacacttaaagatggttaggaaggaaacgggactacatcaaacttaaaaatgtctgtgtgtcaaaggaagcaatcaacaaagtgaaaacgcaagctctagaatgagagaaaataattgcaaatcgtctatcttataaggagcccaaatccagaatatatgaggaacttctacaactcaacaacaaaaaaccaaataactcaatttttaaaaatgggcaaaggacttgcacagacatttctccaaagaagttatacaattggccaataagaacatgaaaatatgctcaacattgccaattattagggaaatgcaaatcaaaaccacaatgagatatcgtctcacgcccatcatgatggccactatcagaagaacaaaaaaataacaagtattggggaggatgcagagaagttgaaacccttgtgcactgttggtggtaatgtaaaacggtgcagtcattacggaaaacagtacacaggtttcccaaataactgaaaacagaattaccataagaattaccaccaaagcgggatctcaaagagatatttgtacacccatgttcatagcagcattattcacaatagccaagaggttctggaagcatcccaaatgtccatcaacagatgaatagataaaggaaatgtggtatatacagtcaatggaatattattcagcctttaaaaagaaggaaatcctgtcaaatgtacaatgtggatgaaccttgaaggcattatgccaagtgaaataagccagccaacaaaagaacaaatgctatatgattcctccatgtgaagtatgcaaagtagtcaaaatcatacaatagaaagtagaaaggtggttgccaagcaacggttgggggaaggggagagggtgaatttgtatttagtgggtacagagcttgtgttgcaagaattctagagatctgttgcaaaacaagtgtgattgtacttaacactactgaactgtatacgtataagtttgagaaatatctcttttaaaaagggggaaatgtgaaggcttttgcatgtatgccctaggaaatgcatagaattcttagaaaggtaaacatggtaaaaaaagaagtctttgttaactttctgcagttcacctgtttcaaagtatagttacctttaaaagggtaaacacacaagatatgcattttccaaagcatacaggctttcctcctagctgtcttgttttttatttttttttattttttttatttttttgagacagagtcgcgctgtcacccgggctggagtgcagtggcgcgatctcggctcactgcaagctccgcctcccgggttcacgccattctcctgcctcagcctcctgagtagctgggactacaggcgcccgccaccacacccggctattttttgtattttaagtagagacagggtttcaccgtgttaaccaggatggtctcgatctgacctcgtgatccacccgtcttggcctcccaaagtgctgggattacaggtgtgagccactgtgcctggccttcctagctgtcttgtgaaacgataagtcaaaaccctactgcagtgagttttccaaactgaagggagaagcaatgtacagaatgcctgacttgcccttaacatcttatacctggtgttctggcatgattattaaccacactctttttcactttgaaccatgtcctggtttgcatggccagcttccctgcagaggtgatagaaactgacttgaggcagtttctttctccatgccttagttagatgaccctcaaaggggcacagcagatttccctggctactgatacaccttaacaagaagcttgtgttttttatgccctcaaaagtgttttacttatactttcctagacataaaggtggaaaatgggcctaaggtctgtcaaaggtcttggaaaagaagattgtattaaaattgctgtccgtcttcattaaataatactagatcgatacaatgctttctttacagtattagtggttggtgaaagacttccttcctattgttacagtatatgtatatatctgtaaaattaatgagatatcctttaacttgtagattagaaagcgactaaaaactcataggggatttactaaagaagcaacaatgggaagaagcagccgatcctcctcagtgcacctttttctgttgcacagtacagtgcacagtgtgctggcatcaccatatagggcaagctgtgaccgcctttctcctttcccagggctacatggtgccaagcaggttcagtgtacactggttaccaacctgtctgattccattgtgacagaacacactcacacccaatacattacatgaagcagatttattacttacagacaggaagcaagggacaaaagaggccctggctccattgtgagccagtcccccagggctcaagaaagctgcccagggcggggctgatggagtcttgattgtacgtgccccacttgcaccacagcctgccttgggttatataccataggagccacataactcattgggcaaagctttaaagtacatcctccttccaggggaaagaggaacacaacctcgctgtctcaaacagttccctaaatcaagatgttacattccctaggagggacaacaacaaggccaacctgtttcaggcagttcctccatatcaggatattgcattcccagtgcattctacagttattcttaagaactacaagcaaggaagaagggagaactgggtcagtccaaggccacctggagaactgtcttgtacatgggttagggtaaagttggctattctaaaactaagcatccacccaaaagaagtcttggaagatgtctttccctgttaaattcagatgatggtaattatagtttggaagtggaattggcttttagagttacttcctgtaatgaaattaacaagcaattcaggcctatttctgaaaatgaattcagtggttaattgttaaaaataaatgtctaactcctataaaaggaaatttacattcatttctaactcactaaaaaatctatggccgggtgcggtggctcatgcctgtaatcccagcattttgggaggccgaggcgggcagattaccggaggtcaagagttcgagaacagcctggccaatatggtgaaaccccgtctctactaaaaaatacaaaaattagccaggtggttgtggcatgcacctgtaatcccagctacgcaggaggctgaggcagaagaatcgcttgagcccaggaggcggaggttgcagtgagccgagatttcttagaaggaattgttacttattgttctgaagtgaaagtctggtctgattcagaagaaatgttacaacaacttaaacactgatgctttcagaacgggcagcaattctcagcgtaaattctgatcacagggaccagcaaaattggtgagttgcatagctacaacattctgtgccatccagggcactctagtttggggatacaactgccaaacctccaactagagagtttagtttaagatttagtcaagaagcagaaaggtaaaggtgacaatgtgtagtaaaccatgatagatgttataaaaggtggaatacttgtactggaaatgcatacagcgcctcatcccctcttgaggggtcaggaagttttcacactaatgatgatggtgatgagatgatgtaacagctaaagttttggaggcattcactattgctaggcactgtatcagcatataacatggcttatcttactcagttttcacaataaaagggttatgagatgggaactattattactatcttgatttttacaaatgagaaaacaggagtagacattaaggaatttactcaagatcacagccaaccaatgcactgagctggacaaggtcaacttgggggtgaagggcatatgtgttgctccaagtgtgtcagtataagagagattagggtgaggttttatgcagagtttgggcttcagctgagtaattctaaggagggattaggggaaggaaggcagtttagtaattgagtatctcagaaactttaatttggaggagaacggaacaaaggtaggccaaggaagctattcaatcactcaaaagatagaggttattagtcattttacagctgtaatgcatccttgtgaggaacattttttgcttggccttgtccctggccttgtatgtgtacattacagtctgattattagttgggatgatttttagtttctcaatccctactctcattgccccagtttaattcctcaacacctctcacctagattattgtgatactctagttttatcttttaaatcctttatattgcaaagcagagtgatttacctaaaacacaaacacaaccacaataagcctctatttaaaaagctttcaacggttcactgttgtctctacagaatgtaaacagagcgtcttaacatggcacaccaggccctccttaacctagccctcccagcccatcactacaactatattccttgatattctcgaattgcactttattttgttttgtttttttgagacggagccttgctctgttgcccaggctggagggcagtggtgccatctcggctcactgcggccgccacctcctgggttcaagcagttctcctgtttcagcctccagagtagctgggactacaggcatgtgccaccacacccggctaattttgtatttttagtagagacggggtttcaccatgttggccaggctgacgaactcctgacctcaggtgatccacccgcctaggcctcccaaagtgctgggattacaggcgtgagccgctgcacccagcctcgaactgcactttaaattggatagctgggcgggcgtggtggctcgcgcctgtattcccagctactcgggaggctgaggtggaaggattgcttgaccccaggaggtcgaagctgcagcgagtcgtgattgcgccactgcactccaacctgggtgaaagacaagaccctgtctctaatatataagaaatgaataaataaataaattcgattgccaaaattcttgctgttcccagcatattccactttcacctttcagcgcctttgcttatgctgatctgactgtaactgcattcccacccttctccttctgggtaaagggcatcttctttccaaactcaactcttagcatcagaaagctgtccctgatactgcagttgagtcgcatgtgatactgaaaaaaaaagaaaaaaggaaaaaaaagagagctctccctgaatcccttggtggactatgttaggtaaacttcatctttgcctgcatcatattatgtattggttcttctctgccccctcgattgtaaactcctcaggggcagaggtaacagctttgcagccctgggagttaggtttgcttaagggaccagaacaggtgtgactggcagggagcgaagtctggagctttgtctgaggcgctgataggtggatcggcggaaggacgcggaacctggacaggtcggaaataaagccgggcgagcagctctgtgcgcgatgtgacttcatgagtggatgctgagaaaagcggcagagtacgactttaaccgcctagccacaacacgtcctgctagggcgaggagggagacagtgatacagcactgggcaagtgctgaagcgacaattacttctagggcggggtaaaagccccagagtatttttgctggaaggaggtatttatttgagcagggttctggaagacgagccgccgaagggtacctccggctttccgtttcaagtcccacgctggtggaggttgctcggtacccgcgcctgcgcgtgcccgtctcgactcttaggcccgccctttcctgccagacctggaggggcggggcggtgccggcaagatggctgcgcccgagaagatgacgtttcccgagaaaccaaggtaagcgccgtacggggagatgagcaggcgagcgggccgatcgtgggcatggaggatgtggtggcaggaagaaaagagaagctgggccaagctaagtgagccaccgcggcagctccattccttcctggtgcgcgccctggtgccctc

SEQ ID NO: 94332 - DNA, 65115 bp, Homo sapiens
  misc_feature (1)...(65115): n = A,T,C or G
ggtcatcattgtcaactcagctcttagcagagagtagaccctggggtgggtagctcctctctgcagctggttatcccactgtctcaagtctggctgagtctggggcttttacaggcctcagaggagaggaagtgtgcgccaactggtccataggcacccagataaaacacaagttctcactctggtttttgggaccagcagcccagcctccaggcttcaggccctccccagcttgagggtaggtcttcaccggtgacctgctcccttccacccaggagactgcctcctgctggcattcacagcacccaaactgtttgtgcaaaggggcacctgcaggcaagcacagaggctgagctgccccagcacccccttggcctccctcccatgctggcacccaaagtcctgagggggccaaagccatgtgtcagtgctgcctggagtgggtgcacacctggccaggctgcaatagcacccagcctcagctccaaccttgctctgggaatggagtgggtgctgggagcagaaagaggccaggcaatgggaggagacacttcttagcctgcaggaatggggtgggaggtcttacagggcccccaagagtgcagagatgcccaggtctgcagctgtggtttgagcagctatagctgcacccaggagggtggggctcctgcctgctccaggaacccaagagcacagggaggccgagttggtggacatgactcaggcagctgcagctgtgcctgagagggtagggctcctgcctgcttttagccccaaagagcacagggatgcccaggtctgcagctgcagctgggcagccacagctgtacctggggagcaggaagctcctgccctgccaactcagaaggaggcagggcctccacctgttcctggttcccccagctccatggagctggcagccctggtgtgccacccccattgcaagtggcatcatgacagcagctgctctagataggccgtcactgccatcaatatgtcacaaaagttaaatttccagtttggcaaactcaaaagccttcagggactagctgggcagattgcataaacgttacactgctggttggagaacataaagaatgaaattctgggtgaccaatgtgatggcatggcatgacagtcaaaaggcatccagttaaaaaggaaaacactgtcctttcaagcaaaaagaccgtgggcaaattttgatgcctacaatttctaaactatgttctcaaagattaacttgataatattactattttacaaccttacctttgatagtaaaagggagtggcaattctctgaggtgactgggcaagagtcctgtgaaaccaacttactttttttctatacttctatactgtggtatattttccctggctttctgggttctaaatttattacatgttatttcatgacaaagaggtatactggcatcaaaagtcaaaacacagtttttcatttcttgcaagaaagaaaacccaagttaagtgtttttcatcccagcacaaaaatcttccacccatgggcacggacctaattctaacctaagctcaaagttccaagttcatttactcaagaggtctgaataaatgtttactttggtcacagcttttatccaatttccgtatctgactcactaggtgcttctaactggtgccctgatgttacctaacagagcaaggatacaacaaacagcaaacataatttgtttcttaatctgtgcttaatccatgcttgttttggtaatgtctgcacatgctaagtcccactgacagtgttagttggttagcattaatcttatggagttgctgttgccaaaggacatatcctttctgtggaggaataaaacaattaacaaaaacagcatgattgtataacctgaacaatgaatgaaaaatgagttgaggctaaattttattctgggagttaatcacgactcacagaaaacactggaccagcttcctaaactttctgtgccttggtttgcccatctgtgaaatgcactctctgtacttcaaagttataacaatcatatgccctagattttaaaattgttccacaggcacctcattcaaacattcaacaatatttattgagggcatactattgtaatgcctaaccttgtttttactaaccctgtttttagattctctctttcctttaatcacctagccttgtttccacctgaattgactgtcccttagctaagagagccagacagacttcatcttggctctttcactggcagccccttcctcaaagacataacttgtgcaagctgactcccagaacatccaagaattcaattaactgataaaatactgtggcgagcaatatccgcagttcccaggaattcgtccaattgataacgcccaaagccccacgtctatcagtttgtaagagtcttaaagcccctgcacctagaactgtttactttctggtaatcatttatccttttaactttctgcctactttacttctggaaaattgttttaactagaccccccctcccctttctaaaccaaagtataaaagaaaatctagccccttcttcagggccaagagaactttgagcgttagccatctctcagccgctggctaaataaacagactcttaattcgtctcaaagtgtggcgttctctctaactcgctcaagtacaacactatgtgcccagcactgtttgtacaaatccaacacatcccaccagttgctcgggccacatccctgaacccaacctttgcttcttcatttctcccagatgctcaatcagtgaatcctataggctctatcttttcaatagatctagtagcagaccactactcaccactccactatcaccatgctggccccaaaactatcaactcttgcccagactactgcaatagtttccaaactgcctccttccttccatcctgatcatctacagatctcttcatacagtattcagagcaaaacttttctatgtgtcacctcactggcagacctggagtctctcagctacctttcttagctgtattttaggtaccagacttagtataccaacagtctacctggcttatagctaggactctatcatctggtattctgttacaacaaatgtactttaagttaaaaataataaacaggcttatatttaagtggcaagtgcttgatatggctgctttagcagataagtctactggtagaatctagaggagaggaaataagtcatacatggagaccaagatgcaaaaaccactcatgagcagccacataggacagaggtccctctggagaagccaccaaaggatataaatctctcttcaggtttgttttgagaaaacacccaagcaggaaagctgctgtacaaaattactattgccccattatgcgattgtgttttacttttgtcttagcattaatcctaccttgtggggaaaagaaagagagctcagactgctactgtgtctgtgtagaaagaagtagaaataagagactccattttggtctgttctaagaaaaattcttctgccttgagatgctgttaatctgtaaccctacccccaaccctgtgctccctgaaacatgggctgtgtccactcaaggttaaatggattcagggctgtgcaggatgtgctttgttaaacaaatgcttgaaggcagcatgcttgttaagagtccactccctaatctcaagtacccagagacacaatacactgcggaaggccgcagggacctctgcctaggaaagccaggtattgtccaaggtttctccccatgtgatagcctgaaatatggccttgtgggaagggaaagacctgaccgtcccccagcctgacacccataaagggtctgtgctgaggaggattagtaaaagagaaaggaaggcctctttgcagttgagataagaggaaggcatctgtctcctgctcatccctgggcaatggaatgtctcggtgtaaaacccgattgtatattccatttactgagataggagaaaaccaccttaggcctggaggtgggacatgtgggcagcaatactgctctttaaggcattgagatgtttatgtgtatgcacatcaaaagcacaggacttttttctttaccttgtttatgatgcagagacatttgttcacatgttttcatgctgaccgtctctccactattaccctattgtcctgccacatcccactctctgagaaatgcccgataatgatcaataaatactaagggaactgaggctggtgccagcgcaggtcctctgtatgctgagcgccggttccctgggcccacttttctttctctatactttgtctctgtgtctctttttttttcttaagtctctcattccacccgacgagaaatacccacaagtgtggaggggcaggccaccccttcactacctgatttttatttattgcttgtctcctccttttaaaatgtaagatccaggagataagtggcctctatcttcagtaccatagagtgcttggcacatagtatgtaattcagtcagtgtcaggcctctgagcccaagctaagccatcatatcccctgtgacctgcacgtacacatccagatggctggttcctgccttaactgatgacattccaccacaaaagaagtttaaatggcccgtctttgccttaagtaatgacattaccttgtgaaagtccttttcctggttcatcctggctcaaaaagctcccctaccgagcaccttgtgacctctcactcctgcccgccacagaacaaaccccctttgactgtaattttcctttacctacccaaatcttataaaacgaccccacccctatctcccttcgctgactcttttcggactcagcccacctgcacccaggtgaaataaacagctttattgctcacacaaagcctgtttggtggtctcttcacacggacgcgcatgaaagtcagtatttatgaatgactcaagacacaaaaatagcttcataaaacagtgctttgcttgagtttttatgaataaaccaatctgaagtcatcccttttctagctcagaacaaatttctcccttttattttagaggaagatgagaatggagggtacaaatttaacatgagtttactgaagaaggaagcaccaagattaacctaaatgagaatactattctaatgacattagccagagaataatatcgttcctgttccagtactgccaattaccattacaagtcccaatatcttcatttacaatgtggggacaattataacacctaattattggttattgtgaaggttaaataagaaaatatacttaaagcccttaggacaccacccagaacttcatcaataaatgcagctattttgttattatcatatttatattagtggtatactacatcataaatccactcaaagctgatgctgagtcacggtgacccctaactgaacacattgcctcaatctgctccccataatgcacttgagatacccactgccacaatgacgtctttggtgattttaatttactactattcagaggttcccaattttggcctacaggtcacaggcagtaagaaagggatttcagggactaaatcaatttatcactaggtaaaccgaacaagaacagtttgatcttatcgtgaatcactggagggcacggaacaagtcttacttctagaacccccagggcccagcggagtgtctgacacatgatagtcgatgttgattaaataataaatgaatgatgaacacatgccacctccttgacgggcagttcaggcaatcagacgtcctgtgcgtgatcagacgcctagcgcttcagaagcacgactggtgagaactgggcagcccttccacgctccgcactgcaagaactgcctgtccggaagggtgactgcaccagctccgctccggatatcttggcaggacgcgccctctggcggcgcctcgctcgtaggtgggccccagcgcgcagtcgcscgcccccgcgcgttgggaagttgggagggaggtgcgcgcttggccgcgcggggcggggcctctaccggcccgatggagcgcgcgggcgctactagccgcgggggccaagcscctggcttcttactgcggcttcatactgagggccsagccgaggcggcgcgggtgcaggagcaggacttacggcagtgggggctgacaggtgagcgggctccgggcggacttcggccaggcgggccaacctattgggactgcctcttgcgggccgggggcgcagcgggtgggccgcccggtgggcagtttacccgcycgcgccagggccttccttcgctcctgccgtgggcggagagaaactgcgcccgggcttggtggccacggcccccgcctgcgcggcgcgcggggccggcggacgccagatgaatgaggtcgcgggcccggtagccaggcctggcccctggcctgtggaggggaaacgtggtgagatcagcgccacctgcaggcctccgctgaagagttggacggcctggtgcaccaaggatgtaggtttccagttgctgttccggtgggtttgggtcccggcctggggagtttattggttgcttctgtaaaacgatcaactcatctcccagcttcagcttctccgtttactgtgcgcgcgcagttattggagaattcgccacggattaattctccggatcgagttacgtgcggtagtgagcggacaaactcaagcaaagcactgtttatgaagctatttttgtgtcttgagtcattcataaatactgactgaaccacgtactatatgccaacttagcttgtccgctcaccaccgcacgtaactcgatttattgacactagcccttacggagagtctgcaaagcgcgaaccttgcatgccccccagccctgccgctgcatggctgaccgtacttcctgcagctccgagaccccgctctcctcctgggtctgcgctgactcgccgctgaaccgccccagcctcgttttccttacttataagttgggaacgtagtgtgtgctttgactgtattgacagaatcatgcatcagtaataatacagtcgtttattcattacttattgaatgctactgggagcgtattcttaggcattggctacaaagatgagcaaaacaaatagggacccttcctacctagagttttagactagtgagagtgcatttaaaagtataaactaatttatttaagtgctcagtaccacgaaagagtaaggtttgtcattctaggaatgaaacaaaaggtgcaattctgtgttcagcttagaagactgaaagatgaagttgaatggagaggacgctgacatgaaagagaaagacctctctccttgattccctgagtctgtaagaatgtgtggctgtaaggagtatgtatccagttttaagtatgagcttgtagactggtctttttatgtttgactttatcttaacgaaagtttatgtttgtgggtttgcctatttccttgcaagtgttgggaatggttctttaagaacttgtgtgagagagggctcagaaaagtgtgccagttgatacttagctgtggataatatgccaggagaaacgtacatatgggcaagtgttttagtgaaaatgaggagacaagaggttgcaagtttgagtggatggaatggagtgagtaaattcagaattaagtaggcaaatgtggcaacttggataaattggtagtggagaaggaaaatagaaaagcagagtcaaaggaatggctactgaatattataacttgtaatttctatttctgtttaccagaataaactagtgttatgagaaactattcttcatgagttggttaaaaaaattcttactactttttttttcgtttggttacagaagtagtacgtattttcagtaaaacattcagggaaatagcctatgcataaagaaaataaatattaatctccataatctccttactgttaacatgttctctatcctgtataatttcttttactttctggtggagggggaaggtgaaaaatggagtttcatgtacatttttttgggaaatcataactttttttccttatcattcagtcttcttcaacatcattcttaatggttacagtttttcagtatatggatgtaccatagtttagacagtccctcttcttggtatttaggttctttttttttgctattgtaagtaacataaatatccttgtaaccaaatatttattataggtatggacgtttaattcctgaaaggtaccatttctagaataaagagtatgcaaaatttttgcttatttctctatactctcagcaacactggtattttctaatttgagaagttaatatgctatcgtattgtttaatttaatgtttatttggttaccaatattgatggacatttggatattcatctttggatcatgaagttaccttaggacctttttgtttctggaatatgcagacctattacttcttgctgttttgcttgctttttcactacttgtcatctccctgacagaagggcaaaagaatctacatctggaggttaaaaagctaaagactacctttcccagaccccactgtagtttggttgtaaacgtgacttggctttagccaggcacgtgactgggagatttggaaggggaaagtgaggggaaggacacagaggggtttggattttccgcttcccacttagctactacctcatgggtctgtgggagggtacagagcattcattttgttatcatggattgtggctgcgttgataggtccctggggctgacagtaccgtggcctcctggttggttcctggcttccaggtcgtggaggtagatacttccttggtgtgtccatactgtggtgcttgatttagcagttgtacccagaagatcagcctagatgttactcctccaggcctttcgacaattttgtggtgatctaattccctgtattacattcctttctgcctaacctaccaagggtaatttctggtttttgctgttgactcctaagtgttaagtattgttatctttgtggatataattacatattatttttgaaaattcaactttttttttttttttgagataaggtctcactctgttgcccaggctggagtgcagtggcccattgcagcctcgacctgggcttcagtgatcctcccacctcagccttctgagtagctgggactacaggcatgagtcaccagttttaagaaataatacggaaggatcccatgtaacctttacccagtttcccctcgtggtcatatcttgcaatgtggcacattatcacattgtgtacacttgcaatgatggtacactatcacaacaggatattgacattggtacagtcaagatccagaacattttccatctccacaaggatccctcaacttgcactttgatagctacactcacctcccttctacctcaccaattccttaacccctggcaaccactaatctgttctccatttctataattttgtcactttgaaaatgataggtgagtaaaatcatacaatatgtagcctttggggactggctttttttcactcagagtaattctctggagattcatccaggtcgttgcacgtatcagtagtttctttttattgctgagtagtactccacagcacagtataccacagtttgtttcaccactcacccactgaaggatatctgagttgttcatagtttgtggctattgccaaaaaagaaaagaaagatattgtaaacatttgtatacagattttgtatgaaaataaatcttcatttctctgtaataaatgcctaggagtgctgtgagtgggtcatatggtagttgcatgtttagtttttaaagaarctgccaaactgtttccagagtagctgtactattttacattcccaccagcaatgtatgactgagtttggattctttgcatccttgccagcatttgatattgctacttttttatattgactattctaatgtatgtgaaatgctatctcattgtggcttagatatgaatttccctattggctaatgaaatatgtaacctctttgataaaatgtctttttctgtcttttgcccattttaaaataggatcctttgttgttgttgttttttcactgttgagttttgacatactctagtctttatatamtctagatactaatattttctcagatatatgtcttacaaaagttttaaattttggctaaaatttatcagtttatcaattttttctcttatggatagttttcttgttgtttggtgtcaaatataagaactcattggctattcccagatcctaaagagttttttcctaaaagttttacagcttcttatttaagtccatgatctactttgagttaatttttgttgcacaaattttgatatgttgtattttcatttttatttagttcagtgtatttatttccctggagacttcctcttttgatggactgtttagaaagaagtgtgttgtctagtttccaagtgttgagagatttgcctctaatgtttctgtccatgaattctaattttattacattgtggtcagagaacatactctgtacaatttcagttcttttaaatgtgttggggttttctggccctgctttagtttggatatggattatctgtccccaccaaatatcatgttgaaatttgatccccagtgttggaggtggggcctaatgaaaggtgtttaggtcatgggggcaaatccttcctgaatagattaatgctctccctgagcagggagcagagagagtgactgacttcttacttactagcttccagaaagctggttgttaaaaagagcctggcatcccccacgcctttcttcctctctcaccatgtgatctctgtacatgccacccccacttccccttctgccattagtggaaacagtctgaagccctcacctgaagcagatgttggtgccatgcttcttgtacaatctgtagaaccatgagccaaataaacctctttttatttttaaattatccaacctcgagtattccatagcaacactaaatggactaagacaggccctgaatatgttgtatggtccatggcacttgaaaacaatgtgtattctcctgtctttgggtatcagcagagctgcattcctttctggaggctctaggggagaatatatttcccagcatccagaggctgcccacatcacttgactcctggcccctttcctccaacttcaaagccagaaacattgcatctctttgatccttctctagccagcttcctctctaaccacagctgttaaagtttctccgaatgatgcatgtgattagattgtatgtccattgcgttatccaggcccacctggataattcagggtactcttccatctcaagccccttaaccttgattatgtgttcagaatgccttttgccatataaggtcacatactcactgatgccaggatcagggcttggacatctttgtgagggccactattttgtctaccacttcttccttttacttttcacttatttaattatttttgggttgaatttcttgtagacaatttataattgggttatgtttaaaatccactctggaagtcttattttttttttttctttgagacggagtttcgctcttgttgcccaggctggagtgcaatggcacgatctcagctcaccgcaacctcctgcctcccaggttcaagtgattctcccacctcagcttcctgagtagctgggattacaggcatgagccaccatacccggctaattttgtatttttaatagagacggggtttctccatgttggtcaggctggtcttgaactccctacctcaggagatcctcccgcctcagcctcccaaagtgctgggattacaggtgtgagccactgtgcccagccaagtctttgtcttttaattggtatacttacaccatttatatttcaagtaattattactatgtttgagcttaactctgccatcttatttttattgtttttagtttatctctgtttctttttcttgccttcctgtgaattatttgaacattttttagaattttatttttgtttatttacagtgttttttagtttatctctttgtgtagctttttagtggtcgttacgggtattgtatgtaaatgtacgtatgtgtgtataaaatcacagactactgatattgtcattttacttatttgagtaaagtatggaaacattacttccctttatataaacattacttccctgtatatctatcttccctttgtatttatagctttactttttgtttataattgtcttaaatatttcctttagaaccacatcagacactgttataatctttgcttcagcggtcaaacataattttaaaaactcaagaaaaggaaaacctattgtatttacacgtttttgaatgctgcattctcaccttgatgttccaaggttccatcttttatcatttcctttttttccaagggcttcctttagccattctttgagggtaggtttrttgatgataaattctctttgttttccttcatctgagaatttcctcttcattcctgaataccatttttcttgattacaggagtctggattgacagttcttttctttcgatatttgaaacatgttgtggcatttctttctggcctttaagatttctgacaagaaatctgcttgcatttgaatagtttttcctctttaagtaaggtgttgtttgttttttttctggctgcatttaagatattttctttgtcttttgttttcagcattttaataattacatatcttggtgtgtattttttttttttttttttttttgagatagagtctctctctgttgccaggctggagcgcagtggcgctatctcagctcactgcaacctccgcctcctgggttcaagcaattttcgtgcctcagcctcccgagtagctgggactacaggcacccgccaccacgcccagctaatttttgtatttttagtagagatggggtttcaccatgttggccaggatggtctcaatctcttgacctcgtgatccgcctgcctcggcctcccaaagtgctgggattacaggcgtgagccaccgcgcccggcaatgttttgttatgtttgcggtttactcagtttcttgaaactgtagctctttagccagatttgggaagttttcagctattatttatttaagtactttttcagccctatcctccttcacctgtttttattggacaacattgaacaaatgttagatcttttgtggtagtcctgaaggtcccggagggtcatttgttttcagtctgctttctctctcttctgattgtaatctctctataacttctattctgtagagttcactgattctttcctcacttccttccattctgctgttgatcccatcaacagcatcagtagccttttattttggttatattatttttcagtttttaaaatttccctttggtctttatatcttttatttctttgctgaaatttctgtttcttacctgaggtttcctgtttttttcagttgttcaagtgcattcataactacttgttgaagcattttatcattactgctttaaggtctttgtcagataattctaccgtctgtgtcatctgggtgttggcacctattgattatcttttttcgttcagtttgaaatcttcccagttcttgatataatgaatgatttttataagaattggagccaggcatttttttwaaatcatgtttaaacctcctgtttgactgtctttgtctgatgctgctctggcaggggaagagggtctgctgccttgttagtgccaggtggggatagaagtccaggctcccccttcagcctctgtccacatctggggattgggaaggggctcctccatcctgctgggtgagggtgggagttgtggctccctcctgagtctctactgatcctgcaggggaaagctaaggggtagggcctcgttattggttggtggggataaaaatcccagctccctacttggccttctcttataccatcctggctggggtgctggggcactcgttgtagctgtaggtagaagtctatgctttccacttagcctttgctggtgggaccacaggtttattcctgtggtgtttactagaatagagcagttattatataaaagtttcctgtcttgctaggctgccattttctagctggagcaggcttgtgaggggtgggggtggtatggtttggctgtgtccccaaccacatctcaccctgaattgtaataatctccacgtgtcaagggtggtgccaggtggagataattgaatcatggggtcagttcccccatattattctcatggtagtgaataaatctcacaagatctgatggttttataaatgggagttccctgcacaagctctcttgcctgctgccatgtaagatgtgactttgcccctcatttgccttccaccatgattgtgaggcctctccatccatgtggaattgtgagtcaattaaacctctttcctttataaattacccaatctcaggtattattagcagcatgagaagagactaatattgggaggtgttcttatttgttttggttttggtctacatcagttggtgtttccagttggctgatttcttgaactgtcagactgggatatataaagcaaaaataaattccagggaacttactaccctgccttccgcaggcccaaggtccctagccagtctgcttcttcactacacctttcagagttttatgcttgttttctgtagcatgtctagggtttttatttgtacttagcaagaggaataagggaaagtaagtatactcccatcagaaacagaaatctctgaattttctgattataaaatggggataatacctactccatagaatcattataagcattaaatgagatactgtaatttatttatttatttttattattatttttttgagacagtctcgctctgttgccaaggctgtagtgcagtggcgcgatctcggcttactacaacctccgcctcccgggttcaagcaattccccctgcctcagcctcccaagtagctaggattacaggtgcccgccactacacccagctaatttttgtattatttattagagacaggttttcaccatgttggccaggctggtcttgatcttctgacctcaggtgatctgcctgcctcagcctcccaaagtgctgggattacaggcgtgagatactgtaatttatgtaaagtgtttactactactctggtatttgtaagtgcctaagaaaaataacttattttttaaattttgtacaattatgtattttgaagatttttttaaaggtataagttaaaccagatagttatgtttttgctaatagttcttatataaagtatgtttaaggtctttcaccttcccaagatatggctattctttgaaattggatttttttcaccaagggaaagagaaaagagagtaagttccgtattaatttcacacgttttctgccatccctgtacacagttaaataccctttgtgaaacatcatttccattcttaaaaacagcgcttctgtgttgaagcattattcagtgtagtcctaagttttttcctttagcattgatggcatatttaaatgggtgcaattaaacaagcagacacatgtacaatccatgtgttgttgctctttgttaagttgyatcagtaatgcctcatttcccagaatggacactggtgtgagtctcaggcagtatagaggccrgatcccaagttgactttctcatttatcaagtgaatcaggtaacaatgacaggctactttggggctttgaatataaaggtgaataagtctrctcaaaaagtagtttggaagtcagcagatgtttagatatccataactcctcagcaaaagatacgtccagtgaggtttagggttatgtgaatttaggctgtgttcctcattcaaactcttagaacattgcctctgcatgtactgaaatgtctgctcttcggatttgctgtattttttgtttctagggattcacctacgctcttaccagctggagggagtaaactggctygcccagcgcttccattgtcagaatggctgtatcctgggagatgagatgggcctggggaagacctgccaggtgtgttactatgcgacragtactgctcaccgccactgcgatacttccttataactcattctggagctgagagctctggagctaaaacaaagctcagtttcacaaatgtccctgggatccaggctaactggctcttgcaccgggaaagggccttccctgtacagtcttctctgcctcagtcattgcagttcccctactgactttattcagggccagcaaatgctacttgtcctttctttggatgttcacatagctctgctttaagctctctaaaaagatatcacctccaaatttgttttgctaaaattttgtttagactttttgcatctatgttcatgaaagacattggtctgtaattttcttgtagtgtcattatctaattttagtattggggtaaagctggccttgtagaatgagttgagaagtatgcccttctcttccattttctggaagagtttatgtagaattgctgttaatttcttccttaaattcttgctagaattcactagtaactccacacttgttttgtagacacatctggtttatagtaataaaagataaactttctctaaattgcatcctcagggaaagctagactgaatggttttaattcaataagccacttattaaagaatggttcctggcacagcttgggctgagaagccatagataatttaaaaagaaaattatttctgttataaaaactacctaccaccctgtaatcaagcactctaaccataaccatgagttgcaatgcgtgttttgcatgattgaacttttgtttttgagacagggtcttgctctgtcacccaggctggaatgcagtggcatgatcttggctcactgcaacctctgcctcccaggctcaaggaatcctcagtctcctgagtagctgggactacaggcgcatgccaccatgcacagcttatttttaaatttttttgtagagatgaggtctcactatgttgcccaggctggccttgaacttatgggctcaagtgatcctcctgccttggcctcccaaagtgctgggattacaggcgtgagccactgcacccagcccatggttgaaattatagtgcgtatatagtttgtattttgttaatctaacagtgtcactgtaattttttacttcgttatattcttcacagtcattatcaacattgcataatattccatcaagagaatttataatttacttaaatgttctacagacgagaaatggtgattcctcccctttttgtgctgtttaatcttgataggaacatctttgtgcttgtagctttctcaggattttgaattatatccttaggacagatttttctcagaaatagctcagcatttgaagatggagtctcttgacacatttttgttttaaaataggttattttctctgtatattacagcaacattcaagtcataagtgtgtactagaatcttctgaagtatgcccatttgcctttaccaatatttccattttatacccttccttaagcttaggatcgtgtattgtctgttttccccgttagaatgtgtcctccaggagggctgggcgttttgtcggttctgttcactgttgtataactggagcataggacagtgcctagcaaatagaagacaccctgtaaatacatatggaagaaaggaagacagtaggggaaggtgggaggaagtgagggaggaaggaaagcatcctccctcactcgggaaagcctggcaggcagcagagggccaccatgcgattggccgtttttacagtcatatcttggcacttcttgcttaatgttttcagagtatcgcagatcttggccatcagttggattttcattgatttctattgtctttcctgactttttctttacagtagaggttcaattacctaaacattgagcctcattgcttgttaactactgaagtaattgagttccataaatttccgtgcaagtatattgaggcttacatgatttcgctctacgaatggattactcccctgatatgcggaagttcgtacaatatttctttgtaaaacaagtcttaaacaagagtgtgtgttccctacagggttgtgggaacttcatggttgtttctcatggggaaatgtgatcaaaactgcctttctttttctgtgttccagactattgctytcttcatttatttggcaggaagattaaatgatgaagggccatttctgattctttgtcccttgtctgttttgagcaactggaaagaagaaatgcagaggtacagagtagatgtagctgaaattttattgtttatcttgattaagattttttttctggatgatgtataaaatatgataaaacaacctattgtcgtaattagtaagtttattccagaaaactttgagctgatagagtgtaggtagacactgaggatataataggggaagagtaatattattactatttggcaatttaaaggtcagcaatcgtttrtagtaagtattgatgaacttagtagaagccattgttttttgtttgtttgttttgagacagagttttgctcttgttgcccaggctgaagtgcaatggcacgatcttggctcaccacaacttctgcctcccaggttcaagtgattctcctgcctcagcctcccaagtagctgagattacaggcgtgcgtcaccacacctggctaattttgtatttttagtagagaccgggtttctccatgttggtcaggctggtctcaaactcccgacctcatgtgatctgcccgccttagcttcccaaagtgctgggattacaggtgtgagccaccgcgcccggcctatttttcatagtgacgtaggaagtaactcatgtggaagagatcgttttatttttagagtcagcacaagacctttttagatctgatccctctacctgttcacataggaactcgctctgaggttcaaccatttttttagataagattcagagccccaagactctggttgtaggacctcatgagttctgtacattgcaatcctcccatkaaatgtaattttccagatatgcacatcctgtcacatggatctagtatttatgtttatctacttcttttcttggattcagatttgctccaggtctttcctgtgtaacatatgcaggcgacaaggaggaaagagcctgccttcagcaagacctgaaacaggagtcacgttttcatgtgctactgactacctatgaggtattcattcntttctctatagcgagaactcctaacctgtgaccttagaagttgtagagtctgctgaaattatatttaagttttgttgagagcacacacttttctgggcagggagtctaccttcatcagattctcaaaagagggctgtaaccaaaagaagtgaaggatcattgtgcttcarattagttcgatcttttcctttcttggtggatcaagggggaaggcttctcaaggaagtggcacttgagctgcctcttggttgatgaacagaagtcaggcaggcaggcaggggaaagggttttgtggactgaggaatcacgtctgttactggaggataggaatggaagacagctccggccttattttaaatccttgtttttcagtctaagacagtgtgtgccactgaccttccacttaatcaggcttttctctttgtttttaagatggcgctacttagaaattattctcagaacttttttttacttagtgaacaaatgagacttagataaatcctatagtttaagagagttcacagaaaactagcttatcaatatcagagtttatcartgccagcctttataacgtgtcttcctaatttttcagatttgcttgaaagatgcatcatttctaaaatcgtgagtaggttgtactatttaagaacttgggttgaatgtattatgaatgtcatgtctttccttcacgttttagtactttgcctctcctggcatgtctggtatgtcttccatgagttctgtttatgggtaggcggcatggtgggagtcctgtgtttacagtcctctactcattagctgtgtgtccttgggttagttatttaatctccatgaacttcagcttcttcatctgtaaaatgaggataattgtttcttacctcaaatagctgttacgaaaattaaatgagattaaatatactttgtatggttaatagatattaggctctttacatgcaacttgcatagacccctttcagtactaccatttggagagtttgctgtaatacagaaggagaaccatttgagctgtttgctggacataacctaaaatagcaatcagtgccgtggaattaactttttagaaagggagttttaagtgtacctctaattagttaacctcatattggcccatgaaatcagaaactcagcaataccacctaataatgggaatgataggatcatgtcaagataacagttacaatgcagattaaataagggctagagtttaggtaagaaagatatgttgacagggtttcattctctataacctctgtagttattacatggttaggtggatattctgtattttaatattcaaaaatctttgttttcaaagtattttatcaatattttaaatgttmtttcttatccaggttcctgtgagctggatttctattttcatgttattttgaaatactagaggctaggtcatagatttcatgacttctatctagtatttcatttaagtgagcatattatcttatttttcttaagatatacrttccctctctttttattattaatattcaacttaatatttgttgaaagtcagtcactggaaagacattgttctgagagttattggcaatatcaggaaagtaaatcatagagcttccctaagaagacaaactccagtggagggatgagaagtgtacagatatccataatacatagcaatatatgggaagtctcaaaagataataaaattgggacataaatgttgctgggtactttacataaattatcccatttaattttcatgaaaaccccacgaggcagctattattcattttacgggtgaggaaaataagagatttggtaacccatccaaggttacattgctgatgataaatagcagagcagacatttaaacccagcatttggtgctgtggagcctctttttaagagaacttctcaaaatagctagttgtactggagttttacattattcagcagaaatagaatctttctatttcagataatcggttttcagtgcattttcaggtagatttaaaaacctaagtaacagagggacatttataatgctgtcctgtagtatgaatcccaacaacatagatacattctttcaatatatttggaaggttatattgcttattgctgtattgtacattctgagaatagcagggaagtgtaatatcatctctgccctaaagagatttattatggagagttaaggctgtgcatgttacaaatatgaaaaatttgaaatgttttggacaatagacttgtaaaactctttggatcaagaggattagaagttacctcatccaactttccattcagtgctggatttcccccatcttttcctcttcaggggacatcatttagagtatcctttgataagtgatttgaccyacttcctttcatgagccaaaatccaccactctgtagcctgtttcactgaacaagcattttttggacacctaaatgtctagttcttcacaagggaataggacctaatctgttttgaaagctaattcagacagagccaggcaccatcctagagaaacttccataccttatctcatgaccactgtgcaacttcaactggacctttgtttcttgtcatccttaaatgcatcctctgctcatgccacccaaccttctccttcgacttcctgcactctctttggaccctcagtcctccctctactcgcttctctcagtaggtgaatggtaatgtcatagggacctctgttcctctgcctgtcctctggagtttctctgtagcctcaggaagagggcctcctccttgtaaggtgaacctctgctcaagatctttctctaattttggaggaattttcctttccatacctactatttttccagtgttctgttttacctgtatatacatttagttttttaaatatgaaaataatgtaatgggattccagaatgtttataatcaaaataaaaagttaaacatcttataattttcactttattatcttttgcatggctttcacatttgtaaaagaggatacatgatatttatatcttttttattattctataggccttttaaattgcaacataatcatatttattatttaaaatgccatgtaatattttactacctattattggacatttaggttattttccattttttgctgttttaaataatacaacttgaaacattcccacatatatctttttctgtattttgaatttttcttaaatagcttctcagtagtatctgtcaaagtatttgcttttatgactgaaacttcttgagaaattgctgatgtgacacagtatgctacaaaatgtgctctggcaacagccactaatgacttccatgtcaacaaattcagtggatatatcttcctggacatctctgtgagatttgactctgctcaccacytacccattttaaagtcacacttcttaagttcctacaacaccactgtctatcttgatttttttcttctgtttgaacatcagctctgtctttatgaccttcaccaagtcacctaacctttctgagctttagtgtctttattagtaaaatgagcacaattgtctgcttgctatactcttttagactaaataacacataaagccctgaggttagtgtctggcacaaagtaggagatcataaatgtttccttttcctttctgtctctggcttcttcctttctgcataggtctttcccattttgttaaaaaaaaaaatcccttggttttactaccttatccagatattgtattatgcacatgtagcctctcaggaaggtaatttggtggcatttgtaatagaaggggcttactgttaagtctttttaataacagtcacagttttgtagtaagacttttgattgtgaaatatgtgtttaaattacacaaaactgaaagcttgggttttctctcacagattcccttggagtgttcttgttgtggatgaagctcacaggttgaaaaaccaaagctccctgctgcataagaccttgtcagaggtaaacttacagtgtagccttagtttttatataaccccttctttttaaatatacattatattttagagtaattttagattcacaacaaaattgaacagaaactacagatgtttcccatgcatatgtccccacacatgtacagctgtcccctgtccccacacttgtacagcttcacccattatcaacataccccaccagagtggcacagttgttgcaactgatgaacctacattgatacatcgctatcacycaaagtccatagtttacattcgggttcactcttggtggtgtgcattctgtaggtttggacaaatgtacaataccatgatatctactgttatagtatcatacagagtagtttcactgccctaaaaatcctmtgtgctccacatattcatcttttcttcgtaactccctttaaaaaatactagtttaggcctatatagagtcaattaaattgaaaccttttttcgagttcgatttctgcagggctaaatgaacattttatagaagacagaagaagtactaaatatggcctaacttcttctttcttttatattggagataggtttactaatatctggtgaataagaaccctaccccaatagaatgcattttatttcagatgtttcaactctcttttgattatcttcaaaggracaatttctcttaaaaaatcttattataattcttctttgtgcaatagtagatatatcagacatgttgtacccttccccccaatttacctgttgaaaaaatttgatagttcacctgggttcatgaagagaccaattacatgctattgaatattacctccagtttgtcttgtctttgtcctacttttgagcataatacacttgctttcattcctttctctggatctcttgcatcattctggcaaagtagatgagaaataccattgtaccctagatgggcccttttttccgaggagtcagtgcgatgtgaaataccctttttattgacctggtaaagatttgttcattgatgagaccacatatgttaatttctgtgatgataattgaagtttggtccttgtcctataataaaccaattaataaatttagaggtcacttggaggaaagtcttagatatgaattctatttttactggtctraaagttgtagtttttagagtcttaatgtagatacgatcactgtgtattattagcccagtctcaaaggtcgctgtcccctggtggggccccctctatccctggtgtcctttgctttctttgtagggacttttaacagtatctccttctgagagcttgtcttggtctgtttttcacagactgggtaattcatatgagcagaaatttatttatcaccgttctagaggctgggaagtccaagatcaaggtgccagcatttggcaagagccttcttaactgcatcctcacatgacagaaggtggacgggcaagagggagcagaagagcaagctatccaaatgctgcatgacacttttttttttttttatatataaaggccttaatcttattcacgagggaaaagttcttatgaactaaccacctcttaaaggcgctacctcttaataatattacattgacaacacctgaattttgaaggaaacacattcaatccatagcagttgtcatatcctggcatctaaccttatgaaagatggcttcataaactactgtgccagtttactaatttaaaacgggaggagagaagcaggcatagtaaaagaacctggatttggagtgggaaagctaagttctgttgctggccccagagccttttcttgttattcataaggaaactaaggctcagggattaagtgaagaaatggttctgggtcatctaagcattcctttttagatgaagcttgggttgcagataactagttggaaagaaaatacatgtatttattgggctgagatggggagggggatactgccgttttttatttccccctaatattgttttcagtttataaaagttggacgcaaccagccgggcgcagtggctcacgcctgtaatcccagcactttgggaggctgagatgggtggatcacgaggtcaggagatcgagaccatcctggctaatacggtgaaaccccgtctctactaaaaaattcaaaaaattagctgggcrtggtggtgggcgcctgtagtcccagctacttgggaggctgaggcaggagaatggcgtaaacctgagagatggagctggcagtgagccgagattgcgccactgcactccagcctgggcgacagagcgagactctgtctcaaaaaaaaaaaaaaaaaatagttggaagcaacctaaatgtaaaatatagggaattggttgtacaatttatgcgacattcatgcagtgcatttgcaaaaggtaaggctaccaagaacaattatgtagaagaatatttaataacatggaaaatgtttgcaaagtattttatacacacacaaaaaagcttacaaaatactatttacaaacagagatggtctctgaatctttacccagttataaattttgatcccaaaatggacctaactgaatcaaaatgttaatttgtgtcatagggtaagttacctgtagcgactagcagccttggtttcctttgtgacctcacagccttcattcacctcagctctttacttggtgaacacatattgtaagaatgtgaactgatgattggaaacattacttttgacaagttcccatacttgaaatactacaaaaacatcacctaacaagcagaacaaccatgaatgggtagacattgattagacatttaaaaagaaacaaataaaaaagggagatggcaaaaaaaaaaaattgtttacatctgttttcattgattgtgttattcatttatcattttttgtattataaaagcagtgtcttcctatggccccccctccaaatcaaaatatagaaagacaagaagaaaaggaaaacatcccagtaatcctactcctacattaacactttaatggtttaatggtgtatgtgctgccataatctttgctgtgtgtatacattcaaaaagtaatgtatatatgcatatatattatttaaaaagtcaaaatgtatattaaatatcaaaatattgtgtatatacgtgtatacatacaygtatgtaaatgtgtatatacatatgtatgtatgtgcatagatacacttacatacatacatatgtatatatacgtttacatactatgttttgacatttaaaacaggctgtaattacaggctcacacctgtaatcctagcactttgggaggccgaggcaggaagatcacttgaacccaggagttcaaaagcagcctgggcaacatagtgagaccttgtcgctataagaaaatttaagaaattagctgaatgtggtggtgagtgtgtgtagctccagctactggggaggctgaagtgggaagatcacttgaaccgggaggaggaggttacagtgagccgagatcatgcctctgtactccagcgtgggtgacagagcaagaccctgtctcaaaaaaaaaaaaaaaaaaagatatacatacacaagatgtcaagatatggcttcctcattttgatgtattgtttaattctactaarttcttgtgaatgtcagtttagagaatatcttttgcttgacctaatatcttttcttctttttcctgaccttctacttcatgtctctcttactcttggtgttcttctctgttgttcaaaatttaaggacattttttttccatttgagattctctgtgatctccagagacaccagaaccttcctaaccttctacttcatgtctctcttactcttggtgttcttctctgttgttcgaaatttaaggactttttttttccatttgagattctctgtgatcaccagaaacatccagaaatcttgacatcttgcatcttggtgttcttctttgttgttgaaaatttaaggaaattttttttccatttaagattctctgtggtgctgtgtccagaaacatccagaaatcttgacatcttgcatctgatgcaccattaaattttataaaaggaaagtctcctattataaatcttacttattgcttgcagtggtggggcctgatgctgtagcgttggattctcaaactgcatgagcatgtgcattgtgtctcagatacctcagtagactccccgacacaggcagtaacacatagtttgaatccccatctaaattcagtaataacagccatattaaattctcatgcaatacttcagagttcacaaagtgttactacatccttatataagtgttttcttcacaggattattgtccccttcttatagttgaaactgaagaggtattatttcatctgcatcaaacagctagtttgcagcttcaacctgagccatctgatttcatgtcccctcagtcatttcattaaatcatgcctctctctgtgtgggtaaaggttgtgatgggtaactcagccttgcattccagtgttatggaatttttattttatttatttatgtatttgagttctcagtagtyttcagtctcctgttgaccggaactcccatccagaacagcctccargagctctactccctcctcagttttgtggagcctgatctcttttccaaggaagaggtgggagattttattcaacgctaccaggatattgagaaagaatctgagtcaggcaagttcctttcctgcaaatcatccccaagaagccttggcacagaaaccatcctcatgcataatggttataggtagaaaagaaggagaattgatgaccagaggacaccttccagggagacagaccgctgatattagggagatgttaagtcacacatgttgttcccagttgtctgctgttcatgcctctcttaattgtttgctatttgattctgcagtagggcttctttagttcatttttggaagaaatagaaagtgcctgctgatttgcagacttttttttccaacttgtaatttctataaaggctttgttaactttataagtcacttcctgagggagaaaagaatgtgggtgctgtagtcccaaactactgttcagcatactacagcactggtatttcttttaatgctgcaccaaaaccagaattctgggatgggaacccttcctcattcatacagccaagagttgtagtcttctgttcttgtacctttgcccctctgtgttgtaggattatccatctatccctgtgatattatcctgggatgatttttcaaaacaggtaggaggtatgccaactartgagtttgtatgtgttgggtaagtatgagtttgagggggcttctcatagcaaaaatctccagaccatagactgaagatcacctggcgaacctgctctgattactcccatgttttgggttacctgacaaaatataagacttctagtcaaatgcatgacatacttgtattacatgggacacacttgtgttaaaaagttattcattatttatttgaaattcaagtttaactgggcatctgtatttccatttgcatatctggcaatcctacaggtagtataattctaatttagaataatttttgaaattcaagacatctggggaaagaagggattttaagtcaaagagccaaatttgaatgctggccacattcacatccagctgtgtgactttggataagttgcctaatttctgagcctcacttaacttagctataaaaatggggacagtattcctcacttgaaatttctaagctgttatgctgatcaatgagattaaacgcaaaaatattctggaaacaaaacagctttgtgcaaatgagataagaagttatttgagtgttcctcgttcttgggctaagaacaagtcatgattccagaaaaaagatgatcccaatgaaggaagaaatactataaaaaaatgatcatactggcctagaatgcaaaataagcstgaaataagaaacaaaaataaatttctttaagttctctagggttcattgycttggttctacttttgtcccacacttcttgtatttttttttcttatgtagcaagtgaactgcacaaactcttgcagccatttctgctgaggcgagtgaaagctgaggtagctacagagcttcccaagaagacagaagtagtgatataccatggcatgtcagcattgcagaagaaatactacaaggccattttgatgaaagacctaggtaatcagagggcacttgtccatttagaaactaaatgaggatgtgatttcaggtagtaaaatattttataatcacactcatttgtatgatcccaagaatatgggatggaattttgtattctgaataattctggtcggctacagtgggactgtggcagagcatcttaaagataacagccttggttgttgcagttgtgaaatttccttttctcccctcactcagtttttcttagtgcctgtaattaagcaaacacttccaggtgtcccagtcatgtctttcatcctcccaccctgtcagatacggtagtccaccctcattcacagttttgctttccagggtttcagttctgcactgaactgcagtctgaaaatattaaatgaagattccaaaaataattcataaattttaaatcaaactctgttgttagtagcatgatgaaatctcactctgttccacccaggacatgaatcctccttttgttctgcgtatccacgccgtcagcgttagtagcctgctctgtcatcagtccaatagtcatggtatcacagtgcttttgttcaactgatctttattttacttaaaaatggccccaaagcacaagagtagtgatgcctgcattttggatattctaaagaagccataaagtgcttcctttaagcaaaaaaggttaaagttctcaataaaaaaatgaaaaacaattatatgctgagattggtaagaacaaatcttctgtctgtgacattgtgaatagaatattgttataattgttgtattttattatgagacgttaatattttactgtgccaaattaaactttatcataggtatgtatgtatgggaaaaaacacagaatacatatagggtttggtactatccatggtttccaatatccactgggggttttggaacatattccccatgggtaagggggaactgctgtatttaagagagtgcaaaacttttttgttgaatcaaattcactgggaggaattggaagtgacaagggaaagatagtgaaataatttctcaaattgcacttttttgtcccttgactccacaacaacagttaaagaaaatttagaatttgcaaaagagtaacagagtacttctgagttctatttacagttgagggtctttcttaaaacaaaatggttgagaaaattttatgtgaacatgctgttaattctcaatacaattcagtgaaatttgggaggttagtataggttcaaaggatataattgaaatgattaaggttacttgtaaaaactcagggttttggtttctgttttgttcagtaggccatctctttctgtctctctctttttttttaaatttcagatgcatttgaaaatgagacggcaaagaaagttaaactacagaacattttgtcccagcttcgaaagtgtgtggatcacccatatttgtttgatggtgagacagtgccttttccccccacattattctttggtaatgtttctgtggccaaatcataccaaaattcttcaaaataattgcatatacttactttgtctactttgtttattctcaatttctctgtattggtattaactcatatattcatgttcagatatcttcagttgtcccggtaatatcccttctggctatatttttctttttttgttaaatccacgatccagtcctagatcctgcagaccctgcattgcatttgccatgtctctttattcttctataatctagaaacattcttcagcgttttttttctttcattacatgaagagtcaagaccagtggttttgtggaatgcatgataakctgggttcttaaaaatcatttcttcttgattagatttcccattgtcttgaattgactcagtcagcctttcctcaccgctactccaggttcactaatgatctccctgttgcccaaccaatggttatttgttagttcacatttcagktaccctctcagaagcctttggcacagctaatcacttctttcttgaagcactttcgtccctcagcttctgggatatactttctcttctccatctgctccttctcagtctcctttgttgcttccccttcatcatacagacctcagtaaattttcccctgggcaccgctttagctgcatcctaggaattttgatgtgtggtgtttttgtttttcttcatactggggcttttttgattccctgattggtaacccttggagcaagcactcctgtggccatggagactctagataggatcagtacagagggcttgctgcagtcattttaagggaatctctgccaaatagtgctaagaactgtttaaagattgcacaaaatctcaagtaggtgcatatgagaactttttttaagaggagggggtgttgggaacacataggttttgaaagaagtcctccaggttattctgactgccattttgacttattttatagagtgagtctcgatttcagttttgggtctccttgacctttagcatcttcttctgtctcagtttcctgaagagtggttttattccttacacagatgtttattaggcttgttggatgtgctaggctgtgtaattggtgttaagcaggactgagatcatcatgcaaacaactacttatatgatgagcttttggcttctcttcctgtagcctagctactggcttctgcccttactgagggcacattactgggagtgggttctttcttttctaggtgtggagccggagccttttgaagttggagaccacctgactgaggctagtgggaagcttcasctgctggataagctactagcattcctgtattctgggtaggtggtaggttcacatttgctgctctgagctaatgrctgttaaaacctgactattgaggaactcactgagttgttcaggccaattccagttttctttttttttcttaacactgattcaggttctgccttctctgtgactacactcccaccccattctatcccactccaccccttccacaatcattctttcgtttcctgaatttgtacagcacttataatcctaatccagcacttggcaatgtgctgccgtaatctgctgtctgattaactggtgtttatgtttaccgttatcattccaactatatattgtttggctctacaaggacagagacaacactgagcatttcttttatagttgcctgctagtaacttggcattgaattgacacataatgaaggctcagtaaacattcatttttgttaacctgtggggtttgatttaaacttaaggggaacttgaaggactctttctcagggacatgagttgcgcattagaagacgaggttcagagccaggcactgtggctcgcgcctgtaatcccaatactttgggaggctgaggtgggcggatcatgaggtcaagagatcgagaccatcttggccaacatggtgaaaccctgtctctactaaaaatgcaaaaattagccgggtgtggtggcaggcgcctgtagtcccagctacttgggaggctgaggcaggagaatcactggaaccctagaggcagaggttgcagtgagccaagatcatgccactgcactccagcctggtgacagagcgaggctccatctcaaaaaaaaaaaaaaaaaaaaaagaccaggttcagttagtgttcaacagccatgtgttcagcttatacctaatcctcctagtcaccagagttctctctttctagaggagtctaggaaaagcccagattcccatgggtttcaaaattatccctttggaatgactgtcttaggtatggcctgaactaatctaaaacttcagatttggcaaaattgctcaactttaggaatgtgcaagttaaataatttcatgtcttactgtatttcattggttctcgtatatctgccataagtatgttagagttggagaaggacctataaatgccttctggccagttttttatttcacagacccagaaaggttatatgacttgcccaaggtcacacagccaacaaatggcagaaatgagattagaattgaggttttcaggttcattgctttctctacccatttggggcttgaatcttgaaagagttccccataatttttcctcttacacttgttgcaagctcagattaaataagtttttataatgagaatattgttttgacagtgctgtgcttctttgtttatgcaaatttaaaataacagccagtaacaagggactctaggcttgactttgttcttgacttactccmtcattttgccgcctttcttccctcctctygctatacaaaaattttctcgtgttatggaaaatgagacatcacttaccccttgcttctctaaagtaatgcttctcagacttttcaacccatatagctgtagatgagaggatagtgactttacacccccaaacagggcatagttgtagatgactgaccacaggctttcttcagagtctccagtttttcttttcttttttttttgtgtgtgtatttgaattttgcattttactcttcacatatctgtatttattttgctactaaaatgaaagcttatatttctttccattgagcaaattgacattccagaaagaggcaccttgtttattctagggcttatatcccctgttgcattgacacgtctcctgggaataatctccactctagtttgaggatgactgctctgagggatacagctacctgtggaggtgtattctcatagaaagcatttggaggttctgaggcagtctataaatcatacgacacttatatttctactttggtatttatttataaacttttattgtttggtaaattttgcctgagggaaattgaccttaaataccactagacttggcagtgtttccttttctttttcttgccaggggccatcgggttttacttttctcccaaatgacccagatgttggatattctccaagactatatggattacagaggtgacaccttttggccactacattacctaaggctctgttagacttaacagtccagataggtccatgaagaataatatgggatatgagaatattacaaaggaaagcagggtgagaacattattcagaaccaaaaaatcaaaaggcgagaggagagtgatgtgtgaaggcaaggatggacagcagagaacaggcacgtgggcagaaataaacacccacgttcccatcagttacatgatttaaaattatgggccrtggagcaaatgttgtggaaatgtttttgaaaatgtgtgataaagtttcagtgactagagcttttagcgtcttgtaacattcacctcaacagttgagcacttactcatgatcagtgaaaaggtgaatattgaaattatagagataacaaataagccaggggaaaagtaagagcaactttttctgcatagacaataaagaatgtaggttattacctgggaagtctgtttaatatgtaataagatttgtgtgagatgatgagaaaaggctctaacatgagttgatcttgagcccaatgttgaacagctccagaccttacaatttaaaaaagtagttcagaccgggtgtctgagttccgcagtatacctggtccagtggacacttgcagaatgccgttggcacatgccactggccattgaggggtccccagatgcataaacagcctgatcctgtagctccccttccccacacggatgcatggaggcaggtggcgaactctaaagcctcactgaaaggcagattgctggactgttagaaggggctcactcacctgcctccaagcgcttgtcttctgtttacataagaattacatctcagcaaagttgaaactatcacacaggatagatgctcagggttgcttgagaatagtcaaaactgagtattaacttcataagtgccaaagacttcaactgcatrtatttaaaaaatccagaggagtatgttatggtgagttattttgtaaaatgataattgtccctgttaatttaaatttttccctttgggatttgcttaaagtagggctgtgcctgtatatggaaagggacaaaattggcctttggttttgggcttaattttttattccccaaagactacttgaaaagggttaagatttctgtttttcttcctctctgtaaaggctacagctatgagcgtgtggatggttctgtgagaggagaagagagacacttggccattaagaactttggacagcagcccattttcgtttttctcctgagtactagggcaggtaggctgcaaaggcattgatggaaacagacaaatgagggataatagagtactattacatcccaacggttagtacacttttttccttaattctctgaaaggtgaggttactattgaatgtaaaacaaggtactggacatcaagcatggtgctgttttctatccagcctgtccaaactgtcatctcagcaaagaagtaaggctgaaacctggggttattggaaagtaattctaatctgctttgaccattgacctgggaatgtcctgaaagatttatgtgattttgtggaatgtttcatttacattcagtggaagtagctcttcttcccaaccgtgaatttgggaaataaggtaacagtttgtctactagttgtccttcctctataagtatttctggaatagtgctgaaaagcttaacaaaaatctagttgttaaaaaatgtgattatgttgaaaataccaactttttagaattatttatgacatcatccatatatgatttaaatcgtgaatattacgacatttgtaatgctttaccagttacagagtgctttcatttactgttacataatttgaaatcagctcttggagatgaaatgattctctaagtcattgtggtgtctggaaaaaaaaaaaaaaaaaggccggcacggtggcccatgcctgtaatcccagcactttgggaggctgaggtgggtggatcactggaggtgaggagtttgagaccagcctggccaacatggtgaaaccccgtctctacttaaaaaaatacaaaacttagctggatgtagtggtgcgtgcctgtaatcccaactactacggaggctgaggcaggagaaccgctggaatccaggaggcggaggttgcagtgagccaagattgcaccactacattccagcctaagaaatttttctcaggtcctggagcaagctgaccttagttttcaactcataggatcctagtttcattatcttatttttgtagacataaatcttgatggagtacatgcaggaacatgaaagagatgtgtgtcctctattaaagacagattgacatttttctaaaaagagagttcagtcttatttagaaagctttctaaatgcctgctgctataagggtatatgaaagaagtgttagatataatttttgattataaggagattatttcacctgtgtttgttttatctccctaataaaattaataacataagattcatttggcctcactcttccaagatcatagactgcacatggagtctcagccattttctcatgtgatcagttgcctcagggttagtctcaggagaaactgaaagaatcaggcagtgcatcatcactgccgggaaaacagttttatttatgctttaatgatttcatcatcctcatattcagagagcagcattatgtttgaaatgtctaaaattaggaaaaaagakatctctgcttttcagttaatctccttggaggactcagagtagatctgggagctgaagcagtcctggacattagtcttctccaaacactgttgtgtttgctgtcacagttttgttgtagttttgcagtattttcatttatttaacaggtttccttccaaatttcaaatatttctgtgatgagtcatgttgccaccagatggcagtgatagctcatgaatatgttcctattcatggrtgtgggtgtggcttatttataaaaatctcacccctcggtgaagagctgcacttagacaacatgaattcaagaagataattttatggaacacattttaaaatgaaataagcacctgaaaagtattatagtatagtggataaaagcacgggctctggaccaagactgcaagggaatgaatcctggctctttcaccttctaggcttgcaacttcagagaagtcccttaccctccytttcaacatctataaagtggggaaaatcgtagcaactactcaacttcccgacagggttgttgtgagggttaaaggagttaatatagagagagtgcttagaataatgcctggcaagtagtaagcacagcgtaagtgtcattatcattattattaggtataatttagcatctctcagtaatcrgtcatgrttacctccttgttccaacttcaacttgatacgaagactttaattagaatattcctgcctgatttgtctggagatccagcttatggtcagtagtccttcttaaaarttagtccttaattcaggtttatggaacaagccctttcaggcttgcttgttwcagcaaccagctctaacgaccctggcaagagggagtctgttttgtacttgttttcacattartcaaagagaaggctgcaatgtaccttcacggttctcttaattarttcctgtaactcaaggtacctcctcagctctcttcctgcagcactgaagaaagaccagcaagagtgttctgagcaagcctcagaacactcagagtaaatgacaagagtgttcttgtcttgccgttggttttgttactttctttttgattaatgtggaaaccagtacaaaaaagactcactggagttttctctaatcagagggaggaggtttcccactctgctcaggagtataatatcatccactcttctcattaactttttatcagagatcttgctacctagttgtaacttgcaagcgacattcggcactcttctcttgacagtgcgcaytgcagacctctcatatttagatctgttttctgaaagagcatgtgtccttttcctcagactactctaatcaaaatctaatcaaggtttttaagcagaagagataaagtggctccatggcactgacttaagtatccaccttggccacttgcccctgctccgctcattctgttccattcagtaataaaaattttcccatcaggcaataagaggtcaggtagcacttctcaccgctggaacaaggctttggarttaggggtgtgggtccatttraaggatgaagccaattgttttgactgatttcagtttatcagtctgacccactctagccttgtgcttattttctagctcctcgtctttgtgctgctgattacattcctttttgcattgttttcaggtggagttggcatgaacttaacagcagcagatactgtgatttttgttgacagygactttaatcctcagaatgacttgcaagcagctgccagggctcatcgcattggccaaaacaagtaagtgatttttttctgcttycttggcttgcccagcagcagttctgggttgtgaaaaaggtraagaatatagtcctggtgacagtcccacactgggagctgagagaccaccaggttttagctcatctgtgctattgactcctagggtagtattgggtgggtcacattatcagtccagactgactttattagaaggagtcaaatcaaactgtgaaaggattagaaggaaactttagaagtcatttaactcatccttcttgagttagggtctgactcagttaaaaaatggggttatggggctatggagctaagctaaaaaaaaaaaaaaaagaaagatagatgttgccctttgatctgaggataatttgatcttccagatattttccttggctacagataaggaatcccagtcatggttaccccatcattctttctttgactgtctggaatggttcagagagaatttcaggcgagttctctctaacaagtgctcaggaccaaatgaaccaatctccctttcattgtaccctgaatatggtatttggttttgtttgcttttagatgtatttaccttgcatacttttgcccagctttgcacacccttatagcacactacccttgtttgacttatgtccaggtctgttaaagttattcggctgattggtcgagacactgtggaagaaatagtctataggaaagcagcctccaaactgcagctcaccaacatgatcatagaaggaggccattttactctgggagcccagaaacccgctgccgatgctgacctccaggtatgatatgatatactgttcttcactttggaatataccaataccctttgtggaggagaatgtaaatgaaaagaaccagcactcaccctctccccagctacacatttgttccttggcctccctcacacctgccacagtgctggctrtgtgcagggtctgtaggaagtaaggattagttccaagcctcatcacttcttggctgtttgggtttgagcggctttcttaacttcttagatctactctttttgcatttctaaaaataaagacaccacaggttagctcagagggctgttaagagaattagttaaaataaagaactcaataacaattaattctgtacttccaccttagtcccagagcctttgatcagtgacttacattacttcatactcagaagagggcgaatgagatcaggaattcataattgtgccttagaaaaaatgggtgaaagaactagaggtaatttatttaaagaagggagtactggatgggagacagacactggattggaagattttagagctctcttttggaagaggacttagagttactctgtagcagcccttgggttaaaattaaaactcataatatttcctggatgctttgtttttgccctaaggatgaggggctggatgcaaagagaccaactcctaggatactagaaagatgcaggtatgaagggagtaataaatgtctgtcaagggcagcatcagtgggagagtctggtgtgagaaacattgcaaaagaaggaaggacaggagttggctactgtttagagttgggtctcaacagtagggagatagaaaattcaaagatggctgtgaggttttaggcccctatgatgaggagagaagaaaggaaaataagaagtagggcagagttttaggaagataaagagaatttaggctttagtcagagtgtgcagtaaaaatacaatataaacaaactattgttagaggcagactcagacaaaaggaaagaattttatttgtaaaagtttgcaagatggactaggattggaaaggactagtccatcaaaaaacataagtgtttaagagagaaaaagtgacacaatattagaagcagagttactaagtttgtaattagtctgaaaaaacagcagttttcttacatggttacygtatctgcaaaggccagtgcatatctttacatatcagtgttgcaaaagacagggatcctgttgtttttgttagggagttagtaattacaggaaaggctcaaggttttattaatyttgggactagaactagaaagagtaacactgggtttgttctttgtttatcttagggggtaggtgtggcttttttctttttctgactttccttgtgttgctgactgtgtcacatgcatgcttaattaaccataatggtgctagggcaggctgtacattttgttttcacactaagagacaattataaatgtgagatgaaagcttgagagagaggtagaggtacgctgtagatacccttaaatgcagttttccacagaaaaattatccatagaaccttaagagagagaaggtcactgctgggcatagtgaaggggtaaatgacagagcctcacaaggcccgcattctcttgttagaggaggaaggatgtcataggttgtttgcactctcccagtggagggagcgccaggggtccaatgaggggtatcttgtgatgtgggctgctggacacatcactgtgaaagatgtagacatacctccaccccatggggccacaaacgagtgggaacatggactgctggctgagagcgactctgttggacttcttgcccagctcatggttatcggaaagttactttctgactctaatgtctgatttatctcttccccatgcagatgctatgagttatttgtggttaccaaaagcaaaggtgataacccagagcccttgtctaaaaagaaagcaggggatttttgtttgtttttgttttttgggttttttttttttttttttttttgagacagagtctcgttctgttgccaggctggagtgcagtggcgcgatctcagctcactgcaacctctgcctcccgggttcaagcaattctcctgcctcagcctcctgagtagctgggactacaggcgcgcaccaccacgcctagctaatttttgcatttttagtagagacggggtttcaccatgttggccagamtggtcttgatctcctgaccttgtgatccgtccacctcggcctcctaaagtgctgggattacaggcatgagccactgcgcctgggggattttttttttttttttaaataccaagaaaccaaaagtaaaagatgtggttctgatttggtaaatctaagcagtasgtatggagttctgaagtcctgaaagaaggaaacaggttttttatcctgcagggaggacacagtagaaacaggmaggcagatgcaggtgtagtgaacacttattggatactgtgtgctgagtgttgtctgaggtgctcttttccagttgtttcagtaaataagaataacagcaggatgagatagacactatctttatccccatcttaagtaatttgcccaaggttattcagatttaggattccaatccaagcactctctaacctccgagcacatgcccttaattactgtaatatacagcttctcataaaaacacatgtaattttcttaatgactaagacacattgcaagtgagcaataacaagggagagccaggaggtgagcataagtacaagggggtgaaagggagggtcccagtatggaccaattcttatcataaatagttggcttcctactatttttggtaccagctgccaaagccagtcatcctggttatgtgtatggagggtaaatataatatatctaggtacattcatgcttaagtgagctgtctattgtttcttcaagctgttacagaataccttaacatttccaagttactcacaaaatagacgatctggagataacccagtctaaaagggcaagatgagaacaagggcccaaggtttgaatccaccttgggtcaggatctcagaattagtgcttacggaggtgcaaagttggaagtagcaagtgaaagccaggaaaaattatctgtgctttctgcatggttcctacagccatagggaataggctgagagtactccagagagggacgagagaagagaagcaggatagtgcaatgccagaggaacatccagaaaaattcaaactgagaaaaggccttcgggtctggtggtcagaagttgttactgatctttgccaaggtggtttcgatagaccactgtgttaggaaaacaaattgccaaagaaaaggagtcagttcatgatagaggtaaagttccyagtgtagccttccctttctaaggagtctggcagtggagaggttggaaagtagctaacagggtctctgatctcaagtggctgctgggaatgcttatgaaaaagtcagtgagaggtgctgtagaaaatgcaggaagttactattattcttcaaaaaaattggaggcttatacattttttttgttttgtttttatgcagaattgtcaaagtcaatacctctgataatcatttatcacctctctgcttacccatcatccaactattaaatggccctggctgttactatctatgatggggagagcagaaaggctgcctgttcattagagaaggactgtgcctggtgtcgttaatccacttagccaatcactgatatcctaatgtttcttttcatgagaatttgctggacttttttgtttcctctattcaagttgagtgagatactcaaatttggtttggataaactgctggcctctgaggggagcaccatggatgaaatagacctggagtccatactgggagaaacaaaagatggccagtgggtctctgatgccttgcctgcagcagaaggagggagcagagatcaagaggaaggaagtaagttggaggttagagcagagcaaatggcacaaccaccccaagctagagctcacgtccccatggaaagttttggatgctgctctctggggcatcttttttctcccttaccctattgtcatttgggcacactgtttaagacttgcttgataaaagaacgttacccaaactaactggaaatttgtgtggctcttcccttgtagctgaactgtgaaccaaaatcatagtattaatgtttatgatagtatcaatcttaaggctttgaatttgtaccttttctcccttggttgcaaacatcttcttctttattagtaaagcctaccatccttggtatgatgctttgcacatagcgattcctcttctaaacagtagaattacttgtttttaaaattgcagctaacattaagcatttattttgcgttcatcaacagtgcggactttgtcatgtgctttttccatttaatttctgtaatccatgagatgtaggagatggttttgtctttctcttaattttctttcctgaatttggtcagcatttgtcattttgttcttttctattctgagcacttaaatttccgatttgaagtaatttttcacatggtagctttgtaaaggtattccctggcatcttgtagttattttgaaatgacttatttttctgtaccagctgcagcagagattcaatatggactggggtgagaggtttgggagtcttactaggcttcttaattcaccagtactttcttttaattatacacaatagtgctgtttcttcactagatggtagctcctttttattttgggtagtggtagtggcatgatttctgsttttgtagttctcttttgtttctataggaccgtgaatttccatcgctcgctttctctctgtgccacaaacttgtcaaaggatgtcttcccacttctaagttgtctctctccctgccagaagcaatgccttccctaattcctggctgcatgtattttcataccttcccttctgttcagttccttagtagccactgctctgatccactcagacctatcctcattattttcccacttggaatgggactgtcttttgtgggtaacttttatctgtctgacctttctggaaccctcctgccctctccactgcatagtctctgcctgactgtctactctagtgtgggctttggagctggttttgggggttcatttctcttaacttccataagttgaagtgtgtartattttctgactcctaatgtagtaggcatggattggggtggttttgttgtccttgttgatctgtatagtttttgtgggataggtggaaaagttggaatttgggcagctggcattgttttacaggaaactgctttttgattttatgttttatcttcgaaattctttataaaaatatcttgtttgtattcttcaagaactctttcttgttctctgcttattgttttaattgtaactctgttctcatttcaaggacatactgtcttctctggggacatttattatggcttyttaatatgtattccagggagaatattacatctttttaaaaagtatttctcttcccattgcattgacttttacttctacttctttaaaaaaawatatatatatttatttatttattgaaattggcagataaaattgtatttatcatgtacaacatgatttcttgaagcacatgtacattgtggaatcattaaatctagctaatgaacatacatcacttcatatggttatatatttgtggtgagaacacttaacgtccactctcctagtatttctcaggaatacaatatgtcatcattagctatagtcaccatggtacctctttttctaaaaaggaaaattcgtttggggatctcttgttctcatcgatagtttccccaaccgtctggtattccctggctgtctgatcacatgtgctgatgaagtgccacaaagctgagggcagctctggcatgggccctggggacttattcctggttggtgagtcagcttttacatggagggcaccttctctgatccatatttsatgtmttttcactgggcaacccattttctccagagaccaatcttctagtattttccctgggagaggtgagaatggagttcacctggttgctgaaactgaaaaggcggggtgagtcaagggctcatggcactcctgctctttggggtgcagatcttctctcaattcccccctttgcagtactctgtacttgtaagtcctaaactcttgggggattgagagggtctctagactcctaatgagcccttggctaggcacctgtgttttgtttccatgtctcttcttaatctgtcattatccctccagcaactttgcattttccaaaaggttcttgaactttttcatccaccattgcctcatagatcttttttaaaattcctttaactgtcactttgtggtttcaagtgagagaagaaatagatgcatgtgatcatatttttaagttataattgattatattaagtagcaacacactcagttctgtactgatctagataatttcagcttattttcctaacgtttactagaacaaaataaagtcacactcttttccagaaagataattatatttctcagtcaatccaactgcctaaaataattttactttatttagacagtccaactgccagaaaaaatccccagttgtattacactttggaattttctcttcgatgaatggatataggtccgctctgtggtaaatgattctcctggtaggatagagacgcgggtctaggcttgtgatggcagagtgaagataggaagtatgattacaaagaatataagtggataggaaagactagtaactaacgtggccccaatcagaattaaataaaaaacagggttgctttatcttaaatgccarcatttttttaaaaagcatgkttggaagttgagaattgcatgcagtatgaagctacatatgttgatcatatttgacacttctcagctctatttttttctacttgttgatagagtgcctcattgaaagccccctgctgatttaattagcaaatgccaattagaattacagctggttagatttgggtacaagtgtgaagcaattgatctcttgagaatgaaaatgttttgctttcatactctctagggaaaacatacttataatggatttcacaaatattgtgaaaatatattatttggtaacatgtgctactaaatatgcttcccgattcaatcattatcttacctatctgtggttgctagtcttggctggtcctgacttttcttaatcacttgattcatgatcttggcagatcactcaacctcattgagcctttttgttctcatctgtaaaatggtcctattaatgcctactttactcttttacacagttggaaaaatcagacacgattatagttgtgaaagtgatctgatagcatgaagtgctattcaagatgacactattgtcttcattgttattattaccacagttattatttgctagcctgttaatctctccacccttctagagacccaattatatactgaaaagagcacactggccttagaatcagaaaatcctgcctcttccagtgagaattacagagtcccttaatttctgcctaagcctcagttttccctttcaaaagtaggattagttataccaggattgtggtgaggatcatgacgaagacgcttgatgagatctgtaaagaatattgtaaatccaagggattatttttgtgattcttcattttctcatagatttgccaagctgaatattaaaagtgtgtttggaataaaaaagtacggattttattagatgatcttaatgtcagtgagatttgcgctgagggatagttgggaataaatgaatgaggaatgaatggaagaatccagcagagattcacaaaccatctagggatgaaccaaagggttttaagccatgctctccccttggaaaagtaaacacatgggatccccatgtagaacccacattcttcagtgtcagtgggatgggaaatgaaataccttccttcatatggacttagcccatttagaatataggctgttctcctgtccacttttgttattgatttgaatagcattaatctatttttccttggtatctaacatttctctctttgtgttttatgttgttagaaaatcatatgtacttatttgaaggtaaagattattctaaagagcccagtaaggaagacagaaaatcatttgaacaactggtaaaccttcagaaaacccttttggagaaagctagtcaagagggccgatcactccgaaataaaggcagtgtaagaactgttaatttatttaaaagttgttcttccaaactctcattctaaaacaaacaaacaaaaaaatgatgctggcatcgttttgttctcttaggatgatttgtcaagaaataagtatgtgtttgctgaaatgttattataattaactataccctagtataaaaactatgtaaaaaagtcagcatgaaaaacataaaggagagaatatattgtacgatgtcatgyaggtgaaagcagccttgtccatccaagtcacccctaaaggcattcctatattataccaaaataccatatcctgctgttggtaatgatgaccctatgacaagaagagaggatggcaatcataaatgatatatgtagtgttcacagtgtttggcagttaacgtggtcattaaatgctagctatcactaagataatcatgatgttgaaatacaatcttaaaaaagttacataatacattgcagaaagagttccattaaaaatggctgaagtggcatcctgcagggtatgcttttagtcaaggaaaaaagttacttttctgaagtaacttattcctaatgaaatgaatcaaaatgactgtttcaaccatgccaatgctagggctgagtttacagcatggtatcctggtcactgtgcctgtgaagtgtgtagtatgaacagtgcctccaagtgctttgcctccagttcccaccatgcagggtgtgtggagatgcagtgttctgtggaatattaagcatgttgcttccgtacagtgtgtgttagggataatgaaattcggggaggaatcttcttgaccctsgtgatggatcttgttcttcctctaggttctcatcccaggccttgtggagggatctaccaaaaggaagcgggttctgagtccagaagagctggaggacagacagaagaaaagacaagaagcagctgccaagagaaggagactcatagaggagaagaagaggcaaaaggaagaggctgaacataagaaaaagtatgtctgcgttaaccaagctggcggccacagttgaaggagtcactattgtatagtgagaccacagttgaatatcactttaaaaatacagaaaattcattttaagttggttcctattggtaacagaatactttctgaaaacatttcctctaggtaagtgaaaagtctcagtgtataaggcagggaagatgcattccattaaaaccagaattgttttcttttttcttttgagatgggttcttgctctgttacccaggctggagtacagtggtatgggcacagctcattcagcctcaacttcccatgctcagtgatctacccactataacctccctagtagctgggaacacaggtgtgtgccaccatgcctggctaattttttttattatttgtagagacagagtttcacggtgttgcctaggctggtctcaagatcctaggcccaagctgtctttctgccttgacctccaaagtgctgggattacaggcgtgagctaccatgcccggccaaaaccagaagattttaagattttattgtagctatctgacaaagartaatttacttcaacaatctcttttagtcttaaaaacaggaacattcagggagtgctcattattgaattgtagtcaggaagcagttagcctaatcagtaagacttgtttacaaataagtagaaaacttcaatcagggtgagtttctaattgcatttctacttggcagatattgtttgtgaacagcagtataaaatgtgctccaarggaaattgtgattgtctgggttaatttccttttgtctctggcctgctaaaggatggcctggtgggaatccaacaattaccagtccttctgcctgccctctgaggagagcgagccagaggaccttgagaatggggaagagagctctgctgagctggattaccaagacccagatgctacttccctcaagtacgttagtggtgatgtcacccaccctcaggctggggccgaggatgctctcattgtgcactgcgtaggtacgagaagtggtatgggctggggatgggggcctcagtccttatggtgccaagaactggggaggatggggcactgggactggggtggtggtcccagtgtagtattgtacagtcaaaaaagtgtgaattttagagtcaggagatattccagaatcatttcactcttggctttctcatttayctggtttagttacccawcctttcaacttcaacttccttatccatatgatgggacaatatctgtcttatcctctgcacaaggtttttaagagggtgaaatgaagcaacattgataagacaaacaaatcctttgagaaaaagcaaaacttcaagcttgttcccttgcttgacctttgtactttttacttcatctgcctaaaaccctttcttcccaaataaccacatcaagtgttgttcaaatgtctgtttctcagagaggtcttctgtgattacctcatataaaacaggccccatcccccctgttattctctgtcccttctcccatattttcctttatcacacctgtcccacctgacacattacctatgtatttgtttatttgactgttgctttgcattaaaaaatacacttatggcagcaggggttttttcttgttcgctgctgtgactgtggtgcctagaacgatgccttacgtgtaatacatgctaccaaacgtttgtagtgtgaatgaatgactataaatgctaagatactaagcagctttgttagtaccagcttgaataagtcacttaacctttcctgtgtactgtttcataaccttgcctatgtgctgttgcataacctattgcttctactcactctgtaatgttccatctactctccgtccttccgcagtcatttgccaggaatcacagatgcaccacagagattttgctcattgagaaccctaatttttgagatgctttcctgttatcatggccccagctatatcttccagaaaacataaacatatttgggaagtccaacctgtgatattcctaggagataagatattttgtttcttccctttgaaaaatcattcttccacaagtcccttttgtgtgcctttgtttttctaaattgtgcactggacttcacctcctatagatgaaaattttctctttctycaaacagatgactstggccactggggcagaggtggtttatttacagctctggaaaagcgatcygctgagccaagaaaaatatatgagctggctgggaaaatgaaaggtaagaagcaaagcaragggaaaggttaagggtggaataagagagaagaggacacctaagactgtatcgtgagggttacacagcactagataaggaattagaataaccagttggggactgaattctgtcataaattagctacttgttctgtgacttcaaggcattcctttaccttttctgtacctgtttcctcatctgtgatttgtgaataatacttgttctgcctacttcatagaactgtagtaagcataataaatgtgtgtattctgaaaaatgttgatccctgcatacatgttaaagtattggaatgggctggacacagtggcccatgcctgtaatcccagactttgggaggctgaggcaggaggattgcttgaggccaggagtttgagaccagcttgggcaacatagtgagatcctgtctctaccaaaaatttaaaaattggctggatgtggtggtgcatgcccgtagttccagctactcaggaggctgaggtgggaggatcacttgagtttaagaggttgaggttgcagtgagctgtgattacccccctgtactacagcctgagtgagagtgagaccctgtttcataaaaaaaaaaaaaaaaaaaaaaaaaaagaaaaaagagaactattggaataaacatgaaggaatatgtcatgaaaatatcaaagatctatgggaagccgggcgtggtggctcacagctgtgatcccagcaatttggaaggccgagacgaggcaaggaattcaaaaccagcctcaccaatatggcaaagccctgtctctacaaaaaaatacaaaattagccaggcatggtggcacatgcctgtaatcccagctactcaggaggctgaggcagaagaatcacttgaacctgggaggtggaggttgcaatgagctgagatcatgccattgcacttcagcctgggtgactgagcaagactgtctcaagaaaaagacctatgggagagaaattggacataccattaaaatgctgacaagaactcgggtttggtgctgagtggaatgaagatgtgttaagaggtcagcacaaccttgggtataacactccctggagacagaaataaagctgttkggtgccaggggaacttagaagcctgaacaatattgtcctttggcacagagaagggaaaaaggcacctccttttacatccagaaataacaaagtggcaagaataaaattattattgtggtgattttctggagattgaaggaccttgtctgatagagaagggccctccagattccttagatattgttttttcctaattctgcccagttctctatggtggaaagggatataagaacttagaatgactactttttctagtaaaacaagttactgaaagaagggtttaatgtgtgttgaaatagtcaatccagatctagatgctgattgggcagttggcaaagcaaaacccagggaaggtcagagctggaggtgcagattgaggagtccctgtttggagtctgtgtttaaaatcatgtgggagagaggatggagaaatgagaggcagagaacagacctggaaaacacctctacttaggacttgaggcaagaagatggaatttctgacagaaggaattgtcagacaattagggaaccttgtgcggtattttgaggtacaagggaggaaagtatgtcaagaaggcaaagaagttcatggtattagacactgaagtgaggatgaattgggaaaaggccatggattttgacccaaggttgctcaccttggagcactttgaggagagtgggaagctcagacttaaggcctgagggctcaggaaggaaatggagatgagagtgtgcagttttctctgaaggaggattgaagcaggttgcagcaaagtaggtgaaactgtggattccaattcccagggaaggcttcatggaggtcctgggcctggaaaggtgggttgaatttgaataggtggagagaaatggcaagaggatccccaactgctcattacaacacttactattccttgtctgtgggtattgaaggacccaggcagttagcctgttcctttgtgtggaggatggcgtacaggccatgcaggccagagtggagggtttaggcagaagaatagaggagagtttcgttttcatcagcggcttgggccacatcatagaagacgtcacatgatttgtccagggagatgccattctgcgcagaaccttatctaatggaatgggtaatagctggtcgttttgggggatttgatcaaaaggatggcatagcacaaccagtattttagaatgactgaacaaaaagttcaaactggtatcaacctaaccaatagacagggtctgtaaaataaaaggaacaaaggttttttgttgttttgtttttgtttttgagatggagtctcattgtctggagtgcagtggcccgatcttggctcactgcaatatccacctcccaggctcaggaratcctcctgcctcagcctcccaagtagctttgtaccacaggcgcacaccaccatgcccggccactcttttgaatttttggtagagacagggttttgccatgttgcccaggctggcctcaaactcctgagctcaagtggtccacctccctcagcttctccaagtgcaaggattacacacataagccactgcacccagcctgaggtttttaaggagaaatgaggaagattacatactttttttgaatcagttatccttggctacaaggattagtaagggtggcaccacgccgaggttgggcaggcagttgatgagcagatgtctttgcagaagtatatttttatgtaagcttgccagggcccttgtgcaaggtcatgggttttgtaaaatctgttgtgatagttcttgttatcagacgtttatgcattagaaccttcccttcatggccttccctggctctatttgtcagagttttgttttattttttgagatagggtctcaccctgtcacccaggctggagtgcactggcgtgatcatagctcaccacagcctcgaactcctttgctcaagagatcctcccacctcagcctcccaagtagctaagactacaggttcacaacaccaaacctaacttwttcttattttttgtagagactgggtcttgcgccttgttgcccaggttagtctggaactctggcttccagcaatcctcccacctcagcctcccaaagcactgggattatagtcatgagtcactgtgctcggccatatatgtcagtttttaacacaagcatctctattttgattctaaccrctttcacatcagcttatgtaaagccatagaattaaattagcacatttttcttcactatcagttttacttgatttggatggggtaggaaaatatattatacaaacaggtagagataaagtagaatgtaataatttgaatgatttaggacaagcacaaaactaccaaaggaatttcaagctcatagtgctccctccccaaagccccccagctacctctgggttttgtattcactttctgatgtctacaggggtactttgttgttaatgtttgaggagcattaaattaggagatcataaaaattcaggagtgaagcaggtgagtacccagctaagaggttgactgaggccaggaaagtgagaaagggctgtgtaggaaggtgggtcctgaaacccaactgaatttgaagaaggcgagatacgaggaggattcattcattagtgaacttggtgttctttatgttgctcctttctgttttacctcagacctgagtttgggaggtgtccttttatttcctgttgatgataaagaatcaagaaacaaagggcaagatttggtaagtaaaacccatctcttctcagaactacaagtggactcacatcaacttctcttgaagtgtcccctgccccaattggcctctctgctagtgtattagtttgttagggctgccataacaaaaagacacagactaggtagcttaaacaacagaaatgtatttccttatagttctggaggcygaaagtccaagatcaaggtatcggcaggtttggtttctcccgaggattctctccttggcttgcagatggcggtcatcttgctgtgcatgcacaaccctggtgtctgtgtgtccagatttcctttcttrtaaggatagcactcagaatggatcaggccccaccctaaacccttgttttaacttcattgcccctttaaagactctgtctctaaatacagtaaacatgaggtacggggggttggggcttcaatatatgaatttggggggacacagttcagcctataacaagcagattgggccatagtctccactgtacttcccctgtccccaggcttccatccatctgtccccggagcaccgtccagatagcagatcccatcttaagtacgaggatttctatttgtctttttatcctcagtaccctacatagtactagctcataagaaatgctccataaacatttactgcatgagtaagaaggcatgactcagaactctgacggtttcatttcttactatgtgaaaatttctatgaaagattgtgttttctagtcagccataataaagcaggagagaggaactaacacatatgtcctctgcccacatcagaatccttttgcatcttaggcatcttgggatgcctgtagtgagtttgatttaccccacctacctggctttctccaaggcctgggttcatgttcagattttaagccagaattaagaaatttcaaaatcaggccaaaagagaggctcatccttttgaggttgctgtctatgtgactgtgttaggctgtttttgcactgtgataaaagaattccctgagactgggtaatttacaaagaaaagagatttatttgctcatgcttctgcatgctgtacaggaagcctgatactgacatctgctcckgctgggggcttcaggaagctcacagtcatggtggaaggcaaaggggaagctagtgtatcacacatggcaagagcaggaacaagagagagtgggggaaggtgccacactgctttaaataactagatgtcatgtgaactaccagagcaagaactcatcaccaagggtatggcattaagccatccatgagggatccaccccatgatccaatacctcccactaggccccacctccaacactggggattacatcctaacatgagatttggagggggacacacatccaaactacacagtgactaacagcaaagtggtttctgttgagtcattccttcagtaatttctaaaatgctaaaaaaggagaaaagtaaagtgtctgtgcatgagaaactcagaatccagtgattcaggaaaactgtttacagggagtagagcaccatgtctatgatatgactgtggtgatgtcatcccggaagctcccttgacactctccagctcgcccacttaggttaggatggttgagagatacttggcattttgtcctcatgggaattgttcgaacagagatggaatgactgcttgtcctgggggttgtggagctgactcaggcatcmaagggctgggatacaggagcctctaagatcttttccatgcctacaattcagaaaaattctcttttttttttttaacccttgagagcttttggaaagtatatgttttggactcattctctggttttaaagtattttaaaaagaagaagaaaaccctgtataaagtgaccacaaagtaagaattatgacgggatrtgaagtcatacatatagtaggacattgctgttcaggcatagcatccgaaagagacagagccaagcccaagtgacccatcaagggctgtgccgcctccatgggcggtcacttggttgagtgtggctgtttcatgttgggttggtcatctaatggtggttctttccagttggccttgattgtggctcagcatcgtgatcgttccaatgtcctgtctggcattaagatggcagccctagaagagggcctgaagaagatatttttagcagcaaaaaagaagaaaggtaagctcttccacctgtgctcaagagtagatgaatttgtttctaggsatgtgatacgacttttgaagggaggtaagaaatgtcaagatcccacttaatatgcacggtaaaggcaaaccacagaagtgatcaccccaccgtcttgtagtcatatagccccttgtcctttccaaaacacttttaataccggttatctctgtaggccgtctccatcccccgggtatttttatcgtgattttacagatgaggtggcagaggactagacatgaagcaacttggtcatatgtagttggtaaatgctgtttatttaatctcctcttggagagtcacagttcccaataacagacagttcttcgacaaaaattgagtttagttttgtttcgaaacctagtgtgtctcagagcttattgaattgattggcttgttagagaatctttgcttattttaattttgcctccaccaatcataatctatttccaattgtatgtatttccagaacttgtaggtccttgtgttcaacagaataatttaatttttcttactacaattcttcccccggaatatttttgacattataattatgggctttgagggagatagtcaataataattttctcccatgtgtattttatacccatcaatcaatttttgatgagtgaagacatgtgttcttctcttcataatagcaagtgttcatcttccacgtattggacatgccacgaaaggttttaactggtatggtactgagcgacttattcggaaacatctggctgcaagaggcatcccaacttacatgtatccttttgtgatcttcattgtgtgttctcccaacccaagagggaaaatgtgttcattttctggtgtcagttcttaatccaagaccaagtttcttcctgccacagtctttactttccccctcttcagtgagacaaagaaagaagcactttctaacttgtgtgtatcaaatatgtacacccaacaggatcaacacatccaagcatttctggatgccagcagataaattaaaagatacatgaaggggagaattaattgagcaattgttaatttggtaacatattgagtctgtcacatcacttctctagagatccttcaggtctgtggaacaaggcttaattctaagaacttcacactgttcattttaatgaacagttaagcaaacaaataagtgaactattttattcctgaacctttttgatgtattgttaaaaagcagtatgaaatttattttaaccatgaagtcatgatctactttagctagactagcgttttcttctaatgacctccttgctctataagttagcatattttgaactattatattgagtcccaaaattactagagaaagcagaattgaccccaagtgctataatcacacagaaactccatctttttacatatttgactgaaattcactcagtgatggtcttcaagatatttaaatcactgtaaaaacttagagaagccagcttttatgtgcttgcacaattcgagcagtatctaaagagttttagtactctgaaaacaacagcagcaataagtactaatattgaaagtgtttatgatatcgtgagagaattaaagcatactacttctagaacagttatttcaataattactagagaactagtcgttttggtaaagttggtttaaagtgatgacatgtatcttccttgaccatccttatcagatattattttcctagaagcaagtctgctgtccttcattcacagtcttcatcttcctcctcaagacagctggtgccttaagaattggcccagcctcagatcctgtctttagcaaccagctaatatttacccagaggtactgcaatagagtatttcaaaatggaatcaggatctggtgggcctcagaaattgtctcttttctgagtttcartttggttctcctggatgttttgctctgttttgrtacctgtaatatagggaaacacaactttttttgggaaagccctttgaccccagcttgctagttgcataataataaattttctgttcctaatggttttattgctttctttcccttacatctagttttcttctcctctaccagactgattactttatagagggaaagcctgtatggattaaggagacatgaaaggtcataaaacagggtggctctgggagaaggaagcaccttcagccagttcatgccttcaaaaagaaaggacccaggaagagacactgagaagtgagattctttatccagacaaatagtgtacctcctctcctttttgcactgcacaacatcaagatctggaaaaaaatacattgatctagagtttgtcaaatgtgacttcagaaaaaccacaggatcttttttcttctagccaccaaatccaattcagcttcaaggaataagggaattgtgaaaagggcgcaatcccatcacagcatgactgatgatattggggagggtaggagaccgagaaccaacagagaaggagtcatggagggaagactgtaagtcgtggctttccacacctgtgtgtgtctcagtcttggctgagtattctcacccagcataatttctgctgacttgaggccatcaacacctagagtgctatggaggcctcatgagaagtctcagtcctgggctttgatgtggggaactctggctattggactcagagccaggaccatggtcttctaaggaaggtggtacctgtgttttactgttctgagtctcttctcacatattcacccttcattaatatagcatcatgctgaagacctatttcatcaaaaattcagcattccttaaattttttttcccaaaacttgcatcgattttaactgcctcctatccactactcttcccaccacccttaacatgtaggttattataccaactttaacttactgatttgtatcttaagtcttgcctacaactggaagcaaaattagaactccacaaagggagaatgtagtgaaacctaacctaatgcacgagtaagctgctgtgcctttcagaagcagtcagggtgcaaacaggtggagtattaggaaatacaaagaaaacttgactgggcaccatgcaaaagctgtagatcctcttggaaagctgtgctcatttctgagggcagaacacatagggctagctggggatgtttttgaacatccaagagaagcatcacagcaggcaacttgcttctaaagggaacgtcgctgacctttcagggacagttgtcttttgtggggagaaagccttttttccccctattctgtcaaccatggtccagtgtgggatttttctctggatgtagtccctgaaccatgaaccttggtcttgtaagctggacataaagagtacagatgaagatcagaaaacacatgtagcacattctcccttaaatgtggggtcacttctcagtggcaatgccctgatttgcttgcgcacctctcttaactcttgagtcgaaaacactgccctactacgtattcagaaatctgccctaacttttatagtcccttcgttctttctatcaaagaggtatcattctctgggaaagtagaatgagacaggctattctatttaccccaagggattgttctctttcttccacaccatatctttgatgctatctcgctgtcccctctgaggatggagccaggaggatgataccagattttattcactgatgagctcttgtagactaaacatcagcttttgtgcatcctaaccatcagcataaaaatcccacttattgagaccatgaggaccttaagtctatggaaatttttctaagtataggctcatattttcttgacttttaatacatttttcttacaacaagcctacaacttcttttatttttttgccccataaaactatactaagttaattaaccctttaaaaatatagcttgagtcagccatttttgagccctaaactatttctacatctgtattttctgttttcccgtctactgactgaagtacagttgtccctcagtatccatggcagattggctccaggacctcccatggataccaagatctggggatgctcaaatccgaaagacaaaatggcatagtatgtgcatataacctcacatcctcctgtatactttaaatcacctctggattacttataatacctagtaagatgtaaatgctatgtaaatagttgtcatactgtatttagaaaataatgacatggaaaacagtctgtacatgttcagcacagatgtaatttttaaaaaatatttttcatccacagttggcttaatccatagatgtagatgccacagatacagaggtctgactgtgtaaactcatctagcattacttaacttttcaccacaatctgccttcttgtttccaaaagacatctgcagtttcacacttgggctcatgctggtgtgtctccttatgctggtacctcttcctcgactgccttactcctctattttcccagcatccatcatctcctatcaaatctagtctttaagaacccagaaaaaggcattttctgcattcccactaaaatgtaatctctcagggctaccaatgacagctgggtttatagcacttactttgttgtgctccctattgttctcatcagtgtattcacttaacccttgcctagacagcgaggtctttgagaaaaaagggcggattcaagctatatttttaaagggttaattaacttaatagaatgtagtttttatggggcaaaaaaaaaagttgtaggcttgttataaggtaaagaaaaatgtattaaaagtcaagaaaatatgagcctatacttatagagaaatttcaaatccattagctgacactcaaatctttgttgagttgaaatcgtatggaaataactggctatcaatttggggactataataaactaatcttaattatagtttaaatcttaatataaaacgagaatatggaaagaaacgtcatttttgtggtgtcagactaacagtttcccccttttattattttttttgagacagagtctctgtcaccaggctggagcgcagtggcacaatctcggctcactgcaacctctgcctcccaggttcaagcaattgtcctgcctcagcctcccaagtagctgggactacaggcgcgtgccatcacccccagctaatttttgtatttttagtacagacagggttttaccatgttggccaggatagtcttgatctcttgacctcgtgatccacctgccttgtcctcccaaagtgctgggattacagacatgagccaccgtgcctgctcccgctttttttttttttttttttttttgagatagagtctcactcaggctggaatgaaataaagaggaatgaatttcttgagacaaatgaaaatgaacacacactaaaacccatgcaatacagcaaaagcagttcttagtgggacgtttatagcagtaagtgcctacatcacaaaaggaggaagatcttcagcaatgtaatattgtattatacctcaaggaactagaaaaaagaacaaactaaacacaaaattagtagaaggaaggaaataataaagatcagagcagaaataaatggaacagagacttaaaaaattacaaaagattggccaagtgcggtggctcatgcctgcaatcccagcactttgggaggccgaggcgggcggatcaccaggtcaggagattgagaccatcctgactaacatggtgaaaccccgtctctactaaaaatacaaaaaattagccaggcgtggtggcaggcgcctgtagtcccagctactcaggaggctgaggcaggagaatggcgtgaacccaggaggcggagcttgcagtgggccgagattgcaccactgcactccagcctgggcgacagagcgagactccatctcgaaaaataaaataaaataaaattatggaagatcaacaagataaagagttggtttttgaaaagataaatctttagctggactaagaaaaaagtagactccaaatcagagacgaaggagacattgcaactgattctacaaaaatataagggatcaggctgggtgtggtggctcatgcctataggcactttgggaggctgaatcaggcagatcgcttgaggtcaggagttcaagagcagcttggccaacatgctgaaaccccatctctacgaaaaatagaggtgggcacctgtaatcccagctacttgggaggctgagacagaagaatcacttgaacctgggaggcagaggttgcagtgagccaagattgcaccactgtactccagcctgggcaacagagtgaaactccatctcaaaaaaaaaaaaaaggatcataagaaactgttatgccaacaaatcagatcacctagaagaaataggtaaactcttggacacatccaatctaccaatattgaattataaagaaacaaaaaatctgaacagaggccagttgtagtggttcacacctgtaatctgagcattttgggaggctgaggtgggtggaccacttgagcctggaagtgagagaccagcctggacaacatagtaagaccctatttctactaaaaataaaatgaaaaattagttgggtgtggtggtccacacctgtggtgccagctactcagaaggctgagggaggactgcttgagcctaggagtttgaggctgcggtgagctatgatcacatcagaacactccagcctgggcaacatagcaagacactgtctcaaaaaaaaaatctgaacagaccaataaagaacaaggagattaaaccagtaataaaaagcctcccagggaagaaaagcccaggaacagatggcctcactcctgaattctaccaaacatttaaagaattagtactaaaaatttaagaaaatggaatacttccaaacttatcccacaaggtcagcattatcctgataccaaaagccaaacatatcaaaaccaaacaaggacataacaaaaaaagaaagagaactacaggccagtatccctgatgaacatagatgtaaaaatcttcaacaacaacaaaattcagcaaaccaaattcaacaacccatgaaaacggtcatccatcatgatcaagtgcaattcatcccaggaatttgtgggtggttcaatttacacaagtcaataaatgatacacagtgttaacagaatgacagacaaaaaccttataatcatttcaacagatgcagaaaaggcatttgacaaaattcaaaattcctttatgataaaaactctaaacaaattatgtatagaaggattgtacctcaaaacaataaagaccatatatgacaaacccatagctaacatcataccgaatagggaaaagttgaaaccctttatgctaagatctggaacaagacaagcatgctcacattggccactactattcaacatagtactgaaagtgctagcaagagaaagaaaagtaattgaaattggaaaggaagaagttaaatttgtccctgtttgcagagacatgatcttatataagaaaccctaaactctccatcaaaaaaactgttagaactaataaattcagtaaagctgcaggatacaaaaatgaacagaatttatatgcagtaacagcaaactctaaaaaatcaagaaaacaatccatttgcaatagctaccaaaaaataaaatacttaggaagaaatttaaccaaggaggtgaaagatttctacactaaagactgtaaaacattcataaattaaagaaaatacaataaagtctttgttgatagattggaaaaaatattgttataaaatgtctatactacccaaagcaatctatatataaagtacaatccctatcaaagtgaaatagaaaaaaaatgctaaatttgtattgaaccacggaagatcctgaataaccaaagcagtcttgagcataaagaacaaagctggaaataccacattatctgacttcaaaatgtactacaaagctgtagtaactcaaacagcatggtactggcataagaacagacatagatcaatggaacagaatagagagacgaaaaataaattcatgcatttacagtaaatggattctttacaaagg

SEQ ID NO: 94333 - DNA, 66641 bp, Homo sapiens
aagaaagatatttaccccagggcattctataggcttcactggtgagatgtctttcctcttaggccatcaaatatttggaatttttttacttgcccagtcatgatggctcacatctgtaatcccagcatcgttgggaggccaaggtgggaagatctcaagcctaggagttccagaccagcctgggcaagatagtgagacttcgtctctacagaaaataaacaaaattagcctggcatggtggtgcgtgcttgtagtgccagctacttgggaggctgaggtgggaggatcaattgaactcaggagtttgaggctgcagtgagccaagatcgcaccactgcactccagcctgggtgacagagcaagatcctgtctcaagaaaaaaaaaaaaaaaaaaaaaaagaattttttgacttaaactttgtggtgaaatgagagaagacctgaacttaggggtagtggtggtcttggggccaagacagagaaaaacgtttctttcagtctccacaggcacttgtaacacttgtaacacttgtaaagtgctaggcctctgggttataggattatccccacctgtccacacatctctgggaaaaccacaaccaggtagctggtttcccagcagccttcatttttgctttttttttggccaacacctcacttcaattccctcccattaggcatttacctgaaatttttgggtgatgaagtctgcttattaaaaattactatacagctttacctttcaaagttggtgtgactataagctgcttctttttttttwaattgaattaaaatgaaataacatcgaattagccacttgaaagtgaacaattcagcggcatttagcacattcacaacgttgtgcaaccatcacatctagttccgagacattatcgtcaccccaaaaggaaacccttacctatacagcagtcacttcccctgtcccccccgcttcctgtctctatggatttacctattctggacattcatataaatggaatcatacaacatatggttttttgtgtctggcttctttaccttggcatgatgtttctgaggttcatccatgttgtagtatacatcaggacttcattcttttcatggctagataatattccattgtatggctctactacattttgtttatccattcatctattgatggacatttggattgtttccacctttgagtattgtgaatgacggaataatgttgctataaacattcgtgtttttgtttgaacacctgttttcaattcttttgtgtatatacccaagagtggagttgctagatcatacagttactctgtttcacctttcaataaaccgccaaactattgtccacagcagctgcaccgttttacattcccgccagcaatgtacgagggatccaatttctccgcatccttaccaacacttattttctggcttttaaaatgtgtttctttatttactcacatatagccatccttgtggacgtggagtgagatctattgtgatacaaaccgctttttgatttgacagtggttctcttggctttacactggaatctcctgggtatttatttatttatttatttatttatttatttacaatcccaatgcccaggctgtacctggggccaatttcattagacactagggctagccccaggcagtggcagtatgtttaaagctcccaaggtgattccagtgtgcagctgaaattgagaatcgctgtaaagatcctagccccctattgcttacatactttttttcttttttttttttttttgagatggagtctcactctgtcacccaggctggggtgcagtggcccgatcttggctcactgcaacctgtgtctcccggttcaagcgatcctcccatttcagcgtcctgagtagctgggattactggtgcctgccaccacgcctggctaatttttgtgtttttagtagagatgggatttcaccatgttggtcaggctggtcttgaactcctgacctcagatgatctgcccgccttggcctcccaaaatgctgggattacaggcgtgagccaccacgcctggccttacatactctttttaatcaaaatcttaaatagtgttaaaatagctgggtgagtcccacattcatctgaaaaaatggcggggagtgatccagatctttgtcagccactctaaccctaatagctaatgccaagtttttaagaggggaagtgatttcaccacagcggcacacaggggccagggaggcagaatgtctccaagggtcccaaatgaactggtgaaaaaaaaattatgttaaaaaaaaaaaagaaacaaaaggcttgatgaccagggcagctattaaggactgccaacccccatcagctccctcacctgccctgcaatgaaagtttgggacagcagcatgatgggtggccttacagtgcaggccaatagcctatggatatttccaattagcacctcagctacccagccactgccaccaccaccaccaccaccacctcctcctttttaacagagggctcttttctgcttttgacttccttcttcccagtacacacttgctcactgtgtaggacaatgtggctctttctctgaatttttagaaactctgttgctgatgtccagcttggcctgtctgctcagaagcaagtgggcccatttgaaagggaggtagggataggactaatacttagtaccagcattttgctaagtgggtcaccaaagctctcaccctaagcctggacttcatcttgttgtctatattgtcactgcactgtagtcacacactcccaggaacacacctagagttgaacaagcagttttcttctccttgcaggcggggaaaacacataccatgggaataggggcagtgatggggcaggggctctcaataagagggtgcgagaaaggatgacttagaggatttgcacctgggtatgttagaggcacctgacagcaataacctgtcaggtgagaatgaccctgtatgtcaagtgcacctgaatgtgtgtttggagttcccagcatggccaaccagagagtcattccttatctatggggaacatctgaacctctggcctggccaaagcagtgtgggtcctgaagcggattgaggcccttagtttagggtaaatgaaggttgccaggttgttagggggagggtgttctcctgttgagcccactgccactggatcgtccccgtatgtaagttaccaataaactctatgtctttgagtctcttctttggccgcttgaacctggtgccttccctactgaagttaataggcatctggcatgacactgtgtcaggtggttttggggagcgtttagggaagccaggtgttgctctggattgggagctggtgcagggggctggggtggggggaattctgtgattggatggtttaataaatgtcctctagaagcagagaaaattagagccaggctacagctgtggttggtaaagaagtagcagtcacccatattagccaggactggggggagaggtggtgtttggtcatatttgtggtttggacaaggcttatgttttctctatattcagacatgattacagagtggtcttgtttgtgttttgtcccaccctggtcatagagtggccttgcctgatgttggtgttttcgggagttgtttctgttcaacaggacatccaggcacagctgtgagtgcctggccagctccgtgaaggcaggactgctttactctttctcagtcttccttttcgggcaagagtagtccagcggcaggctgcaggacatgaatccacgatatccacattttcaccattggcaagactgtttcaagaatgcagtctctagtcggactagggtaaatctagtctctgctgagtcttttgttgcaggacgagttgctgaagtgtctgataacagctgtgcagtatttaagactctgcacaggatccactggtcgactataacacaattaccacaaacaaaatgattattagtcctgaaacaggcctggaagccaagggcctagattataaaactcaggtaatgagaacatgttcctgaatccaaataggtactcacggcccaattggaggtgtttaaaagaggcctcgagcaggattatgttactggtaagtaggacgtgcattgggaacatccttgcaataactcctaatgttatcccaacaatgtaggttccatattgaggccaatttaactctgatgctgtgctaacatcatgaagcatttgttgtggttttttatttttcgttttttgagactgtctcgctctgttgcccagtctggagtgcagtggcatgatcgcggctcactgcaacctccacttcctaggttcaagtgattctcatagctcagcctcccgagtagttgggattacaggtgtgcaccaccaagcccagctaatttttgtattttaggtagagacgggattttgccatgttgaccaggctggtctccaactcctggcctcaagcaatccgcctacctcggcctcccgaagtgttgggattacaggcatgagctgccatgcccagccaatgaaacatttgttaaactccacttttgctatggctgtctgataagttaagcaaaagcatctcaggtttttcatctctgctttgtaccttgcaggaaacaaggtgaggcacaagtgctggggatgagatttcaagcccgagcccgagggccacctgtgctgccagacacaagctgcagagcataaccagctacgcagtttgcaggccaagggcaaaataaaaacacggggccccttgttcgagagttaagaatttcaagatggcaacagcagagaattaaaccaagtgcagggcccttttgatgtgaggcccacactggtgctgagtggggaaaggcacacctgaggcccatggagccctactgctcctgcaacatgcaggacaaagacaactctattgtcagtgacctgactccaggggaatggcaagaagtgaagaacatcccaggaagaaagaggagctgcagactgacatagctaactgaaggatgagaattgcaatagctaacaaaattgagaatctaggacacagagaagaatggtaagacatgcagaataacaaacaggtggccatgggtagacaaaaattaatgcaggtactagaaaaagattcagttcttaacagagaaaggtctgttcaacagacccttgttgaacacttgtgaagacactgcccagtttttgtagaaaggtgaagaactcagcaaaacagccgttgcctgggggaagaggtgagtttaatatccaggttcttcgttgcttttgtggaggtacatgagttcatggatttaaattttgtctaaccattacagcaattcctgtggccgtgagaggcacaaaagcctgacacgatgatggaggcatttgcccagggatattgtcagtgcagtaaagaataattttagttcagacgctcatgctgtctcccctttgccatcattttgttgaacagcagccataaccccagtgtcaaaaataagccccccgcaaaggctattgccattaatagaggcgccagtgatggaggagtcctgctagacaagcaactccggagtctgcagtttcctaattcaatattaacaacaatgctgtcctcttactggcttctccctcattttattttgcgtgaaactgtggataacgtaaatgcccaagcgctttctattcagtcctcaaatgcaaagcagacccttgctaataatggtaataatccgaatgggtttaactgcagcattgtaagaaaaggcaggcagtactcttagactacaggggtggatctcatcatttgattttcccgactccgccaggaaataagaggggccttggcttggggagaggtgtgtggggaggcgtaaggggtgggccccccggaaatcctgctgcgctgtttaaacctaaggtgacctaacggatggcgggagcggccgcgcgagccttggagcagggcgcggccattggtgacgcacgccggggagcacggcgcccacgtttccaccattagcgaggcctcacacccggcgctccaagttcggggctggaggcgtcccggcttcctccctcccggagcgggaccggccccgcccccgcgccccgggtcgctcccggcggcccctcccacctcctagtcctggcctccccgggcgcagcacactcccagccggccgcagcctgacacgccgcgcggccccccagtctcccgcggctgctcccccaggcatggcacagggcctcgcctcactatggcagcagcacggcacagcacgctcgacttcatgctcggcgccaaaggtgagggcgcccgccgccacctgcgtggccatccccgccgctcccgccgcctggcgggctggggcgggggtcgggcgtggcgtgcgccgcgggccgaacaatgcgggcggcccgcgcggcgccgcactctcccggactgccacgcacagcgcgctgcggggccgcgtgcaccggcggtcgggcggaggccgcgctcctgctggctccgcgctccgtcccggccgcagctcggggcctgcaggggcagtcccgggtgcccgccggccgcgccgcccttccgggccctggccgtccacccgcgctcccacgcgggctcgccgccttcgcgctcccgctcggggagtccccgggctgccgggcgcgggcggaccccccatgggacgagggttgcagggactgcggcggagcgaggcgtgacccgcgcggcgagcccgggctgggggcgtgcgccgagcggggctgcccgcgcgaccttttcctgttcttgcaggcgggtaaatttccctcttgggggcgggggtttcccctcgtagggagctggggctggggaaaggtctgcggacgcgcagcgcttgcagaattctcagccgactgcgtaggagacggatcccccggaaaggaactgggggacgggaaaaggaaacgattattattattgggggtggggaggcatgaggtctgggcgcgggaatcgtttacaccccgaatcggggagctatcaaaagacagccggccgggcgcggtggctcacgcctgtaatcctagcactttgggaggccgaggcgggcggatcacgaggtcaggagttcgagaccagcctagccaacatggtgaaaccccgtctcttctaaaaatacaaaaattagccgggcgtggtggcacgcgcctgtaatcccagctactcgggaggctgaggcaggacaatcgcttgaacctgggaggcggaggttgcagtgagccaagatcgcgccattgcactccagcctgggcgacagagcaagaccctgtctcaaaaaaaaaaaaaaaaaaaaaaaaaaaaaaaaaaaaaaacccgaccagaagagagaggcctgctaaagtcggaactgtgtgcaggaaatttgaaggggaaggataatttgcaggcttcttttctcggggtgcctctgtcgtggggggtgggagtcgcgggaaggatagaactgccctttctttttctggtggcttttaaacctgtgactgccgcagacttgaatctgcacttcccataggttccacttggagtgtctcgctcataccttgcttttcccactgttttcctcgaattggatagagcaggcttttctcttaccatttttaacactgttcctttctttctgaatttctgagtactcactttgcattttctcccgcaaatttaaaggatctccgaaggcacaagatctagtgaagactgaggatttggagcaacacctgggtttgagtctggcttcttcctgatgggctctgcgtgtggccttgggtttatgttaacctttctgagccttccctgtccattaaaaagaaaaaaaaaagtgtacacctcttcgggcttttactcttaagggggtagctgtggagcacactgtagggtttttaagcaatgtcagtgtatttaggtggtctgaagtgacttagagaaaacaaagcatgttaattttagttcccacatttcttaggtgaggatggtagggcatggagactgctagagatgaaatggtgcttgagtggtggagctgaagagccaaggtttcattaataaccctgccagccttagggctgaatggttaatgaaagctctagcatactgaatttagcggtgaggagaaatagtgtattagggtcacccagctagtaaggggtgagtctgggaagtgtccctgttgtgagcaccttgtgaacactcacctgtatttatcgtccatggattttcttaacttttttttttttttttttttttaattctgagatggagtctcactctgtcgcccaggttggagtgcagtggtgcgatctcggctcactgcaacttccatctcctgggttcaaacaattcttgtgtctcagcctaccaagtagccgggattacagactcgagccaccacgcccagctaattttttttgttgttgtttaaagtagagacagggtttcaccacgttggccaggctggtctcaaactcctggcctcaagcgatccgcctgcctcagcctcccaaagggctgggattacaggcatgagccaccgtgccggtgtgtccatgggttttcttttatgctttaaggagggtgatctcagcatggagcccaaagactctggcacttccctttgtccttaaacctccttggccaaatttagatttagtctcttgaagtgctggttcacaataggatgtttttgttgttttgttaaagtgggaaaagagcgaatgaagaaaaagtgagagaattttaacacttggggctgacactgtccaggagaaccatggatgtatcgtgtgggagggaggaggagaaactgacgtttttgaagttggaaaggtgtggaagtggcatcttaatttagttgtgcaaagaggaagtaaaaagattgacgataaagacgtgtatagatcagaatagaacgttcttaagagggaaagatgaaacataagctgttaatattttaattcccagtctgttcttaaagatgagaaagctttgatggcaaggcgaacattctagaaagaactattacgtgtrtgtgggggggtggggaatgtgtgtatgtatgcatctgtcagaccttgagtcattacaagtgttctgggcgtaagaactccgattcatattgcattctcttccatcactttatttggggtgaagcacatcgtcctgtcagtatccacatttgaaaaataaagagatcctggctagattgggatctaagttcacttagtttttagtaaggggaacttggtgaaaaatcgacttgtgaggtctccagaaacacttaattgataatgagtcaaaaggcattactcttggcatgtgaatattggatgtgactcaagggtgagtcaaatgcctgtggagcctggattcatgttcttttccccgtttgtcagtaatcctttctaatgttccagttccatgatgtgattttagtggaattaaacttgaaccacttagttatgatgttgttactgtgttgggaacgcagcagccaccagaccaccaagagcaactgtaggttgggcttggtggtgctggtttagtgttgtggctgatgaggtgtaacccaggaaatttttatttttgcttttaaaaaaacaactcatctgtggtcatcttgtaagtgaagtattggactataaggactcttgagcccgaaaaacattttgtgacttagcctgaggctaacaggaataaacttgtcccatgttcagatagtttaggcatatctgagttggtggaggaaatgtgatctgttcctagccctatgtgctaggcaggatgcctgggtatccagagagtgagtgagaggcccggcgcgatgccgcatgcctgtaattccagcactctgggaggcgaagcgcttgagcccaagagttcaagaccagcctgggcaacatgggaaaaacctgtctctacaaaaaaaaaaaaaaaaaaaaaaagaaaaaaaattagccaggtgtggtgagttttctgcacctgtagtcccagctagttgggaggctgaggcgggaggatcccctgagcccaggaagtggagactgcactccagcctggacagtggcgtgaaactctctcaaaaacaaaacaagggccaggcgtagtggctcatgcctgtaatcccagcactttgggaggctgaggtgggcagatcacctgaggacgggagtttgagatcagcctggccaacatgatgaaaccctatctctactaaaaatacaaaaatcagccgggtgttggtggcctgtgtctgtagtcccagctactctggaggctgaggcaagagaatggcttgaacgagggaggtggaggttacgctgagcccagattgtgccactgcactccagcctgggcgacagagagactgtgtgtcaaaaaagcaaaacccgcacacaaaaacagtggtgagtgagctgctgtarcctcttcttgccatgttggagtggaaggtctctaacaggccagccagctctgaaaaggtctagcaatcctatgtccatttttttcccctgggctgggcgtatcttttgaaggcagacctccaccagggtctgtatcctggagacagctctggtacatggtagatatttggtacacgctgattaaatagaccaagtttatgttatggtaaaggtggaatgctggttcatgtccattaggggaaagtgagatgctcatttaccttgtagaattatgaggatggtccagaattcagaaacgtggcagatactgttaggtctgtcatttggaccattgctatatgatttgtgcagggacacaaggagatttgtgtcgctcaaattcacaaattctataaccttgtttaataatttaagaacagaaggctacttgggaattacgggcttagcggagaaggtttggggcagggggttcttttgtacccttgaccctcatcagggaagcctgtgcacctcttctcagagtaagaattttagatgcgtgaaataacccaatcttcaaaatacaaaacccccaccgtgtggtatggtaacatgtgctttgcttcccgtccccccccccaccccctacagtctcgctctgtcgcccagagctggagtgcaatggcacgatctcagtgtaacctctgcctcccaggttcaagctattctcctgtctcagcctccagagtagctgggattacaggcacgcggcaccacacccggctaatttttgtatttttggtagagatggggtttcgccatgttggccaggctggtctcgaactcctgacctcatgatccacccgcattggcctctcaaagtgctgggattacaggtgtgagccaccgcgcccagctcatgtgcttctttattaacacatcaaataacaagatgtggcagcaaggctagtaagtttcataagtagagctgagcaaaattgatatttaacaaattgttaggcaaggagaaaaacctgattttttgtgacaatgaccaggtgtagttgacagtgtgtgatttttttggcctccaagcataactgaagaaagtgctaaatttctattagtgaaaataagtctgtgtgtttttttccattcaagttcacaggccccctgaattgtatccattggccccttgggcatccatggaccccaggttgagacccccaggctggggagggggaggactgagacagcccgttccttttagggggtgtaggtttccacccaaggccaatgctggaggcacatgtccctagttattcttcaaaaacaaaagcggctctttgaactatttgaaaacataaaagttgtacttagtaattgccacaggggctaagtgccctgagtgctttgtgcattaattttaggtaaatcctcaaaataaccctaggtaggtcttgttatccccattttaaagacaaataaataggcctaatmttgaggttttttactttttgagtggcagagctggaattcaaagccatgtttgtttgattggaaggctggttctgcttccacgattctgaagcctcttagtttaaggcggtgattctcaatgtgggtgcttccctccgtgggtgacatctggcaatttctggagacagttttggttgtcacaactggggagatgctactagcatctagtacgtcctgcagcgcacaggacaactcccctgcggcattgacagcccaaaatgtccatagtgcccaggcagagaaaccctggtttaaattcatactagaccatttcagtaatttggatgacagatcatcagcaaaatttccctggtccttcttggaagtgtcagttatgcccacaaattgttaggcagggaaggaggatgggccctgtctttctctaaggttggcactgggctctgttaggagcttggtcattgcttcctactgaactgagcctgtggtttgaggtgaccttccctccctgatttcctgaaccatcgctctttttaaccagctcccacrctcccctgtatttgagctgccttctggtggaagcatgtcttctttgtgtgttttaaatagctataactgtctaaataataaaacctaaacaatgtagttcagattgcatctagctttctcaagagtagagaaagcttccttcctcccgctccttcagcattattatcctgtcccactacactttaatcccccattgtgataacaccgcaggcacagacgctgttgctttaacaatgcagcctttcggggctgatgactgggagtggggaatgcatgcttgggccctactctacacggactgaatcacagttggtggaggggggtgagttcctggattttgcatttttaatcatctgcctcacagtaattctgttgctgattaaagtatgagaactcctctagtaggttccttatttaaaacaacaacaacaaaaacttgtctgaaacctttggcacacctacctcactcagcccaaccagtcagcctagtcagtctcattaagtcctgtggcttctgcctgccaatgttctcaaatttgttgctcatcacctgttccttactttagtttcctggctacagtctccccatttgtctccgtttggggatgggcccgatcattaggaactcaacaggatccctgtcccttttcccatttaaaaactcttccgtgggtccctattaccccatggatgaagtctaaactctgtatcaacacatacaaggtcaatttctacccggtttttcctcttcccccagtatattccttgtgcttcccggtagccaggaagcacctggactcaggatttgacagctttggagaagacttttttgtgtgctttacataggaattctcatgcgttaattgtgtttgaaaatattttatgggctgcttccgggagatcccttgttggcattgccttcctttggcatgcgcttttgctttgtgattttttttttaaatgctcttttcccaactctgcaaaagattcttaattgcacaggttatgctctatatgactccaggctgaataacctcatgttgccgggaattagttttgtgggcttgccattaaaaaattgagtaaaccacaatgattctttttagattgtagtttccaagttataccgatttccttaaacctatggaggtagcatatggtaagattttagtttctacttcatatctgtaatcctcatctagttctcattgggtagttcagtatttaaaatgctttggaagggatgacagctgtttaagaaattgactccataatcaaggcgctaggagtgacccccatcctggctaacaagagaggggtactttttcaagtaatctgaagccccgcatgagacattctaatttaataaccagtagtcagtcaatgtgtctttttttttttttttttaagaaagtcacttttgcatttgcagtggaggagttaccaattgggaatcttctcatccccttagtatgtaatttactccgttttgtttgaattggtagtttcaggccttagctaccttctcaggagataaagattaaaatgctgtgttctctaatagctttaaaaagttagagcttttgattttggatttcatacccagaagattggagattatgggctttataattgcgatcaccatggttatgctaacctttcacagataaggattagttataaagttactagcatctgtttaaaaacgtcaataaagttcttagtttagtttttggagtctgcatattccaggtgttttaattcactatttcactgcagttgtaacctaagcctgctggtgtgcactgtggctccgaccaccatttcatggtatagactcagttcttttgaaaagtcagaaaacctcctcaattgaatctgcgaaccacgtatgtaaaccatgcacaaatgctctttaaaacccttacagctaggcacttttccagaccccaggaaaaacaaccctgcggccctgaggtgtggtgggcctgggtttcattaaattgacactgtcatctgtgttccggaaggagccaccgagctagctagtggtgatactggtgataaatgtgtttacgtgctaagccacagattcaaaaggagctggtaagagccagtagcatgttctagattcctgaactgacttgactctgggtagttttacacacaccttaatttttccctctccatgaaggtgctaatgatactaaaatcccacacactgtgtcgttgggtggaatgtccaataaaatgtttggaagagtatcaaatgatacataaaatacctaacactaattgcaatacttagggcagagtactttgaaattgtgccagtggataaagatgctcagttataaagaggtgtgaatttaacttacttgaagggtaaygaaagctctgctggcargagaagaggcagaaaataatgggttgccctgtgttttgaaggttggtctactttatttaaagggcttcctccctaagtgattaaagcagaattttaaaaggacactttgatttaagatatcaattacttgtgttgcatgactccattttttttcataaatgaaaatttctccagtgagaatcctgagcaattcctagaacactgctgtatttaattctgaattctcccttctagaaggactgtagatcacagtgttcaaacaagacttatgtgcctgtgggcattccaaattcctttgctggccttacagtgcagaggtgaatatagaactgttcctcaatcctttttcttagagtacagsttgagcatccctaatccgaaatgctccaaaatctgaaactttgagcaccgacataacacaaaaaaatgctgattcgggatttccagattagggactttgagtcagtgagtgtgatgcagatattccaaagtggaaaaaaaaaaaatccaaaacactttcggtcccaagcattttggataaaggatattcaacgtgtattttcagggccagtgccttggatcatgctttggaaaacagtagtggcatagttttttgtttttgtttttcaaagatggggtcttgctgtgttgctcagactgatttcgagctcctggactcaagggatcctccagcctgagactcctgagtcactaatgttactggtgcacactgcagtacctggctgaagttttataaatggcttaacactgaatcttttaactgtataaggcagtagctaagtggcccagttgcatgtggaattttgaggaagatggtcatgggtttctcagtccaagtgtttgttcctacgtgggggtttgtctaatttggagctggaggcttgatgttgagaagagagaggaaagagcttactattaactccctttggtatgagatgcaagaatatgacaggactttttttttttttttttttaatttgagttctgggatgcagtacagaacgtgcaggtttgttacataggtatacatgtgccatcgtggtctgctatacctatcaacctgtcatctaggttttagaccctgcatgcatttgtcctaatgctctccctccccttgccccccaccccctgacaggcccaggtgtatgatgttcccttccctgtgtccatgtgttctcattgttcagctcccacttatgagtgagaacatgtggtgtttggttttctgttcctgtgttagtttgcttagaatgatggcttccagcatcatccatgtccctgcaaaggacaggaactcattcttttttatggttgcatagtattccatggtgtatatgtgccacattttctttatccagtctatcatagatgggcatttgggttggttccaagtctttgttattgtaaatagtgcttagtaaacatacgtatgcatgtgtctttatagtagaatgatttataatcttttgggtatatacccagtaatgggattgctgggtcagatggtttttccggttctagatccttgaggaatcaccacactgtcttccacaatagttgaactaatttacattcccaccaacagtgtaaaagcattcctatttctccacacctctccagcatttgttgtttcctgactttttaataaggaccattctaactggcatgagatggtatctcattgtggttttgatttacatttctctaatgaccagtgatgatgagcttttttcccatatgtttgttggctgcataaatgtcttcttttcagaagtgtctgttcatatccttcacccactttttgatgaggttatgtttttcttataaatttagttctttgtggattctggatattagagctttgtcagatgggtagattgcaaaaatgttctcccattctgtaggttgcctgttcactctgatgatagtttctttagctgtgcagaagctctttagttgaattaaatcccatttgtcaattttggcttttgttgcagttgcttttggtgtttttttgtcatgaagtctttgcccatgcctgtgtcctgaatggtattgcctaggttttcttctagggtttttatggtttggggttttacatttaagtctttaatccatcttgagttaattttttgtataaggtgtaaggaaggggtccagtttctgttttctgcatatggctagccagttttcccagcaccgtttattaaatagggaatcctttccccattgcttgtttttgtcaggtttaggggcttttttttttttttaagcattttgtgactgctaaatttttagtggagttcctgtaatttatttctttgaacaaagggtctggctttgcttcagaaggctgcaggaactgttcaagtagtggtttgtgcatttgtctttttactacatctgctcattttacactatggggttagggaaatgtaaagaaagaggggatacaactgtgatactgtcaaaagtagataaccactttgatgtgtggtacaaatggcttgcttattcttgttgcatatataacaatgttgtacgtaaaaacactggattttggagcccagctgttggggtttgaatcctggttccactacttactagtgtgtgtgaccttgggcaggttgttaatctatgtgccttactgtgctggctatactttggttacccttgaatagcagctgtgagaacagacatccttgccttgtttttggaccttatggggagagcagtcttttaccattttgagtattatgctaactgtaggttttttgtagataccctttatcaagttgagaaagctctcctctattcccatttttgtgtgtttatcttgaatgagtgttggattttgtcaggttcttttttgcataaattaatataaaatgtgggtttttttctttaacctattatggtggatcacgttgtttgtttgtttgtttttttttttttttgaatgttgaactagccttgtatacctggaataaatctcacttggtcatggcatatttttctatattgctgaatcctatttgctaatgattttgtcaaggatttttgtgtctatactcatgagggatattggtccatagatttcttttttggactgtcttggtctggttttggtattagcataatactggcttcataaaatagggaggccttcccttctggaagagattgtgtagaattggtgttaattctttaaatgtttggtagaactctccagtgaaaccatctttgtctcaagatctcttttctggagtgttttttttcttgagagacggtcttgctgtgtcacccaggctgaaatgcagtggtgtaatctcaactcactgcagccttgacctccagggctcaggcaattttcctgcctcacccccctcccctcccgccccgcaaggtagttgggactacaacaggtacgyaccatcatcactggctaattttygtatttttttttrgagacagggcttcctcatgttgcccaggctggtctcaagctcctgacctcaagcagttgacgcaccttggcctcccaaagtactgggattacagacatgagccaccatgcctggcctctttctggaatttttaagctataaattcagtttccttaacagttataggactcttcatgttatttcatattcggtgagttgtggtagtgtagccggattggtaaggcatcagagagaccaatggggttcaggaggatatttattatttaggtgcaccggcccagtcggattaacattcaaaggactgagccgtgaacaaagagttaagttaccttttaagcatttcgtgggggcagggggagatctgtgcaggggggagcatattacagaagcaagaaacaaagacagttattcarttaattgagacatgcattacatcatttcttactttttaaggaaaaacatgttttacgacttgagtttgtctagtgaccttgcagctgcacagctagagaaacagggtcttcacaatgcctgggaaaggaggagagataaggctcactagccacagaaaaacaagcagttaatttttaaaggactccagctctttctctttctcagcgggaactgggttttcttgcatacaactgagtttctgcttacacattctttaatttcttttaattcctatttcattagtttgtgtttttagaggaattgccccatttcattcttaagttgccacatttatgtgtgtagagttgtagtattcccttatcctgttggtgcttgcagagtatccacagtgatatctcctgttattcctaatattggcaatctggttttttttctttgtaagtcttgctagagtttatcttaataatcttttcaaagaaatagctctttgcttaatttttttctcctctagtttttatcaattttattgatttttttttttttttgctgttatccttctctttttgctttggacttttctctttttctaggttcttgaagtactagtgtggattaggaatttgagattttaaagtggaattcggtactcttaagtattctcattctctagtatgcagtttctgttgatactagttgataatgttcgacgtattccttaaaaagcaagagtcttagttatgttggttgttagctgttcttttttcaacacaataaattgctaacttgaatataggaaatattcctcagattattctagtttcaaatgctaagaatgttctgaagtccttggaccagattctgctcatctggcctgtttttgtgtgaccctccagctaagaatgatctttacatcttaaaagggttgtaaagcacacacaccaaagaatatgtgacagaaacctgatttagccagaaygctttaccacgtggccctttacagaaaaagcttgcccgttcctgcctttagaccatctaggtgcaatgattttgattgcccgtttcagagccatctggaaaaatttggaagtacagatttccaagcccttcacatggctgccttctcgtctggaatccatcatagtgcacggccatctctgtgtttgagtagttttgacttgtgtcctctgtctttcatctttattctccagtggcacttacttgtccagcacctcctaggtgctgagtaatctccttgggggcccagttgaatgtggtcttggctaatatactctggtaaagccacaggaagggaaggcagagggacctcctcagcgacatgtgtatcaagtacggtctaatataaatgtgatatttttttttgacatcacacaattcccaaagtccagactgttttatctttggaaatgctatttcattgttgatacacagcctggcatagatgctcagacagaacccttgaagtattgtttttttttgagacagtcttgctctgttgcccaggatgaagtgcagtggcgtgatcttggctcacggcaacccctgccttctgggttcaagggattcccttgccccagcctcccgagtagctggtattacaggcacccactaccacagcgggctaatttttatattttagcagagacggagtttcaccatgtttgtcaggctggtcttgaactcctgacctcaaatgatccgaccgccttggcctcctaaagtgctgtgactacaggcgtgagccactgcgcccggccttgaattatttttaaacacaaaaatggtatgacctgtaagggattctgcccggttaaggttagtgagaagaaagctggatgttcatgatagtgctacagtgctcagaaagcatatttcatccttcccagataataaaactggcaatcccatggtttctactttggcaaagaaatcttgtttccccttctggacggagctaaaggaaaccattgtcatttgaccagggccaacctgtgtcctctgtttcagcctgcccctctgtgatgagggggtgaatgtaggttggtggctggggccgtctccacacgtcacatgccaattttgaactaaaagtaagggctggtcactttacctggtccagatgcattcctgagtcatctcctgttccctgacctcaaacactgcaagtcccctctcaaaaccttctttttgttacttctctaacttctcctttctgttgggttgtagcatgacccccaccccctgcttttctgtgggttctgatctcttttcctaatcctctgccttggttctcttccacmgctctgggccagagttccttcctcttctcaaaaaacatggtccttaagctgacggggcccactgaagagcatcgtaggataccttaygttgtttgcatgattcctttcaggagaggtcaagtggcctggttattcagtgtctcatagccacaaactaatggataatattccttccagatgaaaggcaggctttagtatactgtcttttgtctgtgccttgttttctgagtcttgactctcatacgggttaaatcagaagggtgaggatgggtgagtttgaatcacttgacaaccagcaagatgctgccctccccagtcccagtgtctgtgggaaatgctctcccttgcagtgggaatgacaaggcagggcagtgaaataattagcaacacatttaagttatgctataacttagtgcattgagttttaagaagtagtcattgtggctggtactctgtaaacatgcccacatggcttcccttagtgcatgtttgcatgaaaagagcttgggtgtcatttctgtgttggtgttgtgtttttcttctgtagttaatttttcttgtctggttgctcttctctgtgaacatcagaaaccattctatgaaaaagtcctgtaaatttttcacgccactgtctctgttctgtcacccaggcaggagtgcaatggcaagatctcagctcactgcagcctctgcctcctgggctcaagcaattctcctgcctcagcctcccgagtagctgggactacaggcacgcaccactgcacctggctaatttwtttttatttttatttttatttttttattttttgagatggagtcttgctcttgtcacccagactggagtgcagtggcgcgatctcggctcactgcaacctccgcctcctgtgttcaagtgattctcctgcctcagcctcctgagtagctgggattacaggcatgcgccaccacgcccggctaatttttgtgtttttagtagagacggggtttcatcatgttgctcaggctggtctcgaactcctgaccttgtgatctgcccgccttggcctcctaaagtgctgggattacaggtgtgagccaccgtgcccggtgtatttttagcagagacggagtttcgccattttgcccaggctggtctccagtgatcctccagcctcagcctcccaaaatgctgggagtacaggcgtgaaacaccacgcctggcccctgtctgtattttgcagccatacctcatggaggcctgagattggctgcaggcactttagtgttaggaaagctgtgtgggagctgggcaccagccacctcactgtgcagtgacagtgcctacacaccgcagccactcagatacttggtagtctatgatagatggggacaggtagagaagaccactccttgcagcccctttacctgatgcgtgttgcatctgagcccgtgcctggtgggcagcttgtggtggaggaggaggagaaaccaactactttttttttttttttttgcataagaatgtatgtattagttttctattgctgtacagtaagttaccacaaatttagtcacctgacacataatcacagtttatgtggattaataatctgagaatggctcagctgggtccatttttattttatttatttattttgagacagaatctctttatgtcacccaggctggagtgcagtggcaccgtctcggctcactgcaacctccacctcctgagttcaagcaattctcctgcctcaccctcccaagtagccagggctacaggcgcctgccaccacacccggctagtttttttgtrtttagtagggacggggtttcaccgtgttgggcaggctggtctcgaactcctgacctcaaaccttggcttcccaaagtgctgggattacaggtgtgagccaccgtgcccggccttctttttcaaataatggctttttttcctctgggtatatacccagtaatgggactgctggatgcaatggtaattctacttctagttctttaaggaatctccatgctgttttccatagtggttgtactagttgatattcccaccagcagtgcagaagtgtttcctttcaccacatccacgccaacatctattatttctttgactttttaattgtagtcatttttgcaggagtaaggtggtatctgattgtggttttaatttgcattttcctgacaactagtgatgttgagcattttttcatgtttgttggctgtttatcttttgagaattgtctgttgcccatgtcctttgcccactttttgatgggaatatttgttttttttttttttcttgctgatttatttgagttccttgtagattctggatattagccctttgtcagatgcatagtttgtaaatattttctcccactctatgggttatctgtttgatgattatttctttggctgtgcagaagctttttagtttaattaggtcctatttatttatttttgtttttgttgcatttgcttttgggttcttggtcatgaattctttgcctaagccaatgcctagaagagtttttctgatgttatcgttatcttctagaatttttatggtttcaggttttagatttaagtctttgatccaccttaagttggttttttgtataaggtgagagatgaggatccagtttctttcttctacgtgtggcttgccagtggagaaaccaacttctgagtcttctccgttgccttggcaaccttgccgtaagtgggattctgaaggctcagcgtgttagtttgggatttttggggaacagctttattgagatatgattcatatgctatataactcctttatcgaacatgtacaattcagtggctttcaggatatttgcrgttgcgtgaccatcatgacaatcaactttagaacattttcatcacctcaaaaacaaaccctgtgccccttagccatcacccttattcctccccgcattcttcccagcctctggcaaccactaatctgctttacatctctatgagtttgccttttctgttttgttttttgaggtraagttttgctcttgttgcccaggctggagtgcaattgcgccatctcggctcaccgcaacctccgcctctcgggttcaagcgattttcctgcctcagcctcccaagtagctgggattacaagcatgtgccatcacacacggctaaggatttgccttttctggacataacaaatagaatcacttatttcacttagcatagtgtttttaaggtcctaccgtgttgtatggagcgtgtatcagtacttcgttccttttatgcctgaatagtgcgtggataaccacagtttgcttctccatctataacctgatggaagtttgggtcgtttctactttctggctattgcatatcatgctactgtgaacatctgtgtcagcttgggttgtgtgtcatgagcttcatttcatcatcatgcagctgttgtaaaaaggactagacatagggctataaagccaagctgttaagtaaggcatgccaaaggaccacctgcttgacctagaaattcattaagcttctaatatctgagaagtctaataggcagatccttttttaaaattaagttaaacttttaattgtaaactagaattttcatttgtgaaattgaagtcttttttgcatatcacttgatttctgtaatctggacctgctgcctgtcagtcttcgtgcttttgatggacttagcacattctgagttcagaagatgctctcagacccttaggcagtgctcagccatgggcttgggtgaaaaggagacttgagggatgccgcgctctttgtcattcttttcagaggggttatgccagtggtgttggtgacttctgaacagatacttctttaacttggtataatttatgtaaattttagtgtaccagttctgagttttgaccaatgcatacagttgtgtaaccaccactagtatcaagattagaaacatctgaacgtggttttaaagcagctacctgatttcaaattggattggaatccagtttcctttcctcttttaggtttaggggtctatcaagaaaaatcagaaagctgctttatgtgtgaagggacattgtgcacaacctgagcctggctgtcaggttatctgacgttaggatctggggtttaggggaaaggatgcctgcgtttgtgcttccccttgcgggggagttgcagactggctctattgccagccagctcgcacaccatcttcccgtggagagagtgcagatccctgaaaggagcaggcaagaaggggccrggtwtaagcctgaccaaaggtgggcccttggacttaggtggcaagtggtaagcatgggcggggaaggcgtgagtgactgtctgtgtgtacatccgtgtgtgtgtgtgtaggggcactgagaataaagtgtgagtgagggcttggagctctggaaatctcggcagttctttggtggctggggctgcagttgctggagcagtaggtgggctggaggttcggctttgggtcttatcacttggcatgatgcgatgatggggatgactaaacaccccttggagccagttctgggagagacctaggagggaaaggggcttttgatagtgaggtatgaaattttcagccttcataactaaaaatatgcttggcgagaatagaaattcatctcccaatttcacaagccaggtgctccttgaccatgagagagctgaaaggaatgtgaatgtaaatcttctgttcctttttttttttaatgtatagatcatgtatacaataaggtagattatcaaacatgtacagcagaaggctcatttcagatcagaagttctacattcagtgagggtggtagaaatgaaaacattttattcattttgcatgttgcctatattttctaattttaaaaatacacatattgcttctttctgtattaataaaagcttattttaaatgaccgtactaatacagtttgtactgtggttaaaatatacatgaccttgaccatgagagagctaaatcttctgttccaaccgcctcattttgcagaggacaaygtcaaggctctggcctgtggaatctgatggctctgcctgaggggaggggtgttgacaacacacaagacagttggagttgtgtagccttcagaaagccctgtgtgctcatggcctgagttttcttagctaaagtttttgaagttgaaaaaacagccacaagccaaggtcacaagtagagagaggtttttttgttattgttttttgtctttctggatgtgtgagaattgcatatttccttagggcagcctctaatggaatttagtttgttgaggaggatgttagattctcaaagctgaaggaggagcaggaatattatatgcatgtctttttttttttttttttttttttttggtgccaggttcgattttgattcagagtgactccctggcctagtaaggttggctagtacagctaatctactttatgcacatggggctgcataccatgtggatcagtgattaaatagcagtacaagaccatgagggaaggaaggaactgatgttgattctgsgttctatataggaaccctacaaagtagtgtttctactttatgaggaagttaggtctgtaagtgaaaagtcctggccagtgagtttggttggggtaggctctggtgggaggcttgggggagcctgttatggggaatgttaagtggctggtgatgtaaccatcgatgagagtagggaagtaacaagcctgattttgatccaagacttgtgattggaacagtgctgggagcagttgcacgggaggcaggttccagctagatacacagatttgtgctttgggcatctggagctgatgctccgggtcagaagaatgagtttctccaagacgggcctgtaaatggttccctggtagaaaatgaggcaggagggtgaagcttaggccttgattcttttttttcccttcctgtcttcccttcccttcctttagtagtggtgtatttaatttggaccagtttattcattttaagttgttgttgaacaaacacacaaagtaggcagtgggctggaaatggggacattgcgttgttcagtagacaaaggacacgttttgccttgggagaggtcactgtgtttctgagcgctttggaaggctgactgatctactagttacaatatgttgttctagcctggccattgaagtgaattttcagagaacttctgccaaagaagaacatttcattggcctaatttggatgactatgtctccttcaaagtagtgtgatgagctctgttagcatttgaacctgtcttcacattttcttctgatttgtggacacttacgaccttgctatcctgtgttctcaagtttgggtatattctgacctcaggctcgttttcacctgtgtatagagcatctagtagttctcaagggattgtattgcccctctcctgcccttggggcagttggggtgtggggtcttttattgacaagcaagggcattcctgacatttagtgggtatggctggggttaccaaagtcctgtgaaagacagggcagcctttcttaccacgttgttaaccttacccctgatatcaaggaaccctgatagagcaagtctgatttgttgggtcattttacaagttccatactagacaggcataaaggttgaaatttggaataattacaaagcattttctggggcatgtgacaggttacccrtggcttcagttagtaaagagttctaacttttttcagcccctctgttgagcattttctataactttttggtgagttgagtataactggtatggaaatggtagggggtttcttttcctttttttgtgttgggtgatttagattagtggttctcaactgtggctggacattggaatttcccagggagcttttgaaaatactcatgcctggggcccacccccacatttctacttaattggcctaatgtgtggcattggaatttttaaaaattcctcaggtgattattattacttatttttttgaaatagggtctcactgttgcccaggctgaagtgaggtggcacaatcatgggtcactgcagccttcacctcccaggctaaggtgttcctcccatctcagcctcctgggtagctgggactataggggcatgccactatgtccggctaatttttgtatttttggtagagacagattttaccacgttgcccaggctggtctcgaactcctgggctcaagcgatcctcctgccttgacctcctaaagtgttgggattacaggcatgaaacaccatgcctggcctccctgggtgaatgaaaatgcacagctaggattgtaaaccactggtctagatgtttttgaacctctgcaaagatacagtaataaaggatgatgaattcagccaaataaaataattttttatttgccaccaaacatttattgagcacctgggatcaagatgactaagtgagccacctcatgcttttgctttgttttcactttaaaagccctgatttggaaagagatactactgcggagttttcagctctagctccccttcctggagtgtcttccccaagggctgggtgacagggaggccccaaatcaggaggaaggtgaggatgaagggagatgaatggtgggcaaaatggtggtgtccccataaggccctgcagacaccttcctggcagggctagcatactcagatgcccacagggaccaggcggccgcacaaatgaatagggcttgtgggtaaatgagcttccagaaacacgttcagctttggcctgtttttactgaacttggcgggtaagcctatagtgtgggaacaagtaatacttcaaatcggatttcttgtgtagtttttccttcagtttgaaacctggccggaggactttctttagcccacacggtgcctttctgttaattgtgccagttagaaaaaggggatggccactacactgggcttggccagcagtcaaagcctttgcatagatcagacaaagacaccccctttccttggcctaagggatgaggttcaccccagctcagccacccaggccagggtcctcgttcactgcacagcctggtcaattacacgcagggtggccttgtctagattgttcgttcaccagcatgggggttcgggttctgttttgtaatgtgccaacagaaccatcttgaggccatttaccaggagtgatgatttgttttatatgctttcaaaacagaaaacatctgttctagccaargagggattgcttaatttcagaatggctcttcagattcagggaaagttctgcctggctcagtacactcaagccacctccacagtgggctggccaaccacacttcagtgacaaacacaaactgaacaaggttagtttatcttaccaagtttgaaatcagatttttttttttttttttgtgaagtagaattcagtcttaaatgttacagttctggggatataattcagaccttcgcttttaatttcctgaaaccaatttcagaatagcaaagcaagctagattattttctgccaaacgactttcccaaaggcacagttttgctaggaacaaatgagagcttaaggattcattgggccaccgctgctcggtgtttatagatgcttgtgctgctgtgggagtgtgacatggattctgcgctggtagtttctccctgatgtgggactttttcttggaggctctttcattttggccatctgtagggcttgaccaccctgacatccagccctacccaagtccttgcaagtttcagctgcatcctcactttggctagccagacccctgcattctgagggggaggaaaccacttctttgggggtgaacacctgttggtgacttttggaaggggttgctctagttcttagggctgtctgaagtcccgttgctttttctcttcttcctatctcaattgctgataccccaagggtctcagggctgtggcccatttatttctacctatacctgtttggggatttagggttacactctgtcatctagttttgttccagatgttgtccatgagttttggctgggctatcaactgctctgcttgacaattccgaatattaaattatgttttcactgccacttttagtattctgtttgctattgttaaagttgaaaacgaattttgggcaggtgtattagcttgctagggttgctgtaacaaagtactacaaattggatagtttacaatggcagagatgtattctctcacagctctggaggccagaagttccagatcaaaacgtgacaggcccatgcttccccagaaggccctaggggagaatccatccttgcctcttcagcttctggtgcgcttctagctgtcctgggcttggcatgttgctcttaatcactccaatctctgcctccgtcttatgtcacctgcccccttttctccctgtatcttctcttctgtctcttataagggcacttgtcattgggtttagggtctgggtacctggataatccagatgcttttatctcaagatccttaacttaattacatctacaaagaccattttccaaagaaagtcacatccccaggttctggagattaagatgtggatatatctttttggtgctaccattatacccactacagtgggagagagtgaaatcttctgatttttaaatggcaactgatttacacttttaaaaagtctgtgcagggactgggtgcggtggtccacgcctgtaatcccagcacttcgggaggctgtggcaggtggattgcttgagctcaggagtttgagaccagcctgggcaatatggtgaaaccccatcgctaccaaaaatgtacaaaaattagttggacatgggccgggcgcggcggatcacaaggtcaggagattgagaccatcttggctaacacagtgaaaccccgtctctactacaaatacaaaaaaaaaaaaaaaaagccgggcgtggtggcgggcgcctgtagtcctagctactcgggaggctgaggcaggagaatggtgtgaacctggaaggcggagcttgcagtgagccaggatcacaccactgcactccagcctgggctacagagccagactctgtctcaaaataaaataaaataaaataaaataataaataaataaaaaaaaacaaataaataaaaattagttgggcatggtggttcgcacctgtagtcccagctacttgggaggctgaagcaagaggatcacttaagcccaggaagcagaggttgcattgagccgagattgcgccaatgcacttcaacctgggcgacagagggagatcctgtctcaaaaaataaaaaaagtctgtgcaggccagaataagtcatatctgtccactttggcctctaaacttcccgtttgtagccttcattcagtggccttgggaacacagttctaagtcactagagatagactctttatgcatagtgaaaaaatccttaacttcccagttctagtttcggcactacttagtttatggcagaaattctaatgtaattttcttggcaaatcacactgcaatcagctgtgactctttgtttttttcttttacctctgttcaggtcacagagatgtttcattttgatatttttcycctcacaggagccagccttcagagggctggtgggaaagtaaagagtaattcctcttgtcatatcttggttctttgttttacatttattagggaatgcctgctttgtagatagaactagagaagaaaaaattgcatttaccccttattctaagtattgtaatgttggatgttcttgaagatcctggcttcaagtgaacctgcggaggttaatgtactttacctgggaacactgattgcacttttgggagtaggacactgggcaggatgggagacaggaggattggcttctgcgaccatgggggtggggtggggagaccgacaagccagcaggttgtcccatatggaatcgttgtccagtttctaccatttagagctatgttactgaggattactgttggatatttttttccagttataaaagcagcacatcctttttgtaaaacatggggaaaaaaaagcttgtcatttatattactcatcagcagtggacaggtatcccctttctagtaccatgtgtcctcattaatttatttaacctgaagtggaatctcatttgttgtacttgaatttatttgcatttctttaatttctgcttagggtgaatattttgttatgctgtctctaggctgaatatgtctacatccttggcgcagctatttgtggtcggcttttgtgttcttaccgtcgtgtaatctggtggtctgcgttgcctttccttgcagggtggagaatgtttatcgctcatgtcatgacaagggataagtgacactgacaactttgttcaggttttttaatttttatttatttatttatttatttatttatttatttacttatttatttatttttaagctcagtcctcaaactgtgcctcattggccttccttctgaacgtttctttctgaccatcttgccttcttccccttgttctccagctgatggtgagaccattctaaaaggcctccagtccattttccaggagcaggggatggcggagtcggtgcacacctggcaggaccatggctatttagcaacctacacaaacaagaacggcaggtgagcagtctccagtgctgttcttcatayctggtcacttatgagcagagagggtgacagagtggaggatgggggtggcatccggcatttttttttctcctttgacatmttttaggatgggaatggaacttggtgcttctcaaccgtagctgcacatcagaatctcctggtagcgttactgaccacaggttcttaagctctcatgtatatagagattgacaggaggccaaacatgtttcccagacaagttttttgttaagactgatgcccagagtgggcataagggaggcagcccaggaaaagttttgtggcttactcccccaagggcagctgcaggtgatgttttgaagggagtgacgtgaatagttcatgaggtagatgagtgtcattacaggtacgcacccagggagtggtgtgcagactcagtgaggcctcctgctaatgtatacaccctgaagtggctggtgagccccgctcttggcggggactttagcgtaatagtaagacgggcaggatcgctcactgggctyctgcaagcggtaggtcaactccctggagtaaaaagtttatggtagaactcagcctcttaagtccctggagtaagatttaccataggaagctgcttatcttagtgttttccaggtctctggtcagcagagatgatatcggaggggctggggtccagatggatgggttggttggggtgcccaccacctgtggggacccactagtttgcagcagaggcccgtagggggcatgccgaggccttctcgctgcaggatgctgagctgcagatgcccttgctcagctcgaagtagggtgggtgcaggctgaggttgcctgctctaggatggccagcagcagtgctgcagggccccaggggcagcccgaacagagcctcaagcagcgctttgccatcttcctggctcctagagcctggtatttctgtaagtaagtgtgttattacggttgsggggagcccaggtcccttctctactctgtttctggagagctttcacgaaacactcgtgcatttcccccagaaattgaggtcacagggcctggacatctggatttctccaaagccccagtggttctatgtggccaggaccaagaacccctggtggcataagcagtttgaaaaggcaggcaatgatctcctgggcccctaccgtaagagttcttgaagcaataagtggatctgcggcagggcccagattccatttccaggaagctcccgggggatgctgatgctgctggacagctgaccacacttggagtagcactgttatgactgatgatcagctaccgcagaccatggtaaaatgcagaagaaaacctaaactaagaaatgactgataacaagaaaccagtgcgttgagctcttggtatttccttaaatcttggtttgtattatatctggactggcttagtatgtaaaactactaattaagattcttagtaatttgcactattaatttagaaatgtaatagggtgcagtatgtactgctcaggtgatgagtgcaccaaaatctcacgaatcagcactaaagaatttactcatgtaaccaaacaacacccgttccccaataacctatggaaataaaaattaaaataaataaaaatgtgaactccaggatggggtattttcgatggcttttattctgttacctcagtgggtacccagtactggaattccacgtggcttccttaatgtcccactttttctctctttgtttctctattaaaggaaaaagtacccacctccatgatattccagagacctagagatgagggaaacctgtactttttgagctcactgccccttccactattctctctataagtctccatggccaacccctgtggcattaattggtgttctctatcctgatacctctcaaagacatcctaaccccttcttccccaagcccaggcttgtatttctaactgtgtagcaaacctccctgtgtgtttagtcgatacctcaaatgtatctaagatgatgatttcttcctcatatgaacaccaccaccaaaccctcctctcccctgtgtccttttcttccctgctgtgacccagttgatggatggtctcttggaagcagaggctgtagctgtcctagagccctctggctcctgcaggattacactgagcccctccctgtacctgccgcctctcactgtttttactgtggtccatcttttggggactacagcaaattggaactcatcatccaccgcctccggtggcaggctcctcagccagcaccaggtgaaaagttgcacttcttatctcctaaaggcctttgctgctgggccctgcctacctctgtatgacagttattgaagtttctaccataggcaccaattccagttgtacaggagacttagaattcttcccagaaggggtttttgagtgacaagagctgttcggaaactgcttcgaaaagcaataaacaaaaacaaaaaccccaaatgaactgcttagggttttcgttgttgttgttgtttttgagaccgaatcttgctctgttgcccaggctggagtgcagtggcacaatcttggcttactgcaacctctgcctcccgggttcaaacagttctccacctcagccttccaagtggctggaattacaggcactcacyaccacatccagataattttgtgtttttaatagagacgtggtttcaccacgttgcccaggctggtctcgaactcctggctcaagccatccacctgcctcggcctcccaaagtgttgggattacaggcatgagccaccgcgcctggccagcttagtttttaagagttttctacctggtctccttcctctctcacttggtcaactggtacccaccccgaggtgcctgtcctgaaacctcacctctcctacccatgcatgggcttggggaaaggacctgagccaccttttattcaggttctctattccctgcccccggaccccaggcacactttcccccctctatttctggttttatccctagtagcaccttaatccttgacactgccttctagcattctctgtgttcatgctagaaccacccaagtggataaaggggaccttacttctctattgttccttccccctctcctctctgctgctggtgaaggagggaaaggaaagatgatcctctcattctggtgtagaagagtttgtggactctggggaagaacttgatttctgaggtcacttaagggctgaaggtgaaaaattaactagttttgttttattttaaattttttatagagacagggtctcactctgtcgcccaggctggagtgcagtggtgcgatcatggctcacttaggccttgacctcccgggcttaaggaatcctcctgcctcatcctcccaagtagctgggactacaggcgtgtgccaccatgcttagcttattatttttagtttttttttttttttttttaatccaagcacactgtctgtattctctgaacagaattgatcttctaatttagtatttttcaaacatttctttacctataatttgtagtaggaggtaatcataaccctggaaataacacatctgtgtaaatgcaaaacaaatacatgcataggccgggcatggtggctcacgcctgtagtctcaacactttgggaggccaaggcaggtggatcacctgaggtcaggagttcaagacccacctggccaacatggtgaaaccccgtctctactaaaaatacaaaattagccaggtgtggtgggacacgcctgtggtcccagctactcgggaggctgagacaggagaatcgcttgaacccaggaggtggaggctgcagtgagccgagatcatgtcactgcactccagcctgggcaagacagagtgcgactccatctcagaaaaaaaaaaaccaacatgcatataactaaaacaraagtttcatcaaatacatcttggtgcatgtgatacactcaaatatgtttatttcattaagaaaaagggctggtcagaaaattttgtgtaaaggttgctgtcacatttttaaaaatctttaaaaatgtaaaccattcttaacttagcttgcaggctttacaaaaacatactgtgggatggattaggtttgcaggcagttggcctggattttccagagtgcctactaaattaatttacctaccaccagcctgcagttaggaaaaaatggctctggtttgaactctgaatgttaatgagaaaaaccagtttacccttctccacactcccttcctcttaaggcagtagttactaaacctggcaaaattacctagagaacctttttaaaaaccagattcacagaactgctactgaatcactttctgggcccaagaaccagttttgaaaaccttaatatttggtaatgccctctaaaccttccacaaatgattggtagtttctccccgcaagacgcagccctagtaagaaagcaaaaagcttaactgtatacttttggggaaataaagagcagtggtcttttaattgggtgacatctctctctctctctcttttttttttaatgccccgatacaattcttaagcttaaaattatattttcctttgtagctttgccaatttgagaatttacccacatggattggtgttgctggaccttcagagttatgatggtgatgcgcaaggcaaagaagagatcgacagtgtcggtttttcactttcatttactcagtgtttaaggatcatagtatctgcttagcttagtgttaaaataatgttctcttcattgcttactttccagttaattttaaactttcctccctccacataagtgattttagaatagaagtagttgtttagttgtttttaggaacctgggtgtcagcgttcccttttaactgccttagtatgagtaatcttattttccactggagggaatagaaaacctttaaccaggattttatagctgcagtaccctttagccttcctcttccgtgttactttgttgctaacttacgctaaggttaggtcagcaacatgaagggatagttggtatgggagagtggaattgggccaggcgtctacaggctgctagagggtaggaggagggacaggtcaatcttgcacagctctgtcaacatggcctcagtcgttgggtctgtaatttagttcttccatgcagcttattctacaagcccattgatttttcttttaattgtagattttgaacaaagtagaggaaagaatgaaagaattgagtcaggacagtactgggcgggtgaaacggtaagtccactcttgaatgtccttttatatttaatcgattgaaacaatcatagttggctgggcgcggtagctcacacctgtaatcccagcaatttaggaggccgaggcaggcggatcacttgaagtcaggagtttgagaccagcctggccraygtggcaaaacaccgtctctacyaaaaatacaaaaattagctggacgtggtagtgcatgcctgtaattccagctacttgaaaggctgacgcatgcgaatggcctgaaccgaggaggcaggaagcagaggttgcagtgagctgagatcatcgcaccgctgcactcctgcctgggtgacacaatgagactgtctcaaaaaaaaaaaaaaaaaaaaaaaattcagaatggcagtgtggtccccagtagtgtctgcttaagatgtggaaaagatcaaactcagcacctccttctggcaacatggtgaactgaactactgggcccctcacaccaaaacaagacagtgtatgaacattcatgtgcatggatgcacacacacaaatgctaggtaaaatgaaactaaggcagaaaggggatatggaccaactccaaggagttggaactgcctaaagtggagacccaggtagagctgccacctcatcaaagggagctagaaaactcctgacttcagttcgagaccagcctgaccaacatgggtgaaaccccgtctctactaaaaatagaaaaagtagccaggcgtggtggtacgtgcttgtaatcccagcttctcaggaggctgaggcaggagaatagcttgaacccgggaagcggaggttgcagtgagctgagatcgcaccactgcgctccatcctgggcaacagagtgaaactcgcctcaaaacaaaacaaaacaaatacctgacttcaacctttccaggaaagagaaaaggtcactttttctccttcaggctctaggccccagagtgaagttaagcaattttaagagacttccgacagggtggggtgataagaaaatttgcctcaaggcgttcaaagaagaaaactttccaagatactaagaattgataggccaccaactttaagctgccataggcaggttattttcaagtgatcatgaggaaaatgaagctctccctatccagtgggatgggcactagccccacatggctatttaaagttaattaaaatacacaattcagttccttagtcacaatagctagtggttagtgtctgccatgtgggacagtacaactacggaacattttcatcatccaaatttctatcggacactgccgaagtgtttgccagtggtgtcasattttaaaagaatgcaattcggacatcgtgggaaggaactagtgtctggtacatcatgggaattaagaagtgctttggatacacagcatgcaaatgcaggacaatttactcttgccctgccttggtggatcctcatcaggccttaaggcatagaaggcctgtcccttgctcataaaattaacctcagttgcagagaccaacacagagggacttcctcattgctgagcaacggaaatacaggtttctccagttcatggcactttccagaagaaggaatccttattggcaagtgttaggatgtttaagtacttaattactcagcatgctaagtttgatcagcccacaagaaagctccagagcagatgtaagataactaggtaattgtttaaccttctgtagttaaagaggaaagcaggaaactgaaagtgaaaagaagacgccacagtatagaactatttttttgagatctgtwagagcactcaggctcktttggagcacccaagctcagtttagggtccccagccatgtctcttacccttcaccttcctttaaaaacacatccacacccatatacccataccactttttggacawttcatcttttcctgttggcagggttttccttatctgcacccatttggaatgaacaggttccccactgtcagaaagggtcttaactttatgataatgaattggtccacatcaaaatgtggtctgatttttatcagttgcctctaggagtgagtaaacagcatacatttatgggcttcagcattcatgagaagtctggttcttttccttttttggtataggagttttctaagagtggagttaagctttagatcttcaaaataccttgcttatgcttgtcacagtttttattatcttttcatgaaataaggttgacgacagctagaaattgggtataccttgttgtaaaccctttgttactggcctcaaaaggacaaggattgctatcctttttttttttttttttttaaatctggagaataaagatcagaggttaaatgttagagattaaatcattaacaaataacccagtaacattatctgaaattattcccctttgataagttaagtctgaattttcgactaagaagctatgggatgtacttgaatttatttttgttttctactttcaagtgaaaaaacaagaaaacaaggtcacataaattaactttgattttaaaaggttcttgcaatttacacagtatacctaaggcctgggctataatctacctgaattggtgtagtccagtttcatttttcagcagtgaaggttgaaacgagtttggtagggtgctctacagtacctcctggtagcccgttatagggctaccagcgagatgccctttaatgctaggttgagcacttcatcagggtaatggcatttacatcctgttaagatccttctttctttgctagtctttaaaaaaaccatagagttacaatgtaggaaagagctcttcaccttagccaaggcactattgacacaattgagaacaggcactgtttagtttcagtgggtttgcctgtagtgcagtaattgccgataggtggctggctgtcaaggagagggtagtcttcctcccctggaagtgagtgactttgtcgttcatccaatgccatgggtggctcactctcacctcactccccaccatcagccaggggtggaagaggcttcctccaagtcctgttcgcctgctctctagcagttgtcctgattggtgcttcacattttacaatttacaagaaaaaccctctagaatgcctcacattctgaaagctgaatttgttcacatggaaggtgaagaagtggttaaatgaagagttgtcaggatgacatgaatttatgggagtttgccttttcaatctcggtgttctttatagatgttagtattccctcatagaaagccttgttaacttgtaacaggtttagactgtactcttggaagctggtgagcagggaagggaaagagactcataagagtacgtcaggccgcatatcccagcattttacatgtctacagctgtacatcatggcgttttaatgttgaacactactgtgtttgagaacacatgactcacgcagttgtgttatgtatgcagtgagctctcgttttctttgtgtttgggttagacttgccaagccccttttccaggtcttttttttcctgtcatttagtgtcctctgctggtaccttctagtacattcatcctgtgaaaaataccgggtatttacaaaagaatgaatgaaaaaatcatcattttgcagcctctgtagtagtaactggttcaggccagaatcttctgcatgctaaaaccactggtaaaggtttgttggggggtgaggacttctacctagtttcagagcaccaccccacagcctgcttagtaatttcagagggtgaaaaaggtacctttgcaaatggagagagcccatgaataccactttaaccaagtgatcacagacttagcatcaccaataataggacagatacacatcttgtgttcccgatgtgatgcctgtgtaatatatgtcaacctgattctaaccatgaagagtgagagattatcaggtaaacccacgagtcatttttcagcagaatagctggtctgtacttggagatatcagtgtcatgaaacataccagtaaaaaaaaaattatacgttacatgaggataaaaaagaaaaaaaaaacagggaaatgcagtgtatgagcctttattcaagagcagaacatctataaaggatataactggggacacttgaagatggactctgtactagataaccatatcatacccatgtgaactggtgtaaatgtggtaatgtccatgtagttatgtagatagtcttaagagacagatgctgctggagcatttgaaatatgaagtgtgcagtggccatcttctccttcagctttttgttagagaaaatctaaagcatgacaggattttttaaaaagtgaactgtgtacaatagttgtcaacatttggtggtggccgtgattatataaaactaaaagcccaagctttggattcgttttgtgcttgtcaaaagtcggcagtcatgtggctttcttttgcacactcttcatcctagctccacttgtaaggcagtgttctagtaaggtacatttctgtttttctctttttccagattaccacccatagtgcgaggaggagccatcgacagatactggcccaccgccgacgggcgcctggttgaatatgacatagatgaagtggtatatgacgaagattcaccttatcaaaatataaaaattctacactcgaagcagtttggaaatattctcatccttagtggggatgttagtaagtattccatccctgccccgatcacgtaacaaagtggtgatgtgttgaatgatggtgttttcctgacaattactactgtcgtggatttgtttgagtttgtttttgacactgctggtttttgagatgcacatttatgtcatattaacctgtggattgtctgggctttcacataaactttgtcttgacattgcttccttagtgatgagtatttggattgtatttcaaaagaaaatgcatttgcatatttaaaaaaaaaaacctttttgttacagaacaattcaaacctaagtagacaaactagtgtgatgaacccacatgtacttaccatcgagtgtgaacaattaccacctcctagccagtcttattttacctaaaccccagtccactttgtccctctcatattattttgaagcagctcacagacatcatattatttcatttgtaaagatgtaattgcttttagttattcggtatattgacacatttttaaggctggattttcttcccactgactaatgtccatttgtattaggtgtcagatgatcagggttgatgaaaaagtcctcaatggaaaaaaagcttgcaaattgttcacagttttaaaaaattgaaaatgaaaaatttacattttggtctagatcccagctcttcagtgtggtggggccaggtggtttgtgtgttaaggtagactcaccatttggatctgtttctcctccctagatttggcagagagtgatttggcatatacccgggccatcatgggcagtggcaaagaagattacactggcaaagatgtactcattctgggaggtggagacggaggcatattgtgtgaaatagtcaaactaaaaccaaagatggtcactatggtagagatatcctttgttgtataagagaacaagttcagtgggcttcttttgtttccttccttcagtgtctcacaactcaaattaatgttaccacagactagaggcaaatgtgttacctagactgccttgaacagacaatttagtaacagtacccttttatgtggccatcaacaaagaaataatcagctgggcacagtggctcatgcctgtaatcctagcactttgggaggccgaggcgggtggatcacctgaggtcaggagttcaagaccagcctgatcgacatggcgaaaccctacctctactaaaattacaaaaattagccaggcatggtggcgggcacctgtaatcccagctactcgggaggctgagacaggagaattgcttgaaccctaggtggcagaggttgcagtaagccaagattgcgcaacttcactccagcctgggtgacagtaagactctgtctcaaaaacaaacaaataatctacctagttgaggattaaagagcaaaggactttgatactgtgtctgctgcctagcagtttccaaaatggcttctctaaagccatctcatgaggagaaaagaagattaagttccttttgagtgtccttagtgtgaaaataaagtcactgcctcattcatcattttgttaaatttgtgatacccaagttagtattataaaacctttgtttgtcttaatcctttctttaaagtattactatttcagaattctttgatatacccaaattctccttaacctgttgcggacattgaccaaatggtgattgatgggtgtaagaaatacatgcgaaaaacgtgtggcgatgtcttagacaatcttaaaggagactgctatcaggtaattgttttctggataatgtagttttaagtgaactaataatataagttattgatcagaattgtgccttattaaaacagcttttagtatagttggttgagaagataaatacatcatctgtctcttcatatgagttatatgtatatttgtatttagggtgcacacgtaccaatgatgggaaagcaccaactccagattctctgaattaaataaaattaattcttttttttttttattatactttcagttctacggtacatgtgcagaatgtacaggtttgttacataggtatacacgtgccatggtggtttgctgcacctatgaacccatcatctaggttttaagccctgcatgcgttaggtatttctcctaatgctatccttcccctagccccctacccccgatcggccccggtgtgtgatgttcccctccctgtgtccatgtgttctcattgttcagcttacacttaggagtgagaacatgcggtgtttggttttctgttcttgtgttagtttgctgagaatgatggtttccagcttcatccatgtccctgcagaggacatgaactcattcttttttatggctgcatagtattccatggcatatatgtgccacattttctttatccagcctatccttaatgggcatttgggttggttccaagtctttgctattgtgaatagtgccgcaataaatatacgtgtgcatgtgtctttatagtagaatgacttataatcctttgtatgtatacccagtaatgtgatcgctgggtcaaatggtatttctagtcctagatccttgaggaatcgctacgctgtcttctacaatggttgaactaatttacactcccaccaacagtataaaagtgttcctatttctcctcatcctctccagcatctgttgcttcctgactttttaatgatggccattctaactccagcttgggctgcagagcgagaatgtctcaaaaaaaaaaaaaaatcttaataaaaaaaaaaaccttaataataataataaaaaagaaaccttagtagtaaaaatcaagtagtacacaaagctaaagattgcttttacatatgtacaaaatttccaagtaaaataataagctaaatctggcaaattaagtctatattatgctcaagtaggatttagttagaagtgtaaagatttcaattttaagaaatctgtcaacttaattcgttaggtgaataatttaaaggaggaaaataacagatgacaaagaatttgagaatatttagcagtcattttaaataaaaactaatgcagtatagccatgtaaaattagccaggtgtggcggcgtgtgcctgtaattccagctacatggaaggctgaggcaggagaatcgcttgaacccggaaggtggaggttgcagtgagctgagattgcaccactgcactccagcctgggcaacagagggagactgtctccaaaaaaaaaaaaaaaaaaatataatatatatatatatatatatatatttccatctaacaaatctgtacatgtacttcctgaatctaaaataaaagttaaattataaattacttgaataaaataaaattgcaatagagatgaaactacctgaacgttaatagaaacttaggttgtggtaaatagaaaaatagaaaatataatagatagcaaaagccatttccactgaaaataggaagaagatgaggatgcctattatctttttcaacattattttttgaggtagctgagatagtaaagtagatgaaaacagtataaatctaattatttgtagatgatgtgaatactagaaaatccaggaaacttacgtaggaaattatttgaattaatgagaatttgataaagtgattggataaagccagcctagattttttctctatactaaatgctaactcatttaaataggatttccttcccacccatttcctttcaaagtaatcaagtgttaaattcctaggaatatatttaacaagaatggtattgtgagactggtatgaattatgttaagatgttattgaaagacatcaaagtctgaatatgtggagaggcatgctgtatttcttgtattgaaagaacaggccgggcttggtggctcacctgtaatcccagcactttgggaggccgaggtgggtggatcacttgaagtcaggagttggagaacagcctggtcaacatggtgaaatcctgtctctactaaaaatacaaaaattagcccgacgtggtggtgggtgcttataatccagctactctggaggctgaggcaggagaattgcttgaacccgggaggtggaggttgcagtgagccaagattgcaccactgcactccagcctgggtggcagagcaagactccgtctcaaaaaaaaaaaaggaacaatgtctattcttcccaatttattatgagtaatcccaaggaggggggaggggtttaaaagtagaccaactgattttgaagttgatttgtaaaaataagtatctaagaatacccaagaaaacttgaaaaaagaatcagtgtgtgaagcgaaatatgtcctatttgttgttaatgtactataaggcacgataatcaaataggaagtatgaaaggaatacacaaggacctaggaatgtcaaaggaacttgaacaggtctgagtatgtattcctacacactgctaatatggtctaagatacatttcagttgacttgggaaaagcgttagttgagttagtgtgtgatgccggtataagaagttatccatctgcatgagaaccaagttagctaacaatagaaataggaattttggtgacttaggctctaaatgtaaaaactaatacatttaagacaatttagagtacttaaccttggagttcagaaatctcttaaagataggacactcaaactgttaatggtattataatgttgtcattaccaagccaaaagtcagactagaagaaagactagtaacaagcatgacagggaattgatcccttgaataatgcagagtccctacaacttagaaatgaagttagctaaatttaaaaaggtatagaggatatttactggtacttctcagaataagtcaaataacctgtaaaaagtaccacaagacaggccgggcgcggtggctcacacctgtaatcccagcactttgggaggctgaggtgggcggatcacgaggtcaggagatcgagaccatcctggctaacatagtgaaaccccgtctccactaaaaaaatacaaaaaaaaattagctgggcgtggtggcgggcacctgtagtctcagctactcgggaggctgaggcaggagaatggcgtgaacccgggaggcagagcttgcagtgagcccagatcgcatcactgcactccagcctgggcgacagagcaagacttgtctcaaaaaaaaaaaaaaaaaaaagtaccacaagacggtcaaccctgttggtggcccaggaagttcttgtgaaaacattagcaacagacttcacaaaatttagtagaggggcaatatctcatgctggggaggttgtggggagacaggtgctcatatgcattgctggttggcgtgtgaattgctatcaaaaccggaacacacggcttctagccggtgtttgagcacacagcccacagttaaaaaggtgtcactacaaggttttattatagctgtgcttgtagtgaccaaggcttggcaatgacaacagaaagaatgtttttagtggaatggtgtattttttaaaatgtgtgttattacctggagagatgttgggtgaaatgttcaagttccaaatgatgtgtgggattcaaattttacaaaagagaacatacatttgtgtttgtgtgcaagtattcgtaagaatctgtgtgaacgtatggaaaaaatatgagcatatcaaacaggattaatacatggattgaaagcaacggtggtgttagtacctcctatatttttccatagttggacttgtatgatgcattgaggcaagttataaaacaataggacagaaaagtcccagtttcttaaaattataactgtgaggctataagaagaatgatgagaaataacatgggataggttatcttagggaattgtggtgaactttttttaattttttttgagtcaaggtcttgctctgtcactcaggctggagcacagtggtgcgcgatgatcatggctcactacagcctcaaactcccgggctcaagcgatcctcccacctcaacttcctgagtagccgggactacaggcagataccactaggcccagctgatttttcttttttttctagagacgggctttcaccatgtcgcccaggctgctctagtactcctgggctccattgttccgcccacctcaacttcccaaagtactgggattacaggtgttgggccactgaccccagcctggcaaactcttaaactcttggtttctgactattatatttaatttttcttttacttaatgtatttttttttttgaattagaaaactaaaagatgacagtaactcctgtttagttcaggatgttgcttagatccagatgtgtccccagcatagagcctcagtacttcaaagatacagccaacctcaaacttcttttctgtgttaactatatatgatctgtatgggaattccagctggtctctttattgactctgatggtgggagctgttatatatagctttattagcagtagcccaagcgttagagaaaattgagaaataacatgttaatagtttgagtaaggtgcaaaagtgaatccataaacaatgaagtcattcagtgcttagtataaaagaaaaattaggctgggtacggtggctcatgcctctaatcccagcactatgagagtctgaggtgggcagattgcttgagcycaggagttcaagaccagcctgggcaacgtagtgagaccctgtctctagaaaaactttttaaaaatagtttattaattaaaaaaataaaaattaaaagaagatgatacagatagtgataggagaggcagtatagattagagatgaaagtatgaagttggctttcagatagtaataggtatacttcgtggatctatgggcaagctggataacacctcaagtttgtttctgcattggtaaaatgggatgataatagtgcctctaggattgttgttttattgaaatgagaaggcatataaagcatatatggtaagcacttaatttttgctgttaacagacatagatgaaagttttttggttcctgtagcagttgctgtggatagctgtggatataagcccatacttggcgcttttttcctccttcctttactattgttttttgtttaactacatccacatgttggctcactcatctattcctgttctttctggaaggttctaatagaagactgtatcccggtactgaagaggtacgccaaagaagggagagaatttgattatgtgattaatgatttgacagctgttccaatctccacgtctccagaagaaggtagatttttttaaccaagatatttatgatggaaatgtttctcttggcaccatgtgagggtgaaaggatcctagagattgtgtagttctctcacgtttttgaaaaagggagttaaattgaggtccatggtggaaagatgactggatttggcttcaattcctgttctgccactcartgagtgaactaattcagtcatttgaaacaaaaatgaagtaaaatgactcattacattaatgagacagtaaatcatttgacaatttatttaaattatgtgattttcaacctgtattggtacaaactggtcacttatctaagcaacracatagataattccctttctcaaaccagatgtttgttccaaatcacagctagttcgtgtttttttctataaactcaagttcctgctgagtttgcaggctctgaatttctctcaggattttgctgcttgcccccttatttaaagcagttttctttcacgtttcagccactgcctttgtgtcaaatctattggtattttgagagcgagcagtgctaggtggatgtgattttggcatccaaaatcaatttcattatcgttcatgaacaagctctttgaatagtgggtcttacactcgtggctctttttctttttcctcttttggtattgagtattcgaatattttacttcagatgttgtggatacatacaaacccayatttatgaaacttgttcttttaaacattcagattccacatgggagtttctcagactgattcttgacctctcaatgaaagtgttgaaacaggatgggaaatattttacacaggtaggctacttaacagttttttccctcaaaacgctctaagactttcctgttttgaaatctgaatgcacatttttgaaatgtatatctattaaggatagagcggcatcatcggattatgttctttcaaacagtaagcttctacgttgacctgttgtctgttgggaattaatgagttatcagccctggtctttcgctgtagtatgagctgctgccaccagatggagacacagactgattttcttttttcccctcccctcatcaacatacacttgatgacaaagctctggctgtactgtgaactcctgccaccagatggaagcagattgtggtgtttttctcattctctaggggattctaaacttaaactttaaagattacattaattggggttaaaaatatacatatatatctcctattgaaatccttaacaaaattttgaaaatgacagcaaagacagctaattgataatccagtctcttggtacaaaattccttgatgcataaacataagataagcacttatgtagcattgcactctggatctctgaattattctgagtttacaggaaaatcccctccgccattttttaaaaaaagtactgccagcctggacaacatagtaagactccatttctacaaaaagtttaaaaaattagctgggtatggtggtgcatgcctgtagtcctaactctggaggctgaggtgggaggattgtttgagcctgggaggttgaagctgtagtgagctgtgatcgtgccactgccctccagcctgggtgacagagtgagaccttgactcaaaaataaacacagtattagtatactgtatttaaaagtcaggaasaggccaggtgtggtggcttacgcctgtaatcctagcactttgggaggccgaggcagttggattatctgaggtcaggagttcgagaccagcctggccaacatggtgaaatcccgtctctactaaaaatacaaaaattagccaggcatggtggcagcagcctgtaatcccagctactcaggaggctgaggcaggaaattgcttgaacctgggaggcagaggttgcagtgagccgagattgcaccactgtactccagcctgggccatagagcaagactacatctcaaaaaaaaaaaaaaaaaaaaaaaaaaaagtcaggaacaggtagaggttttcactttaaccttctgaggaggtgtctgccagcagaccctatcctggacattttatggaatctgagattactaatgctgaaaacaacttagcatttctgagagacatcttgattcaggctccagcctatcctgttgttcccctcttccctctgcgtgcaagacctgcaagcacattgtgcttaatcttggactttgcgcttggcaaaattgttcagaggctttgaggacagcaaagcactatcaatgaatggagtgtctctgccccccacaacatttagaaatgatttttacagacatgctgtagatggatataactatttaaagcaggagtctgcaaacattgggccaaatctggcctcctgcttgcatgtttgtaaagttttcttggcatgcagacacgcccatttattacatagtgtctgtggctgcttttgtactgagtagttgtggtagatactgtatgatctgcacagcctaaaatattttctatcagaccctttacagagaaagtttgctgatccctgtcttataggaaaccagtgaaacctgctcaaatgaagctttcttattgtaaagaagcaagttggacttatgatggttttttttttttttttttgagatggagttgcgctcttgtttcccaggctggagtgcaatggcgcgatctcagctcaccgcaacctccacctcctgggttcaagcgattctcctgcctcagcctcctgagtagctgggattataggcatgtgccaccacgcccggctgattttttgtatttttagtagagatggagtttctctatgttggtcaggctggtctcgaactcccaacctcaggtgatacgcccccctcggcctcccaaagtgctgggattacaggcgcgagccactgcgcccagccatgatgggtactttttaagcagagcatatggaaattttttcttttcatttttttgaggtaagttcttggtctgtagcttaggctggagtgcagtggcacagtggcactcattgcagcctcaacctcccagactgaagtgatcatcctgctttgccctcccaaagtgctgggatttcaggcatccattgccatgcctggctaatttttgtagagatgaggtctcactatgttgcccaggttggccttaaactcctagattcgagtaatcctcctccatcagcctcctgaagtgttgagattactgccatgagtgaccgtgcccaggcagaattttttcttttaggtttctgcaaatacataaaaggaaatctcaagcagcttaaattaatcaaggaaaaatgtgaggctctgggatcttgaacaaaaagagactgaaaaaaatttggatccactacaaactagtcagtctgtagtacaaaaggcaggacaaaagaagacagccacactaagtccacctgttgtctactacagccgagtggctgttcttcttttgttctgaatattggcatggcaggctgcctcctatggagagctgttatcttagtatgaaaggctaatagaatacttgcttagaatactaccacagcccatttgtgaatattaatgacccaggctttgatatcttgcctttgccaatagactttttaccaaaatcaaaaggattgtatgcccagggctgtcttggtttctaagaattgtccaaaagacatatgacatgttttctgtccccatgttcattacagttggaaccacaaaacagtctcattatgtaacacctggggttcattcagtacatttggtgattgacactgtcacatggtaagatttatgtggaccggcatgtatagccctttcaagaagtagtaattaagtcaaaaagcaagtgatttgactcaggatgtgttgatgtagttgccacagtgcagttttttttttaactgccaggtgacacgcttaggaggtaacccagattcttggcatgcccacccgctttgcccaagtgtgcagcttagaactggagtcaggttggctgggtgcggtggctcacgcctgtaatcccagcactttgggaggccgaggcaggaggatcacgagatcaggagataaagatcatcctggctaacgtggtgaaaccccgtctctactaaaaatacaaaaaattagccgggcgcggtggcagacgcctgtagtcccagctactcgggaggctgaggcaggagaatggcgtgaacccaggaggcggagcttgcagtgagccgagatcacgccactgcagtccagcctgggcaagagggagactctgtctcaaaaaaaaaaaaaaaaaaggagtcaggttaagggtgggatgaaaatgttgtgttttacaaaagctaaatgttcccacccaaaactgctagctgtgagttcgtgatgtcattggttttactgtggctgcctgaaggcagccttgtcagcatcccaggaagctggggaatgcatcgtggagggacgtgggaatcaaagtgggccaatagaatttgaattggggaggaagtgttttcatggaacctaggaggcggatcctgggacttgaccttcctctcttgtctccccacagccccatttaaaaaaaactgtaagttatatttctctctcctttctgcttgccttctagaagcaacccatctttggtctcacttttttccatttctgcattttatagatggttcttacatgtatgatttcctaaatcattatactatttaattttacttgcttttgaactggataaaagttgctaaggatgtattcttctgtacctgttactgaggtgtcatgtgcctgtaatcctaactactcaggaggattgcttgagcccaggagttcgaggacagcctgggcaacatagtgaagaccccacctctaaaataaacaaaagcaaatgtcacctgtccacacctaacatggggaaaagaactttctagaactgaagctatcgaatttggatttaatcccatagtgaagcctcaaaggggtaaagaaaccaatgactaataaaatctggactttgcaggattacgggtaaaaaaagaaacagcttgctgaaacactgaaactccctccacttaagagagaaaatcattggctaaaatctgttaaaaccaatatggccaattagaatttgcatagaacaagcttgctgatgtcacagcctaagtttccaccacttgcttcatgctaaccacttccccgccctcaagtttgcacacaagacccattagtgggcataaagaaataactatacacgcctgaggattttccagatctaccctttgctttccatccacgaatcaatcacctgcacatctcagaacctaccctttaaacttttttttgttgttgttgttgagacagagatggagtctcactctgtggcccaggctagagtacagtggcttgatcactgctcactgcaacctttgcctcccgggttcaagcacctctcctgcctcagccttccgagtagctgggattacaggtgtgagccaccacacctggctaatttttgtatttttagaagagatgggatttcaccatgttggccatgctgctctcgaactcctgacctgaagtgatctgcctgcctctgcctccaaagtgttagcattatagatgtgagccgccacacctggccccttaaaccttttctaataaaaggactgcccgtaagcccaacacagggagacatatttaagctggactcctgtctccttgttagttgacttacaataaaaagcttttcttargccaggcacggtggcttatgcctgtaatcccagcatttggggaggctaaggcgggaggattgcttgaggccaggagtttgaggctgcactgagctatgttcacagcgctgtacttcagcctgggcaacacagcaagaccctgtctctgaaaagaaattaaaataagctttgcttttcttaaaaccccagtgtcctaatattgacttcaagcacattgggcagtgagcccctttttcttcgatagtgccaggtgtgaccccaccccttgttccatcccttcttcttatccttaatgagtgcttaattctttgctattagatttttattctgcatctcccatttgtttctcttaaaaagaaaaaatgtcattccatttaaatagacaggaaagtgaaatgtatcatgttacttttttggggtaggtgtctatttgtggtgtgtgttttcttctttgaaacttcttgacaatgttgggaaagaacaaattgaaactttcctattttcttaccacagtctgtgtaaggaagtcttcccatataacctctataaagagagagtgtggtgtcaattttaagatggcaaagccatttactgtgcaccttggtggcattttcattctatagcttccccagtggtgatgtgttctaaaaacaactgggcagttttctatttgtgaatcttaaattacacgtgtggtgtttatatgctcttacggtgaacttgatgttgaaaccaaattacatgctggcgaagggcactttggccatggccatatcccactgcaggaccctagatgatgggttactaaacaggctgacactgaaggatgacgtcacgttgagtgaatgtgctaagttaaaaccaccaaggccagctctcagaatagttctaacctcttgcccgtgactagctggctggttggttttgaaagccattctcaggagttcttacatcacaggctgcctttatttgtaaataattttcatcttgcattatacttggctattttgaggcaaattaatagtaactttttttttttctgaattggagtttcgctcttgttgccccggctggagtgcagtggcgccatctcggctcactgcaacctccacctcctgggttcaagcggttcttctgcctcagcctcccgagtagctggggttacaggcgcatgccaccacgcctggctaacttttgtattttttagtagagacagggtttcaccatgttggccaggccggtctcaaactcatgacctcaggtgatccacctgcctcagcctcccaaagttctgggattacaggcctgagctagcatgcccagcgaacagtaattttcttaagaaacggaatcagccacctggattcagtagtcttgtgaataccaacttcagagattaaaaggaaataggcggtattaaataccactttcgttttctaaattcataatgaaaagcatttggggaaaattgtgctaagaggatgataaatgcttccctagacttaatccaaatctacattttaacaagatcccctatgatatcatatgtacattaaggtgtaagaagcattgctctagagttaggcaaatactgtatccattcagcagctctgctataccttggctggcatctcttgattatcttcaccttttttttccttgtggtcacaggatggctgctgcagctccaaatatcacatctaggtcatagcttagaagaaagttgaagaggccggtggctctttctttgttcagaatcaaaagcttttccagcagctaccagcagacttccagtatatctcattgactacccctagctgctggagatgctgaaaatggggtgactgggaagggagaaatgttagaataatgaagttaagagaaagtttttgataaggtgtgcaactaggggatatccctatcgtatatatcctgaataaacttttgttctcttatacacagattctaggaaaaaaatggggktgaatatagttctgtgtcaacattttagactcttaggagaattgtagtttaaaccattgtggaaatcaggaacactatatttttgatacttcatttgtaatataatggtgaccgttattgagaaaatttcctttgaatgagttatttgtatgaatctttgcaaattgcatggttttaattcagtgagtgtcactaataagaaattggtttcactgctttctatcatttcatattctaataatttgaaatggcttggtaaatgaggtagaaggataacgagctctaatgggtctataaatagaatgcagtgtgatttgtgaaaatacagaagccttatcttgtttttaaagatgaacttttatctaaagctagaattgttctcctttattaaagaccttcagatgagtggggcccttggaaggactcaagaatcccatttgcttatctctctttgatttaggggaactgtgtcaatctgacagaagcactgtcgctctatgaagaacagctggggcgcctgtattgtcctgtggaattttcmaaggagatcgtmtgtgtcccttcatacttggaattgtatcctttgaccgtgacattctgttgccagatcaaagcacccaagtaaatcatatgccaatgaaaaaatttaaatcacaataataaacaattagcttagccatagagtatataaagccctggttctccrgcttaggtgcacattggaatcccctgagaagctttaaataaaatctgagattctagacttccattctcaaaagttttggggtctggcttgccacagctttccaggtgcttttaatgatcaagcactactggtctaaagcattggttctcaaaggtgttgccagacctgcagcatcgctcaagaactagttagacatggacattctcaagccccaccccaacctgctgcccaatcagaggaattctggaggtgggggcccagtgacctgttctaccagccctcccagggatttatgtgcacctgaaaagtttgagaagccctagtctaaaataaccaccctacctgtggcaggtaaaatgtctaaagacactcattctactcttacattaaaataacctgacattaatactagtttctacacttgatgctaatttgcaacagaaatcgagaactagaatgatgttggggactgcacrgttaacattggtgttctctgttagttccgcttagtaaagttagtctagagaagtaaaacacagaaagaaaaaaggaaatgagcattatcattggaaatttgtgccgcaacacagctgtgggctgtagtctgcagatgacggcttccttatctgctgttgccaagtccaggttcctgtgacggcagggtttttttgctgtcaagggagcaactgctgctgacctccagtgaggcctggtcccatcaggctggggcagagcccgacggggcaaactgcctgctgagaccagatggccagcaagaggcaatgagaaccctctagatcctccatgtgaggaggggagtactccgcctgctgggtggccgtgtccctccacagcctgtacagagcttcagcatctcctaccaactgtccacctttgtttagggttcccctcagcatttttgtcaggcctgtgtttgcatgttgggagatttgagaaatcagttgataacatttgaggcaaagtcttccacctgctagttcttctctctccctccttccttccctctcctttcctcctctgaccttttttccctctcctcctccttccctctcctcctcctgccctctcttccctcccccttctctcccttgtatctcccgctaccctaactttccctccctccctcctttcccccttccttcctttccttctcatactaattccctaaaacttgtgagactttggaagcagtagtgttacctgagagaatatttgtgttcctttagccttctgttgtctactcagtacctccttcagacctcccaggtggtgaggatgtccccaggctgcagagtggccttattcaaagtccttcgttctcattcccacagtgctctaagccatgaagcttttcatccatctttcaatttgtaggccagcaaacgaattacaagtgatgtcttttcttccttgaattacctgcttttattccttgactccctgtccaggtgggtattttacactgtttggaagaaagctaaaccctgaagatcagtagcccctaatcacatgtgctgcaaatagccttcctgacctccatatgctgtacatgacatcaaaatgagtcaggcaattgattgtgaattccttaaagttttcctttttttaataattatttttaatttaaaaaagcaaatggaaaatgtatattttgatgagcttagggtgttttttttttgaaagtcagctgaaggatggttagacagcacagcgaagactgctaaatgcactgaccccccccattagaatgtgatttttgttcctttttatttctctgtgggcttttgtttttgtttttgttttggtagatcttcaatttggatatttggaggagtgaacatcgttgttttgctggagggaagatcttgatggtgtttctttccccaaaaattgacttagatattaaaatttggtgcttataagagagagttaaaaaaaaataggattgcttcaattaaaattacaaaagagacattttgtgtgttctgtcgttttatttcagcccagtcccctctttctgacttgtgatctcatagagcaacagtatctcctggtctgtttttagttctgtcactcgatgtcatttatctctttataataggatggccccggggccttttttgaacagtagtaatgacttcatttgccaccgtgctaaatgatacacaacctattacattcaccagtccttcattataccattgacctgaggctagcaagagattttgtctgactgtaaagttgaaagtcaaaagcttatttctggtcccactcttagcagtgtattagatgtggaaataaaagtcattttgggtagctgctatgaaactttctgagcagattcttggctgcaccgatgtatgacagaatttatggagaggcctatggcaatatgagcaacttgaaaactcctaaggaagtgcaggtagctaacagcttggtgtggtgtgtgtgggtaacaatccacatcaaaagtgagctttacattgacttggattgttagacatcagtgggttattctgttgtttttataaaaggtttatactgtatcaatggaatgagtcatttatgatgaatttgcaataagcaaagcattaaaaatgaaatattcagtgtccattttgaggtagaattggtgtcaacacagaacgttcttcctctcaaggtgtaggaatcaatagtatggtatttaaaaaaaaaaaaaaaaattttttttttgagacagcgtcttggtctgtcacccaggctggagcgtagtggcctgacattttttttcttaaatgagtgaatgtctactttttctttttctttctttctttctttttttttttttttttttttgagacagtcttgctctgtcgcccaggctggagcatagtggtacaatctctgctcactgcaacctctgcctcccaggttcaagcaattctcctgcctcaggctcccgggtggctgggattacaggcgccggccaccatacccagctaatttttgtattttttagtagagacggggttttgccatattggccaagctggtcttgaactcctgacctcaggcgattggcccacgtcagcctcccaaagtgctaggattacaggtgtgagccaccacacccggccgcctactttttctttgtattagattgtcatggaagaagatgaagaagaaaggagttagtcatgttgtaattagatagacttaacttaaatttttcttgtgcacataggttaaaaatagcattagtagacattctccccatcccctccaactctactatagtgctttgcaaagctctgtgtactgtgtaagatataaaatgatggtactgttactgtagaacactgtttgggagtcaatagaattggatttttttctactttataaaagaaaccaggtatatgtacctgctgtctggatatcgtgtttttaataactgggcatgactttgtacttgaagactagcttgaggctggggcagcagatccactgataaatctgttgacacaagtcctgcaaagacctgagaggtggaaatgagtggatcaggttgtgccaggccatgggagatagattcaggagacagtaagggatgtggaataggaaagaaaggaatggaaatatctgtcttttcatttagggtgataatagtgaattttgacccaactcacttctttgtgttggagaaaggatgatgtatgttttgaacatctttgttactgttttaaaacaaaagcatgcaaactgaactctgaaaactgaaaatcccctctgcttttgctgacttttaaagaaatgttataagatctagcattgttgttttactttaatggctgtagtgttatatagtattacagtctcctttataacttaaactggaatatactgtagtatcctatagctgctttttaattagagacaagacaaatatgactgtttaaaattccatttaacacatcagcagatgtcaataatttatttaaaaagtgaaatgctgctttctcgtagaagtgtgattgattgaatattttagagacttgactaatggtgatccagcggggctagaggaaggctgggttgacagtgtttttaatgggctggagcagtgctgatgtcgaaataaaaatgtgctagtacttcctgtacagtctgcatagtcacttccttgcttgcattaactattgctgacgcaagactttgcatttctaccatctgtctcagtagatacatcaatttcattctggtcccatgactcctgggatagggtggggaattgtgggggtgtgggttttatgttaaatatcactggcctgtgttcaaggctctagagcaggaccagtcaaaagtgtagtttgtcaaccagctctttgttttctaagcgctgcacttcagctgacctgtttttcacagcaagactctcattgaaagaagcagtgtgctgatttttccccgtggcacaagctccttaccacatcttggagcagcatttttttgagaccgagttttactctgtcacccaggctggagtgcagtagcgcgatcttggctcactgcaacctccgctagagttcaagcaaatttctcgtgcctcagcttcccgagtagctgggattataggcgtgcgctaccacacctgactatttttttttatttttagtagatacggggtttcactatcttggccaggctggtctccaactcctggcctcaagtgatctgcccgccttagcctcccaaagtcctgggattacaggtgtcagccactacgtctggccttggagcagcaatatgagtactactcttccagaagccagttgggccgcattattgaatacctagttcatagataagagctgttatgtgaccttgaagaagtactctatctccttcaattaccttcttgccgcgtgtctttgtactaaatctttaaccttgctgttctttgggctaataaaccactttcatttacattatcctgctctgtcttaaaacagctttgtgaaggagatgttaataacactaggcaggctagcagtccaagtttgaaatgtgcctgagggtcccgtgaatctgggttccagcattcttaatttctaacatggatgcttccatcagaggtgcttaactgtttttgtaccttggactcattcagcagctgcctggtgaaacctgtgaactccttctcagaaacattttaaatacataaaataggattccaagaaacaagttaaattttccaaaaacttacgatagaatatttgtgctgctttatttgttacatagctagatcaagtggtgggtcacacaccataattgtgaagtagtaatacgcataagatctgtagcaactgaaatgtgatgaaaacacatttgatttgttgacaaagttacaggaactgctgtgtactaacgtggtttgtcacccgtgttcatgcttaaaggaaatgctaaatttcagtgggagttagtaaagataaagatagaaacattttcccatccaagtttatggggtcacagaattctgtccataggccccaggttaagaaatcctgacctacagtttttgcttccattgttttcattgtatttgagcggtgggggaagggtaggtgggatcccttcaccgttctgtcagaacctgaaatcaacactggcagatcagttctcctcagccagaaccatttaaaatctcaattacctcatgtagtcatcctactgatttctgctttactcattatttcaaaaatgaaaaatagaacatgggcaagaaatagcccagtgcttttggaaagctatttgaatcctcttggatgtgatttccctgggaaattggatgataaatgtgactggacaggtagacttagctcctgtatctgggggtcctgggatgctcaggccaactaattaatgcagacagttttcccatgtaccaaccaaccatgtgatcatttcagtgagcaatttttttatgatgaagcatcagggaatagacccttctctgtgcaactttgcacaggaatgtaaaaataagtgaattaggcagcctttctaggaaagaagcaggccaggtatattttaatggaaggcctccaatatccagagaagggagggttgggggttgctccaccccatttcctaaaaaagactggcaggaggtcagtctctgtagcccttggctttgaccatagagttacttattagagatcattcctagttccacctattagggaatacttttttcttgactttgttctaaaatagtcctaatcttggtaagtgattatgatggtagcttaggttcttgctgagtgattcagactgctcctgtctgttcattgctaagggacagaaacactccttggacttggtcacgcacacagctctacactacattccatgtcctcttatactttctagatgttctgtctttctccagtttaaatttggcacctgaaattccccctctgtccatcttcccaatgctaagggggagcttttgccaacatgtcccatgcattgcatgttcccttcagtgtttatattttataatcctcatcccatatctactgacgatgtatgtttactttttattattatactttaagttttagggtacatgtgcacaacctgcaggtttgatatataggtatacatgtaccatgttggtttgctgcacccatcaacttgtcatttacattagttattcctcttaatgctatccctcccccagtcccccacctcatgacaggccccagtgtgtgatgttccccgccctgtgtccaagtgttctcattgttcagttcccacctatgagtgagaacatggggtgttgggttttctgtctttgtgatagtttgctgagaatgatggtttccagcttcatccatgtccctacaaaggacatgaactcatcattttctatggctgcatagtattccatggtgtatatgtgccacattttattaatccagtctatcatcaatggacatttgggttggttccaagtcgttgctattgtaaatagtgccgcagtaaacatacgtgtgcatgtgtctttacagtagcatgatttataatcctttgggtatatacccagtaatgggattcctgggtcaaacagtatttccagttctagatccttgaggaatcgccacactgtattccacaatagttgaactaatttacactcttaccaacagtgtaaaagtattcctgtttctccatatactctccagcacctgttgtttcctgactttttaatgatcgccattctaattggcatgagatggtatctcattgtggttttgatttgcatttctctgatggccagtgatgagcattttttcatgtgtctgttggctgcatacatgtcttcttttgagaaatgtctgttcaaatcctttgcccaccttttgatgggcttgtttggtttttttcttgtaaatttgtttgaattctttgtggattctggatattagccctttgtcagttgggtagattgcaaaaattttctcccattctgtaggttggctgttcactctgatggtagtttcttttgctgtgcagaagccctttagtttaattagatctcatttgtcttttttggcttttgttgccattgcttttggtgttttagacatgaagtccttgcccatgcctatgtcctgaatggtattgcctaggttttcttctagcgtttttatggttttaggtctaccatttaagtctttaatccatcttgaaataatttttgtatgagctgtaaggaagggatccagtttcaactttctacgtatggctagccagttttcccaacaccatttattaaatagggaatcttttccccattgcttgtttttggcaggtttgtcaaagatcaaatggttatagatgtgtgttattatttctgaggcctcttttctgttccattggtgtatatatctgttttggtaccagtaccatgctgttttggttactatagccttgtagtataatttgaagtcaggtagcgtggtgcctccagctttgttctttttgcttaggattgacttggcaatgcgggctcttttttggttccttatgagctttagttttttccaattctgtgaagaaagtcattggtagcttgatggggatggcattgaatctataaattaccttgggcagtatggccattttcacggtattgattcttcctacccatgagcatggaatgttcttccatttgtttgtatcctcttttatttcgttgagcagtggtttgtagttctccttgaagaggtccttcacatcccttctaagttggattcctaggtattttattc

SEQ ID NO: 94334 - DNA, 57358 bp, Homo sapiens
ctgctgtttctgcaggttggcaagaggagtcagaggcttattcaggcttaggtctgatccctttggcaagactccttagatggtgtagcttctttctaagacacaaggaggcacatgtgtctacttgtctctctttttgtgatgtcagcaactgttgatactcaatgcctagatcacttaatttatagagggttgaaaattgtaatactcaaattctattatttataaagagattattcttttcacctactacttgattacacagtggtatagttcatactacacagcagaaataatgactgattgatttttcccatttgccagttttaaaaataatgaattggttctctaccatcctccaaaggatgaaggtggtctacaggccaggcagagagccctcaccagaacctttaccttgctggtatcttggtcttacacttcccagcctctggaactgtgagaaagaaatttctgttctttaagccagagtctgtgtactttgttatagcagcatgagcacactaatacaactagacatctggaaaatgtgacatttcagtcaataacaaatctggaaatcagagtttttccaggtgactgatagtttagtttatttaaacaccattatgacttcatggatttaaatatatgtgatgtattttaatccattgtaattttttggtttttgggtttttcttttttttttttttgagccacagtctcactctgttgcccaggctggagtgcaatgtcgtgatctcagctcactccaacctctgcctcccaggttcgagtgattctcttgtctcggcctccaaagtagctgggattacaggcatgtgccaccacgcctggctaaatttttgtatttttagtagagacggggtttctccattttggccaggctggtctcgaactcctgacctcagatgatccacccacctcggcctcccaaagtgctgggattacaggcttgagcgctcggccataattattattctctcacattttctttccatgagtaccttaaatatgttactccattttcttctggcataatgcattgctgccaaaacgtctggtaatatctaatttcctttcatctgaaagtcacttgctttttttgtctaaatatccaaagaaattttcattgttgtttcttcaaggcccagtaggtttagaagaatgtgtcttagtgctggtaagcccagatcaatgttctcaggtgcaatgtgttctttcaatatgcagtttcaaatattttcttttaatttcaggtaagttttcttaaactacagtttgtagtatttgttctgtttccttatctcctccctctttttgtttcccccaggaactcctattatctatttgttagttctcctttgcctgttttcaatatctagactttctttctaatctgtttaacttccttcattgatttttgattttttagaatttttctccttttcatcttctcttaaagaataatcaattgtgtttattcatccttgggtttcttttattcttaatttcagattctgatttctgattctattttgaatttattcatttcattttgaatgtttctagttctgatttacatagttcttttcatgtttcatatcattttcttagtatcttttggctcattgtgaaatagtggatgttagtttttatctgttttgtgggcatcctttctggtatgcttttattgtggatatgagtgctattctgttcttattgtctttcattacaataattttctatgtgatttgacttccatactttcatgtgattatttttatgtgaaattggttttcttgaactttttgaaggaggcagttttaaggatagtttttcttttttctttttttttttttcttttttttttttttgtggtggagtcttgctctgtcgcccaggctggagtgcagtggcactatctcggctcactgtaagctccgcctcccgggttcacgccattctcctgcctcagcctcccgagtagctgggactacaggcgcccaccaccatgcctggctaattttttgtatttttagtagagatggggattcaccgtgttagccaggatggtcttgatctcctgacttcgtgatcagcctgcctcggcctcccaaagtgctgggattacaggcgtgagccaccgtgcccagcctagtttttctaacttcatagagaacttccgtttttactgcttagtgttgtgggtttcgttcttttttatttgaaaagttggcttacttttggagatttcctagttttccatttttacctagaacttctttttcctttctctctattgtctctatttagctcaattttgtttccatgcccaacagtttgccagcagtgtaggtctctttcctgcaaggaagcctagtagattagtttcaagagttccwgcagctacattactccagcccctccagactttaccaggaggctcgtgcattctcacgtttttagagaaggcaaataccctttcctgtttctgctgctgttctcaacttgactggctggaccttccagggaacactttgcagctattttggggttctccagatgcctcattgattctctatgctgataccacaagggtcttattacttattattgccatattattgctattggtttgttcccacgcatttatatttttgagatcaaggggataccatttcatttggatttgttatagatgttgtccttgggttttggttttgccatatagttgctttgtctgtttttatgcagagattgaaaaagtatgctgctgttgtcatctttccacaattctccctcaagaaacagatgtcttaaattacttagtagtcatcttaaaagaccacatactcaagccatggcctcgttttgcaaacattatgtataaccacttctaactacttcccctgctaccaccatcaccttctcttatctggactgttataacaggccccaactggtcttccaaaggccaccctgctgcacactacagcagtcaaaatgattattttaaaacacaagtcagatcatagcactcttacctcaaaaccttataaaatcttctcaatttttggggcctctgtgatctggcctgtgtttccctctgccctcctccctgactgcattaggctgctttagccacactggcctcaaacacccctcgaaggcgctcacctcaaggcatttgcacagctaatcttctctgtcccaaatgctcttcctcctcatgtgtacttggccttttcccttactccttttgtctctgctcaaatgtcctatactcagaaagtccttccctgaccatatccaactccccactgaaaaatggaaccacctttctctcactatgttttatttttcttcacagcactcattaccacctgacatgctatatattaattttttatctttctaccgagaatgaaaatgccatgaaagtagaaactttgtcttagtgtccggaatagtgcttggcacaatgttagtactcaatacaaattcatgagttcactgaatgagtgctgaatgaatatataaagttcctagcacctgatcagtattcaagaaatgttagctttattttttcttgatagggaaaaggaagtgatctttagagaatgctaccattcccaatgatagaagatccaataatggaaacagaggtgtagtcagaaaaatgggtgatgggaggccgagtccagcagttcacctgaggtaaggagtttgagaccagcctggccaacatggtgaaaccccgtctctactaaaaaaacgcaaaaattagccaggcgtggtggtggacacctgtaatcgcagctacttgggaggctgaggcaggagactcacttgaacccgggaggcggaggttgcaatgagccgtgattgcgccactgcagtccagcctgggtgacagagcaagactccgcctcaaaaaaaccaaaacaaaacaaacaacaaacaaaaacagaaaaatgggtgaagcaggacaaaacagtgacattagagccaaaagcagggggtaggcaataacaccaaacatacagcgtagtcaagggcatcagggtctgagaagaggttataaaactagttctacggactgaattgtgttcctccaaaatgctaatgttgaaaccctaacccctggtatggctacatttggagattttaggaggtaattaaagttaaataaggtagtaagagtggggctctaatctgataggattagcgtccttacaagaagagacatcaagagatcccagagagcatgttatataccctccccgcactgtgtgaggacatggtgagatggcagccatctgcaaatccggcagagagccctcacctgtctgcctgccacaagttaggcagatccctaccttgccaacacctggatcttggacttcctatactccagaattgtgagaaattaatgtctgctctttaagccatcaacctgtggtattttgttatggcagcctgagcagactaatacaaccagatatctgggaaatgccataaaatttagtgttaagacaataataaatctggaaatagagtttttccacttttcagttgtatggtcacatattagaattgcagatcctaagaaaacctgtacagaaaaacccaaatcacagagtcatttaagtgtaaagaaaaagccaattattgcttaaagagtatttgtagaaaatatccgttgaatatagaggaataacagcatattcataaaaattttttaaaaagtgtgcacgacagtgattttaacacttctaatccaatggaactaacattttaaagtacaattatggccaggcacggtgcctcatgcccatagtcccggctacttgagaggctaaggcacgtggatcacttgagcccaggaggtggaggcagcagtgagccctgatcatgccactgcacttcagcccaggtgatggtgtgagaccctgactctaaaaaatacaattatggttacggttcttgggcagagtggaattcaaacaggttaacctgaaagatcagtagggttctaaatccaggataaattattttcagaaaaagaataactttttgaatctttatttaaattgttaaatgttcctgtgagtaacactcatcagcgtgattgtgactggtatggctgcatggaagcttccctgtggcattaatcataaaatgctggattggggtttgattcttcaaggtataagaaggacctagtctcaagtaatagattcaccaaaatgtaacaccactagccccctcccaccaaaatctgctccagtcagaattaccgtaagagctcagaagtgacctgtgcttggcggcaccggcccactttcccagtgccggttcctcgcatcctgggcgcagacggggtgaccgcctgacccctggacccgagtcacctttccctgccctgagctcctccttgagagcttcaaaacaatgctcgcccaggccggagggcgaagtcggcccatgtgtaagtcaagggaactgtcccaggactgcagcccggccagaagacgccccgcgccgccgtcccaggcagccaccgctgccgccrtggcccccgcaggccgccgtaggcccccgcgggccgcctgacccctgcgggccgccgtagaaggaccctccagaggccgcgctcttgagatggccgtcgggctccgctccccgcggcgccccggctgagggcccgccagcgggcacctggcgccaccgctgcgttccggcactagcacgggacacggtcagggagcggcgggccgcggccttgcgcgcgccgtctctcggggcggggcaccgggccccttccggggatgggccccggcgcccgcgtcggcctggctgtgcccggcccctcccygctcgggcgggcgctgcgccgtatccccgcccgtcagtccgcccggctcggctggccgcagaaagggcctgggcggccgcactgagagctttacgcccggaggcgtcggcgctgccactggcccgcgacgggaacggggcgaaaaggcggcggcaccatgttctccctcaagccgcccaaacccaccttcaggtcctacctcctgccaccgccccaggtaaacaacccctccccgcgagcgcccgactctcctctgcgcttccgtggagcctccaggccgacccccgggaactggaggaccccaggaggctgcgcgcgtctccctgcccacagcagcgcggctgcctgattcccggcgccgcgaaatgcgccttctcgggagcccccactggctcggcgaaaacttgtaaaactcttctgcagccattctctgcccgaagttctgtcgtccgtagttttgcggagtgttgaggcccaggggagccttgggagctggggttttctttagtttccaacccatcgaccctccctcstatgaccgccagcatgattgyagcgcttggggtcactggtcgaggcggttacccgtctgtcataaatgtgaacacctggaagcgacactggcagtttaaacattttttattattaggcttccaagtcgataatgagcagatcttaaaaacagctcagttaatatgcgaaagaatttaaatggggggctgtgtgtcttkcgcatgtgtcatcacttagaaaacaacatttgctgtagcattttacggagggtggggggattgagattttgatttattttgctaatgtatttcagactgacgataagatcaattcggaaccgaagattaaaaaactggagccagtccttttgccaggtaaacattagttaggattctaacagatactttagcaacgtattttggtttaagattattctgccgactagtatcatgtggttaacttcccttctctcattaaactttctccagttaaaagtctagtgactgagaggagaaaaaggaactgtcaagaatgtcattacctcatttccttttttgtctcccgaatttctttttgaaaagatgtatatgtttaattgcttgggtagtaaaagtactctttgctgacgtgtttgccacttattgcattaatgattaatcattttaatgcattttgatagtataaaaagacgcctttattatgtgtgtgtctctataccaataacagagcttagtgaactttgaattacttgcttggcaattgttttttgaagttgtcagctgtatttgcaaatttgcttgtttcagtttagaaccaggcttttcccagcagagacacttaattgacatttggggccagataattcatagttggacgggcaggctgtcctgtgtatagcaacaaagatggcctccacccactagatgccagtagtagtacccttatcccccaccacctagttgcgacctagttgccacaccaaaatgccaccagtcattgccaatttttttttgtcccctacctctgggggacaaaaatctcacagttgagaatcactgctttagaacaaaatttgctataggtgaccttagagatggaagtagggattggtggtagaaaggggtttgttttagagcatacagaatattggtatggtattttgaattgtataacaattgtataataattaggaaaagtcagttgtttaatgcgattattaggggaagtagccagatacttaggaaagcctgttttaaacctgaaatcggccgggcacggtggctcatgcctgtaatcccagcactttgggaggccgaggcgggtggatcacgtggtcaagagaccgagaccatcctggctaacacggtgaaaccccatctctactaaaaatacaaaaaaaaattagccaggcatggtggcgggcgcctgtagtcccagctactcgggaggctgaggcaggagaatggcatgaactcgggaggcggagcttgcagtgagccgagatcctgccactgcagtccagcctgggcggcagagtgagacaccgtctcaaaaaaaaaaaaaacctgaaatcaaatactagtttgtgtggctactatcagcattgyaaaatctgactcattacttaaagccaaatcggtaaaataattagaattttgtaggtaaaaattgaacaaatgtggaaactttaaaattttaaatattatatagggacaaaatattaaaaacaccaaactttggttccatatgaaagtttaaaaagtgttttttaaactttactatgggagtcataaatattttcccttgattttgttagtgcttttcactcaacagtgtgtactaattaatcatttgtacttttcctcagagtgaacagtagaattactaagtaacccttgctccctgtgtgctctgttttagtcttagtcactctgagcatttaaaatgcagggacgaggaaacagtactcatcttgaatgagtgcctatgagctattgaactttgacttcgtttactctgaacaggcctggttcttaggctttgattcctccactctgcatactatgatttcacactcagaaacaacatggtcttagctgtaaatgtcagtgcttgctttttaattttttaaaattttttttaaattttttttttttttttttttgagacagagtctcactcttacttgggctggagtgcagtggcgtgatctcggctcactgcaacctctgcctcccaggttcaagcgattctcctgcctctgtctcccaagtagctgggattacaggagcccaccaccacacctggctaatttttcgtatttttagtagaaatggggtttctccatgttggccaggctggtcttgaactcctgccctcaggtgatccgcccgccttggcctcccaaagtgctgggattacaggcgtgagccactgcgcctggccacttttttaaaattagcttttaaatttaagatatgtgctaagaaaaggtgttactaagtatgcataaacttgaagaactttctcactgagggttatcaattctataaaatggctaaaagtcagagttttctggggaagttgtaaaccaagtttctgactgtgcttttcttgtcccagaaatggcagctaaattccgtattatttttagagaaattctaaaagagctgtaacactaagtctgaaccttttagttgcccattaaggaattctctgacctgtgttaatttttattgcattggcggccaaatcatagctgaaatctgtacatgcatacatgacggctctatcacccagcattctgtttgtacctgacttatccttacccaacatttagccggtcctgaattaggatgtcttttgcccccttcctctccccttctgttcttaccctctcattctggccttcctgcacccatcctggctgtgttctgtctggctgccctgttgtggtctctgtttcctgctttacctcgcctgtcacatctctcactgctaccatttgctctttgttggcctgtagcctactgctctacccatgaaatctggaagacaagtggaaagttaccgaactattggtgatctaaagacctagactaggctagagcttttactaagagggagtgaataatatagttcttgcctttgtgactatcagaatcaatagaaaacctggccacatcacctgtggctatatacagggatgcagaagttattgttcaacatggacaccgggaggggaacatcacacaccggggcctgtcgggggtgttgggggtgggggatgagggaagggagagcattaggacaaatacctaatgcgtgcggggcttgaaattcccggcgtcatccctagatgacggggttgatgggtgcagcaaaccagcatggcacgtatatacctatgtaacaaacctgcacattctgcacatgtatcccagaacttaaaaaaaaaaataaaaaaagaattaattgttagagatatggtattgcatgctttgctttggcataatgccttgggtccaagggtatcctacttcagttgcccaaagtttgaacttctaattcaataagcagatgaaaattagaacacaaaatgagttgtttatttgtgtgctgtcaccatgtgcactgttggaacttaagcctaatttcaaaatgatcctcatcttttattaagtaaagaaaacagaagaaaatgactagtaatttaatttagattgtggtttatgttagtaattttcagctttcctgatacatgaaactctgagatgggtattgtgcctacttcaactttgtggtcttgatgtctcacaaagtgccaggaatgtggtagacactgagatgtttactgagggactgaacgaaaggacctctcagaccacctggcttaaactgttaccttacccaggcacacacacagactaactttcagatttaggagtaaagggaagactgtgttattttatgccagacatttcaagagatttatgtcggagcctggaattgaaatagagtactctgtcaaagtagtcagcttttgtgtaggctttctctttatcttcctctcattatgtgaatttcattctttcagtgattatattgtatatgtgtaaaatcactccaatacttgaaaactgagtttgacttttaaagtgtgtgtgtgtatatatgtttgtgttccagtatrtatttgttaagagcatgtaatgccagactctgtcctgtttagctgctggactggtggatcggttcggtgaggatgtgagtatctcctgggtgccaggtctgtcctggatagcgagaatgctggaggtgtcatgtgcctgtatcgcagaaaggcgtggggtgagccctaagctgcctgttgacaaggtagaagactgtgacctggatcactggtacccagattccagccagggcctggtatcagatttggatgaagtttttaccagcccttggtcaaagtgagaaaattaagaaaagtgcagttttctttaataaagataaatttatttgatttaaaagattgtcttttattctgagattatgttcttctaacttacttggaatagatactttttttgttaaatgttggtgataatagctgtagctttaaaaaagtttttaagttaacaaaattaaaaagttaaaaactctttattggtcctttaaattagttttgcactatacctggtttggaatctaaactagaacctactagatgagattattataatactatagatacaattttgtgagcactcacacagagaacattaattattttgtctgcctaggagtactgccatttttttgtttgtgttttgagacagggtctcgctctgtcacccagtttggactgtagtggtgtgatcacggcttactgcagcttcaacctcctgggctcgagtgatcctcacagctcagcctcccaagtagctaggactacagacgtgcgccaccacacctggctaatttttgtattttttgtggagatggggtccaactatattgcccaggctggtttcgaactcctgggctcaagcaattggctcaccttggcctcccaaagtgttgggattatagccgtgagccaccacacccagcccccttccaccatcctctgaaaaatgcatcctccctcttttgacaaattatcctttcctgactaactccacccaaccttgggttccagtgtggccagcaaggttaataacccaccctggactgcaagcatgaacacaggtctgcctctggatgttgttaggttggtactaagggaagaggtcctctttggtaatgctgcaagtggccacagttccagaagaatctgttgaaaagagtgaagaaccccaaggaagtgcactaatgtgtgttgaagtccctgggtttcattgtccttgcaggccaggtgacacaaaagccttgtattcttctttttgctaagctattaccaggcatgtttctgaacatactttgaacgaggatccttaactaatatagcttgcagattaatcatcataacagtcttgtcagctaggataccagtttatctccrtttgacagatgtgaaaactatagtttgctgaggttaagtaacttgcccagtgtcacacagctagcaaggcagagccagagttctctgtccagctcccaggctgtgccactaactgctaagtagcacggcccacctggctgcactggtgacactagggtacagatttatgctttggaactgttggggagtagattggatgtcagcctagagggagttctctagtgaagtaaaaagagctctgtccttgtctttgcccttttcacaacagtgacagattttgacccagcgtgcagaagaactttcagagaatttcagctgccagaaaatggaatgtcttagggaggtagtggacttcctgttgctggctgtgccgaagcacagtctggtgaaatgccagcagctttgtattgaggatgtaagatttgcagtgagtggggcttgatggcctttgctctcttctcaccccagggcatgctcttttttaagggagaagagttgaaatgccaagactaacgataatgaatttgttctgcaggtattgagtgtgtgcttgatgcagtttggcagaagggtaaaatgctgaggagatgggatcctgttcttagacagtttcagttcactggagagatgcttcagtagaggagagaaaaagtagtaagagctcagaggaaggtcacctaagccagatttggagtagggcaggggtgtcaagaaagatctctggaaacaaatgcttgtgctctgaatcttgagtgcccgttgagcctgggcccctgtgctgaggctgtgcgtcagctcagttctttccctgttcgcatctacagtgctcacagcactttcattcttgagattaactattagataatgaatgcagtgattgtcagagtcttttgtaatcggatcagaaaagcatacaaccatgggccatctgggaaatgaaaatagccattgttgtatagatgtcttgtttattttttacaagctcactggcccgtactgttcttgttttctgtctcaccatacgtcttatttcctcagttgggttgttaattccttaaaggcaaagactttatctttcaagtgttttatgtaattcctttttgtaggtaggcttcataaatgattgtagactgatttttgtagtattttaatttgtgaatgcattgtttttgaaagaccaaaggacttgtaacacaccctcagaacagtgaacagtgtaactgtactatcttagcattagctttataccttacccgtagagccttaggaatgtttggagctgtccattccttaggcttttgctgcagtaccttaggccagcattttcttacccctccaaactmctcactatcgttgtcaacaccgttcatgaacctccataaataaaatcctacttaagcaggataaaatccaaattctttaaccttgtaatttgctaacactgtacctcactgacttcatttctcagtatttcccaatattgatatttgcttcaatcatgccgcttccttggtctcttccagatgccttattccttatttaggaccttgttactgttattatcacacattctctactatctcartgctcttcttccttcaagatttcattctacaatttttcctgagatcggcactatacccttcctcctgccccatcctatcctgagtgctactcactggacttggtacttgcttttttacattgtgtgttagtaccagcattaaagatttgtgtttatcttccacatagtttcaatttcctgtgataacttttgagccactttaattcctgaatttacctaaagctagggtgaccagcttgtcccagtttgcttgagactgtcctggttttagtgctaaaaataccacatcccagggaaacccctctgtcccagacaaactggggcagtcaccctactgttaaaagcccaagttaagttatgcttttggcctctacacatcccacaggttaattagccacgtgtgccgtgagactttgccttaaactgtgttccaacctaaaatgtatgggaaacattatttctgtccatcaaacgtgatgaatttctaaatgtataaggtgttaggaaagataatacaacatggttttgaggtcctcagggagttaaaaactttcctagccatatcatttggaggtttattaactgtmattgcatttcccttcttatttatatttacagatgaaagggtcttgagaaaataaacttggatttcttgatttcytcccaggtgttagtagaaacctttggctcatcatcctctaatttagaaggtttttgcttaccgcacactgaagctaatttcctgctttttctggcttcatgaggcttccttgtggcatcctgggaagtgcttggtgctgtaaatggtcccaccgtggctgatggcatagcacagagctgggagagaggagtctggtgggttctcacaagcaggccagccagccgtctctagcacaccacccttttactgcataaaaagcacaggcgtatagtctccctgaaaacttcagawcctctagagctttgaagcttttattcggagttttctcttcaaggtcacttaatttaacatgtgaacaagagcagtctcagtaccttctttttatatatcctatctgggaagaggccactttgtgtcttctttttcttccctgtgtataagctagttttctggcccacagtgtttcagtgcatggcaggagcttatgacagctcctcttcagcattccttttttttaaaattatgaacaaatgacttacgtgagcagacagctgtgctacatgatccaaatattttaaagactggttctgcatgaacaaaatttagcattatcaaataaaactcatgtcactaactcgacacttaattattgtaataggaagacccaattgtagcatatcctcagaagtgcccttcttttctttcttcttcccctgtatccctctgtacttctgttctttgctctcttccaagggctcatttccattctgtaagaaaaggctgtgtggcgcttaaaagaccctggcccagagagtccttctttcactttttttttcttttttcttttttttggctgttgttaatgttgtgtctcttgtttattttcttctttagtagttttattttggaatgaatttgaatttgtaagagttgtacaaaagaggatagagttaatgtgaactcttcagccagcttccgctaatgttaatagcttatgtaaccttggtgaatttagctcaactgagaaaccaacaatactattagctaaactgcaggttttattcgtatttccctagtttttccacaaatgttctttacctgtttcaggttcacatccaggatactacatagcatttagttgtcgtgtctccttattctcaatgtctcagtctgtgacagctttttcatctcatctttcaagaccttgacgtgtttttttctattgaatttgattttcttttttttctttttcttttctttttttttttgagatggagtcttgttctgtcacccaggctggagtgcagtggcgtgatctccgctcaccgcaacctccagctcccgagtttgagcgattctcctgcctcagcctgttgagtagctgggagtacaggtgcgcaccaccaggcccagctaattttttgtgtttttagtagagacggggttttaccatgttggccaggctggtttcgaactcctgacctcaagtgatctgcctgcctcagcctcccaaagtgctaagattacaggcatgagaatgagatttttattttgcctcaaataatacatattaaagctctttaaacatagaaatatactactacaaaaggaaaaattttataattactagatttctgttctaacaaaccaccccctagaaacrtcatcaaattgacttaaaaatgtagacgtaatttcagacttagagaaaagttgcaaataacagaagaatctgtggataccctttccttagattccccaataaaaccttgacgctttggaagattattattcaggtagtgtcttgtagtatgcctcttggtttggatttgtccgatgttttcttttgattaagcagaggttatggattttgggaaagacccacagaggtggtatcctttgcccttgtgtcatgtgagcaggcacaagacatcaacatgattggttattggtgaggttaacctcgatcacttcaggttaaagtgatatctgtcaggtttctcctctagaaagtgactgtttttccttttctgtactgtttgttagaaacaaatcactaagtgcagcccacattcaagggattgggaattaagctccacttcctggagagaggagaatcacgaatttatgggcataccttaaaactaccacagtaattagtcaatacttttgggaagatagctttgtgcttatacaaataacctgtttctccttaaagtttggctctctgaatttagcattcatcaatgcatgttgcacacagcagtcattcagtctatgacattgagtccatgatagtttcttgatctttactgtaatgttctaatcatgattttgtttccttattcctcctacatttattaattggaattcttctgtgaggaagatttgtctcttctccgccatttatttatttattattcagtcatctgttgacaacagtatggattcacagatactttttaatttactttctaatccggcatttttgttatttcttttgttgctcagattgttccagctttggccattgagagttatttcatsttggctcttgtatcctttggaaatgccgtccccccgcttttcttcacccccacttccatattttctggtattctggcattaccagaggctacagactcatcttctgtttcccctgccccagccttggaatcagccatttctctaaagagccctagttctttttattggaaaatggtattttaaaagcaagagctgggtactgagtgtgtatgttgttgctggagcgtcactgcttttagcactttcagagggcagagctagaaaacatacacacatgtaccaacccaggtgtacacacatctgttactgcatgtctatttgtatrtttattaaggcaagcataagttcattctgctatctcaaactcttaatctagcccctcggggttcatttccaaattcttgcttttgctttttgttgatggagtatgggcagtacagcagttaaacctggtttccatatttactttctgctgagtgctgtagctcattggtgagaaagggatcttttgacttgacttgcatggacacattctagtaggaaggttgtctgtcctcatcactcctgtgagtggtcctctagagctctttgaaatggctacaacattgcagatcaaaaacacctgcttttcaggtgcttcacttctcacctttcagatgggacatgcccagttgtgtcttctaaaccttgtttcagataattttaagagttgtcgcttcagtaactatctctaacacagggatcagcaaaccttttctgtgaagtgcagtaaatattttargctttgcggaccataaggtatttgtttcaagtactcagctctgtctttgtcctgtgaaagcagccatagatggcacatgaacaaatgagtatggctatgtcttactaaaatttcatttacaaaaacaaggttttgtatttggcccgtgggccatggtttaccatccgttggacccattaagtatattctcctcctcttctttgtctcattctcactgcgttcataggcttgatacgttaacattcgtgcatcagtaaaagaatctggcttctagagaagaagggctgtccatgggcgtttgactcctaaatacagtttgtttatggtactagtgtggccacaaggctctgccacacaagctctgtctcttccttcctgttattacttctgcttcccttctcaggaacctgaaatcatatggtagtttgtttgtttaagtgatttttttttttgagatggagtctagctctgttgcccagtctggagtgcactgcaacctccacctcctgggttcaagcagttctcctgcctcagcctcccaagtagctggggctacaggtgcgcaccaccacgcctggcgcaccaccacgcctggctaaattttttttttttttaatagagatgggtttcaccatgttggctcaggtggtctcaaactgacttcaggtgatccacccgcctcagccaaagtgttgggattatagatgtgagccaccacgcccagcctttaagtgaatttttatttgagtataacatgcataacaagtttgtgtggatcataagtcttagaagtggatgaatttttgtagcaaggtttgaagagtctgtttttagatgagtttgctaaggtggcacagtatgtgatgattccgtgtaaagaagtcattgttacagggctgtgtcctctatctgaactggcatggttagtttagttgtttaaattgagggcctgcttacaattcatatctaagatttactggagaggagaaagggttgagtattcagtggcccagaatctgatatgggaattggtraggtttatgttcaaggagccaaagaagatttaaattttatgtatttgaattactcagtgcgtctatatatatatatwtttggtcatcttaaattttttttctcgttagaattcagttaaggccaatatttgaactttaataagttttggtacttgctacactgcagtacatttaattgtatgtaattatagggaaagactatgggaattgaagtcagaacacttggttataagtgcgaagtccactacttctttttaagatcttaggaaagtgatttaacctctttgggtgcaaatcctttatctgtgtattaaggaaaccatctgccttcctcaccttacaggttgttgaaagaatcagacaggacagatgtcctatttatagctctttaatgcatatgtagrcaagcagtggcagttctgtgactcttctctaacttacatatcatttacccaaacagcccttatcttccagccagcttggctgcttagccatattgaattactagtttctcttatctagaacaacttctgcccaactcatggtggacagaaccaagtgtcatgaagtgattttattcattcttgcattcagcactcttttcacaggcacctaccctgtgccagacactgttctaggcactaacatttcagcagtgaataaagtcagtccatcttctaccctcatggagcatataatcctgagggtaatgcaggcattaatttaaaaatatataaatataattgtagctatcatgagtgctggaaatacaatgcttcgatatgtgaatgtaaactagataggaagatttttttaaagaggcattccctagacagtggttggactaaggtagaagaaaagaatattccatgaaatgggaagaagcatggtcccatgagggattaataggccaccactgtgggcagagcagtgagggtgaggaaggctggtagctggctgggtatgcagggctcccagccatgagagggaggcttgtcttcaaagtggaagttaactcaagctgttggcactgtgaatttgacatgagcagattttaggtaaatgttaaggggcagttactaaaactagccttgtacatttttaagaacttcgaataaaagttattgcagctcaaatttgttataacctatttgttaaagagaggattgttttgagactatagttccattcttcatgaattggtaggagtttggagtttgtcagcaaacattctatcgggctaaaggtttttataatgaaagaaataggcaaagtggatcagtacactcacttttctaccattgaccctggagacagatggcttaaaatgttctgcgtctagttgacttttagatcttgaaattaaggtttaatgatgaccaagctttaaataaattgtagaaaagtattctttcaaaagtacattataacttttatattggtttcttatatttatttcttttaatcttttcttttaactcaaactacrttttaaggttttgttgcctactaagttataatctgagtgcagaaggaaacttgatttggctttatggaatacattttacattcagtgaagctgagctctgtttctcattccttacaaaaggaatcaaaggcattggtttgagagatcaagtcatgtgttaataaaacacaaatattccatcaagtaatactctgaaggagcaggtgtagtttatttcttctccagaaagtcttccagcagataaataatgagaggtagtatggcataggaaaaaagtacactgaagtcagcctttctggttcaaccagctcagacccctgagctatttttgcctcagttttacgccttggagaacaatgccttgtcattactattcactttatgaccatacagtgcctggcacctggtgggcaattggtgaatgttttcactatcctcatccttgccctcatgaarcactccttctaggtcccacaaagaccgttggtattttatgacaaagtaccttacaaatatttttctttttttaaaggagaaattgtcgtaaatgaagtcaattttgtgagaaaatgcattgcaacagacacaagccagtacgatttgtggggaaagctgatatgcagtaacttcaaaatctcctttattacagatgacccaatgccattacaggtgtgttttattagtacactgtttcattctatcaggctttcaactctaagtggtacatattattatataaaacataggtatggaaaagttatagtagaagtattaggtaatgcaatgtttgggataaattatattaagatttaaagtaaagtttaagaagaatgttggaacttgctagaggagtattagtgagaggattgtaagtcaccttgctttatttatcctctgtgatcgttcattrtatgtccttttcattaaggaagttattccctctgttgcagatcttttaacctgcttataaaaatgacataaagagaaaaggttgtttgctaaatgattttataaatgccacacattttagtgatttcataggtttttttgttgttgggtttttgatttttttgttttgagcctggatctcgctctgtcttgtctcccaggctggagtgcagtggcatgatgtcggctcactgcaacctctgtctgcttcctgggctcaagctatcctgccacctcagcctcctgagtagctgggactacaggtgcatgccaccactcccggctaactgttgtatttttttgtagagatggggttttgttatgatgcccggattggtcttgaacttctgagcccaagcaatctgcctgcctccccctcccaaagtgccagagtacaggccactgcacccagctaccttttttttttttttttaaactaattagwgttattttcctaaaaagttaaattctaatttctaggaagagtgaagaatagtatcgatttaaaaattttcagtagccctcttgctattttatgttcttactggaaagtaatagttccatgtaattttggtttttagaagttcaggcattcatttgattaacttaaaaaccctggacttttctgtcagccattttgtattttgttttataaagtattatacacacttacccctagatctttctttatagtaattgttctttaatgaaatattggtatatgaactgtaaacttttaaatttaaggatctaatagtttagtgtaagtatatttcatgtagtcactcactaatttaccataattattatactgtacaaatatttattgtactgtatatttgtgtgttcattacagtcttatgtaggtatatttagactaaatttaaggcacttaaagatacccactgtgtagggacagtagcttatttggatataggcttgtgtgtttctctttgtttttagcttcataatgatcattggccccagacttcactgtaaatgagaagcagatacctggaacagcttaaatccagtaccactattaggaaaaagtaaaccagtgccctactgacagcagattgatagtgttaactacgtccttagtttgaacatgcaaaaccttttctaatggtttttatttctagtagactttgtgctttaaaaagatagttattttgcactttaaaatcttcagtgtgaaaatcaaacatgattttacccacttaaaatctgatgacctaagagcccttttttctttaatatgttgtggccagcttatccagatctagacatgcaaatgcttgctggtaaggtgattgatgatattccctatcttaggtattataataagattgttgtgtacattttaacctaatttctatctgtcaacattggaatggccctagctacctagacaaaagctttttgtgctttttagagataactgtcacagtttatcatcacagtttaaggcttatactaccattgtgagattattgggaaaagaattaatatgaacataattttttattccagaaattccattacagaaaccttcttcttggtgaacacgatgtccctttaacatgtattgarcaaattgtcacaggtacgtagtattccgtacatactctaaaagtcaattccactctggaagtattatttgaaaagtcatacctctcaaaatacttggattggcgttttatttctgtaagtttacttttgccgtttttttgagtcccgggaacataaagagggatatgttaataaattattttaaaaggaagatataaaatgtataacttttcatagtttctaggttttttgtcctctttttaattaaaattaatcattaaatgtrtctagatggtggttttatgcaaataatcatttaaaatatcttccaaagcaaagttaaaaccaacccccaagttctaggaattacaagtatgaaacattctagacaagcagagctcaaatgttgggtgaccttccaattattttcactaagaatttgtattaaagggtgagtaacaaataactgttacgcattttattttctctatttttttttcttttttagtaaacgaccacaagaggaagcagaaagtcctaggccccaaccagaaactgaaatttaatccaacagagttaattatttattgtaaagatttcagaattgtcagatttcgctttgatgaatcaggtcccgaaagtgctaaaaaggtaatactgttaaggtttatcaagttctgggttctgtactgtgtttactgatttcaattccgtatggcagttttcatttctcaattgctcagatgttttttaggggaagttatcagacatcttcttaagtaaagtcaaagccaagaatattaatagaactattttcttggattggtttatggctgttttaaagtgttctatataactttttatcagcttctcaaatattaaagactcttacgtggaaattagcatttttttacataaagatcattacttgtcagtttcttggttaaaaggttgaaaagttggtgatatactgtaattaaggtttggttaggcttttaattcagtactgcagaactttaccaacaaactgtaagctagacttatgttacataagatttaggtaaatatataattacgggaaaggcctagtaattattagtggtttaaagaaatattatgaattgagtgacactcaacaggggcaacacaaagctagtaactttttaactgccttatttttccacggccttccagataatgacttattaccctacttgtaagagtcaagggcatgttttccatgttttgctttgccagaggagtgaagctggtagacctaatatggcccccgttccagtctgtgctgcagcaaatgcagagtcacagactttccagtaggaagcttgcgcgtgtgtatgggaatagggcaacagtatcttagtataataggacgtggctttctctcagaatggaggcagtctttgcaccaccaagcaatgagtgcctttgttttccatggttagtcaactgactgcagtaaatcttctgttgataccaaaacaaggctggcaaaaatactgtaaggcagctgtcttcatatactttggtgaagaggtggtagatttgtttttagattgagaaccaacagtttcttcacaggaaggcaagcaggagatgaatatatgaaaatacatctgaaaatatgtgactgtctagcagagtagagtggttgtaggctcctctatgggtaaaagttttcaaatggtctgtataaccatctctcagcaagctgcattattgaaaattcaactagataactcttaaagcctctttcacctgttcgattgtgctgtttgtgattttggcattttactaatttaaagtgcctattatatagaaggactttagaattcatgatgtattagactgtacataaaatatttcagacaggttaattcctcaagcttatttatatttgtaatttaattgatcaaagcatcaaagacctgcttatgaaaaccttaagatgtgtagcatctcaagattagggacatcacagaacttgctagattgagttaggacagcatattcctaaggaagaaattgatgcaattgaccggatctctttcggaaagttcaattctccctcttttactgtatttttcagtttacactattttaatgagtggaaataataattatttggcctagttcttgaaccatctgtagtacttgttggtcatttttcatgttgaggcagtgtgctaaattttgcaagtagaaagaagggtaagatgcagtttcttgccctagagaacttaaatctagtgaagaagataaagcatgaacaaatgaaaagtaatggtacaaagtggcagcataaaatcaactacacaaatagttgatttccagatgaacagagcataataagtgctgtggaaattcagaatatcccctatgtgttgtgctgctggttcatgaagagggccttactaaaccgtctgcacaaaacaagccagtccctcatatgccctttcctaagaccaagtttcagacaaaaatcttttccccagtatcctaaaatataaaaagcatgtgagtctctgtcttttgtatagccacgggggttgcagggcaggggagggtgcaggaaaaaaaaatagatgcaatgagaatataaatagtttttttgggatttacgcatttcaaacagggttaagttgtatatggctaccaaagcttgacggctttgtgagttaaaaacaaaaattatggcatattcttttatttcaagtgaaaagttttcatctaaaattcggtagcagttaggaaattatggctcatttttacctcctggaagcttggaatactgttttctctggaaaatgctttgctattttatcagttgctttaaaatgatgaaatgcatgtttggagttctctggtgggtaaaccgttgattcattttgaaatacctaagccatttatgtttttgttttgaaaaatgaaattcaagaatactaaattggttcacattttgttaaatgttctgaacccttctggttgtcttgttggtgttgtttcaattgtattatgacaaaattagattgctttgggcacttgtactcattaatattcatcctcattatcctcgagctgtcacaggaaaatagtgatatttgggaaaggtctgtataaagaaagaaggaatttgatggtgcagaattggacatctaacctcatagcaacttagaaccaccattttcttttgcagaacctttgctcaaaactgaagggcaaaataataaaggttgtttttaatgatttatctatatatctgtctgtgtagataaagrtaaatatatagatacacatgagtgacaagtgaaatacatgccttttgtctccactttgttctctgattagtgggttgtgaatcacttcttcaggaatactttatagaagtgaattccattcatctgattaaggaacaagttggycttttcatgaactgtcatttttgacttgaatctggtactgttttttggtggctttcaggccacagaaataaaccacttttgtttgcaaatgagatagaacttaatgaggtttgagtgtttcctggatttgagtttcttcagtactgcaccccaggtgatcttaggaaagaaaccatccactgtgggtacttctggcttctgtccagagaagattatcagctttggtccaaaaattgatttaaaagtagtttacttctttttctccaataaaatatttgccataatttaatgtctttaataccaacattttcttcatttcctrtggtagccaggacaaatgaagtatttcagatctttcaaaaactcttaggatgaaaggtaggaatttggacttaggtttttaaaatagtgtgtatgtaaaagtgcaaagaatggggccctggctttctcttctcrgagtgttccacagtaacaacatgaagacaatccaggtacacaagtttgtatgtgccttagtctgtgtgtccaaagaggcctcttacttaggtcatatgaacataagttatacacttgaaattcactactgaaaaacaatgtatttagttcgagttctgccaccccaaaaaaatcaacgagtaattcaactgacttgcagttttacaatatttttrtagacttctttcagcgtagatgcttttggacatactcatttgtttcctaacctgatgtgatattgtgctatttttaaggggcttttaaaaaatacgctgtgttgggttttgccttgaaaataggctttatttcttttttgcctcatggccacaaaaaaaggatgtccatgatcaatgatctgtgaatttcttttctgtaaacagaaagagcatgtaactgctttctaattgttttggagaatgtgataracattagtaktattattattggcttggagcattttccttaatatgttggtaactacttttgtcagtgaatattagtgtagccactgttggacacagagcaccgtcagaaagctactgaagtggtgctgcaaagtgcagacatcttcagatctttactcaagtctgtgcagagaggtctttcttggtctccttctctactttttagcctgtctccctcttctcactrtaacacttcatattccccttccctgctctattatttttctcttttagcattcatagttatctaactttctgtattttttctctttatcttgtttagtgtctgtcttcccactagaatgtaagcttcatgaggacagggattagtgtctgttttgttcactgcatctctagggcttacaacattgtaggtactcagtaaatatttgttaaatcaatgtgaaatgtgtcatttatccttaaggaattgaccttcatggtagaagtgtaacagaaccacctatatcctacttttcatccacatcataactattatgtgaataccttggaagtaaagcaaaataagcacttaactaaagagacgctttatattgaaactgttgttctgggtttctggaattagtactctgaaattggctccctctaggaaggcttgtgaagagagtagtgttgaacagacatgacagtttccargaaagcatagttggctaagaggagtaggattttccaagcaaagagtgtgacagtggagatggctggggctaagtcaggcagaatgtgttcaaacctgtttttctctgacctgagattgcggagggaatattgggaaggtatagttacctggtgaggagagccagttttgtgaagaatcaagaatgaggagatttaatttgttatgcagatgtctgggaaccacagcagattatcaggagagcaaaattgttagtcagaattacatcgttagaaggtaatccttaagttttgtagatttctagaatgtaaggaagctctcagaggtgccataaggtgagtatggcctaaggatgtggctatggcagtgtagcaaaatggacaactatgaaaaatgtctagagaaaagtgcaacatagcttatcaacggtgcccaaacaaataggaaggatgagaactttttcaagctacagatttcagtagttttgctgctagaaatgctttaaggaaaactgttaaaaagattaggaatgggaatatagataaccggctcctaaattttgcaagtgggaccgtcatagaaagctctcctataggtattgagaaatcgagataccacgtaagtttcaagaagcagttttttttttctttttggtcaaaactaatgacaaattctgtccccttgtttgtatattttaacttagtgagacaggaaacatttattctatagaagacttttaaaatgtagtttaaacaagttgacacatgcttactggttaatgaaatgtgcatcaacccactccaaacaccactaatttgacatgaactaacaattaacttttcttactcactgtcaaaagtatatcattctgccttaacttaacgctttaccttctaaataaaatttaatcttttaaataagtttttctgctatgttttccttgcatatgtcttaaatttcttctttcgtctttgctcactgaagagcattttctcccacattctagtgactaccagggtttgtaagcctagagcaccatccttcattctatctagcagcagttgagaataataacagccatatttctatatatggagctcctccaaaggcctagcctgcattaagcttgttaattcttaccacagcctaggtattacttttgttttacaagtgagcaaactgaggctagaaaagaggaaatgacttcacacatgttatgtagcaagtacttgacagagctaggattcaagccccctgatctgtttgattctaaagcccgcacgttttccaccacagggcacacagtcccaaaccattttacttaaacacagtttgtgtgtgtgtgtgtgtgtgtgtgtgtgtgtgtgtgtgtgtgttgtttttttgatgtacctctttgagccacccatgcatttttggagtttcttgctaattttaattttttgtaattatgtttctctatttagatgtttaaatccatgaggcgtaaactttaaagtttcatgccttatattaatcctttatagtccaccaaaaatgaaacttttttcttccttttttggagtggacatgtagtcactgcctttttggagaatgcttctttagtttgaagctttctttattggactaaaattactttccaattaaaatttaactcagcaaatayttactgaatacttgccatgtgctagctaaagataaacaatgtcttgagggcatgaaagtgaatgagatacctggccttaaggagctcttttatattctaggtcaacagaaaaacatgtaaatagtatctataatcactgccccaagatgatgctcccagtgcccaaggccttattgtacatttcatttaactaagtgtgttaaaatcaaattctaaatgtagaatttttcctaggtatgccttgcaatagctcattattcccagccaacagacctccagctactctttgcatttgaatatgttgggaaaaaataccacaattcaggtaaatatgaaaatattaaatattgtgactaattttacatgtgtaaattttactcttatgtttaccggaagcctccaagtacatgagctttaatgattgtagaattactagcttcataccttagagaagtaagcactacatgctaaaagagccaatagtttgtcagattatttcttgacaagttaccaggaagaacctttaatgctatgaatatgggcttataagttatgtcagatatttaatctccagtcaytggcttgtattttatgatgaagaatatataacccaccctttttaattgatagcttgagttaaagtaatcttatcttttaagaaaactggcagaaaactaaaagatatattaaaagcataatcttttctggcaaggtgtgatttcatgcaaaagctaaagtgattaaaaactttttgtggacttcattaagattctcagaatactgagtttctrtttctgagtaatactgatgaaaggaagatgagcatttttccaaggacaagtatattctagacagcttttgtgaaagtaaatagttttgtctatatatctgacagtcatgacatgaccagggaagattccagatgatcatgcaattctgtacattctgtttcgtacaaatgtaattttaataaacaatttttaaaaatatcttgatagagaaaaacaaagagccgtgtctcctgttagccccattgtcagttagtgactgcaagtcagttaactgagcgaagcctgtgttcttttatttaagcaagaaaaataaatcagctgtgtatttataatgaaaaatccattcacccagcatgctctgggccatacaaattattaattgtactgaaattttatattttgttaccacgaaacatggtagtaatttaaataactggcataataaaagtatattccagcaacactatattgtaaatacattaaaatgtatcagtgtacggtatctgaagatgcatgtgtataagtaaattttccttagtttaaaagataactacctttctgttaagcactgagaggaccaaaaaaaaaaaaaaaagaaaatacagtagagataatatatgaaaataatgctttgcagagcagcttttatcatacagtattatatttatagaaattgtataacaaaagtatttgtaacttaatttttcttatcgatatatacataattgtaactgaggcttaagcaatacagttattttttgaagtttattaatattaagtaaattcacttactgtctaaaaataaagtatacagatcctgcactattaggtaaacactccttgggatcatcgtcaagctacagaacagtgatcaaggttatcttcaataagatcctcacccagagttgcaagggttgtaggagtgagtctttgattcctgctcaactgtttatgatacagaccagttcttcatgctgctgtttttccaatagaaatgattcatttcagtttacagatccataacttctacagtaatgtagtgacttgggctcagcaaagacagtaaacttcattatacagttggtaacctgatgcctgcttcagttactttccacatttttcttcattcataccttgtgggcatctctggtttacagtactttagtttatccacccataggtcttctactactggaattttaaaatctacatcattcagttccactatttcttcttatatagcttattgataaaatttgatgattaatactgaaaatattcagggatgcttttttatattacatccttcagactcctcctttgacaagtacctcataaacataacactggccatagttttgttaagattcctcgtagggtaacatcctttaatatccttccatgctgttacagaagcataaatactgcatctttaagatcaaaaggagcctgaaatttccacacactgcagtcagaattcattaatttgtgagtgaaagatgcccactcatccactcttgaacttctggatgacaccttgattcattggctggattaaagaagtcctttttgcaggcaggtaggtgacaaagctgtttccacaaataagatccaaagttggaggagctcccctgcagttatctgagaaaatgrtattttagctggccttagtcactcaggttttcattcatattcagtatcacatgaggaaaagccatctctgaaaggtcctgcagtcatcccaacacttctgtgaatatcctggagtaaagtaagatgtgtagcacccaggctttggaacatcgctttgcacaaacaccccaggagatattactagcacaaacaagaacaatgattctgttttttctcttttaactttaaagaaaccatgaggactctgttttcatcagtcagattattattgggcaaataacgtcaaaaaagtacagattcatctttcttatagaattgataagatgtcagattatgcttctggaccaaaaatattgaaagtttcatgaagttatctgcagcctagtgtcagcaactgcttcatgacagacatcctgcttacagatgctgtgatgtaatctgaagttgtaatgaaatttcacatcagaagttgtacattttcagtgacatttaattttatcctttttattaacatagatcttgttattagattttccttaaaatgcctatttgaaaaacacaaggtacacaatccatttgaaacagtataggaatttttaaactttgttgcttaagattctcagaatagctataaatgattgttgaatattggtggttccagccagctgtatacatcaggattactggaggaacctttagaaatgcagccatgttggctccagcacaggtcagaatctcccagttaagaaccactttgttgactcatgcttttgaactgattaatactcacagtcctctttttaccttattcctttgtgacttctaatttctgcagtatcatcagagtggtgggctttcttttcatatattgatgacttgtattttctgttgcttgaagccattctagatatcaattggccaattcagtggaaattatctaaaataaccccaacagtataggattagacttttgtactgtcacagaagatagccaaggtcaggagcatataatatctatttcackcttagtctgctgtggaggcatgtcataaaacctcagtcaggtagcggtcagcggagccaggtctccctgagatgacccacctttcactgtgttggtccagcccctcatagcgatccactcatagagcaggccactggtatcaggtcttttgaactttggaaagcattcaaatttctggactataaaaccagattgagtatacattacacattctgtaatgagctctaactgaagatgatatagaacatataaaagacctagtcccagttgtttagaaaagtacaggatttgaacgagagaaatggcaaaaataacaaacgatagaggatctcactttatgcttagaaaatatagatgttctcattttaygtttagaaaaatttgtgtaagttagatcttgaaacaaaatttggccagagaaacaatctcataaacaatagcacattcttagcctagcttattaaagtctgcaacccaaaacactaaaaagtattcagtgctgctrgactcagtcaccaaactgttttacataactgttaaaattttgagtgtgttttttataattcttttttggtggtggtggttttattgtttggctaggactgctggttcagtgttgaatagcagtaatattagcaggcataatttcacttcccgcttttaatgaagatgctcttagctatgtctttttgataaacaccctctatccagttaaggaaattcccttttattccaaacttgctaacgttgttgggtttttttttttaagtcataaacaggtatctatcatatgtttttctgcacttacagagctagtcattcatatagcctttttcgtgtttaatgtagtcatatgatgaattacttagattttctaatattgaatagctttctttgttttggtgcactggaacactgtatagattgggctttgccaaaaattccatatgcaggttttgtgttctggagagatcataactcctaagtcttccttctcacagacacgctttttagttgtgttaytccagagaaggccctgagatggagtgggactctaggatgtgggcttagaatgagcattttwctatctatctatctatctatctgtctgtctatctatctatctgtctatttatttttgagacagagtctcgctgtgtcgctcaggctggagtgcactggtacgatctcggctcactgcaagctctgcctgccaggttcacaccatctcctgcctcascctcccaagtagctgggactacaggcacgtgcygccacacccggcttatttttttttttttagtatttttaatagagacagggtttcaccgtgttagccaagatggtctcgatctcctgaccttgtgatccgcccacctcggcctcccaaagtgttgggattacaggcatgagccaccgcgcccagcaacattttactttttaatgagctttgttaaaatcagaatcactggataattctgataccacttaagaggagtccaaattcctaacatagcccctccgtaatctagagcagcaccgtccagtgatggaagtagggcagccactagagccactagccacatgtggctgttaagtacttgaaatgtggctagtgcaactgatggactgaatttttaattttatttaattttcatttcagtttaaatttaaatgggcttgtgtggctagaagttacgtttttgggaaacatactagagtctaggccctatttgatttcccgcctctcttccaccacctgttgaatccctatgctctagctgtatttagttacttgatattatacagttayaccatctttttaaagttcttctctgtctagcatgcctacctcctcctcaccagctacctggcaacttttgacttgttccttagaactctctttagttgtggtcaagtcatgaagcttttcctgccccggcctctctctgcagcgagagttaggggmcttctcttttgcatcttcattgcactcagacatctggtactctgtgattatcacacttattaatgctctcaagatagagataaaatcttattcatctttttgctctcaggcattagcacatggggagttctcagaaaatacctgtcttataccaggaattaatgaataatcagtaggaatgagcatgacatgttcatgggacgttggagggtagtgcatggctgcagaggagaatgggaaatgaaggtcagataagttacgtgagggatctctaaggccaagagaagccatttaggtttgatttggttggaaaatgagcttattgaaagtttaaggcaagggactagcatcatgaacacatctttttagggaagtgtgtcttgtggtaagctgctggctggtttaaatgcagcagaatattcyattggggatgccagctgggagacttgccacagttgcagcctgcagcagaaagaccctgggccagaatgggttgtgccatctgtcaccagatattgccaaggtagatctggctgactttgtgggacagcttgtttctcaataatcactttgcaggcactcttgaggctgtgagcatgctcccagaagatagcattacttctctctcagagcaggctcctttctaaggaaatgcaagtctaggcctgccctgctgtaatcttcatgtggaaacagcactctagcaaagaacaaggaacctgatgagcttttcaaaggaaaatcgagtagatacaggaaaccaagaattttctaatgagcagatagaaaagagcaggtaggtgagaagttggtattagaaaaattaaagatttgaagggcttgaggacagagatgattgttggatgtttcatttttccaggcaaaatatgtggagcaaataatcaaatgacatggacttaccccacaattagggacggagatgaggaagggttaggaatagtttctgttagaatggtagggatggaagacaattgaaaattaaagagaaaataaatggagaggaaatctaggcagcagccattcttcattctgggggaaggtggtcaggaaaaggaaggaagaaaaatgtatagcatagtagctagagtggtccggcgtgatcaaagtgttttcaatatcatgttgactgacctgtttacgtttgaaggcagagaagatagagccagtagaaggagagaaaaatcaaagctgttttacggagttgtgaaagagctggataaggacaagactaaatgagttatttttaggccaggcrtggtggctcatgcctgtaatcccagcactttgggaggccaaggcaggtggggcacctgaggtcaggagttcaagagcagcctrgccaacatggtgaaaccctgtctctattaaaaatacaaaaattagctggacatggtgcatggtggcaggtgcctgtaatcccagctactcaagaggctgaggcaggagaatagcttgaacccggggggcggaggttgcagtcagccgagatcatgccagtgcattccagcctgggcgacagaacgagactccgtcaaaaaaaaaaaaaggagttatttttaaatggaaagggcaagacagttctcggagagacttggaaggtgaagcaggttagagacagcacatcagagtatgcatgtgacaggaggctcagagaagagggaatgctggggaaaatgtgactgttaaaattcataatgttgctttttcctacagcaaacaaaattaatggaattccctcaggagatggaggaggaggaggaggaggaggtaatggagctggtggtggcagcagccagaaaactccactctttgaaacttactcggattgggacagagaaatcaagaggacaggtgcttccgggtggagagtttgttctattaacgagggttacatgatatccacttggtaagtacaattttagcaatgttatatatggctggaagtcacttccctatgaataatcatcaaactctgttgtcattgatgactttcaagttgtggttaatggaatatttgtttttaataatgttttaataaatattttattttaaagatcaaggcttattaatataaattacggtatcccttaaaagaagttgatagtaattccttactgtcatcagtagtcagtgtttattgcattatatcttgtaactggtgttttacagttggtttgttcatatcaggatctaaagtcttcacattgaatttgcttaatatgtctcttaggscttttaatctacaacagtctcctcccacctcttttttacctactatttgttgacaaaccaggtcatttgttccctagaattttccacattgtagatattgcttgttttatccccagggtgtcccgtaatgtgttcctctgtctctaatatttcctttaaaatgttagcaacagaggcttaatcggattcaggttcagtacttttggcaagaatgtttcattaggtggttctgtgttctcctgtggagtcacatcccatctcaggctggctggctgtgtctctctcattgtaatcctgacgaccagtgggcttagagggtgtcaacctgatccacccagtaaaagttcccctcttatatcatggtttgagctcccaaaaatagttttgcactgggagggaggatcattgctcagatcgttatttcactaaggattgctattgttcaccttctaattctatcatctttctgcttttatcgaacttttctctcaccagctctttagtgccctgtaacacagttcgtacaagaaaagcaatataaatatctacattttctcctttacttaacatttttccaaatagtgagctggttccctaggggatcttctagaagtgactaggaatttgtttttttaatttgtttaatgtcatttagttattatgaattttttggaatgccttattttaaggtcattgaagtcctcattagttcacgcacataagcagctttttagaaaaaggaagaaaagcactactgtgttattactggttaatccagtaccaggaacttctagtacagttctagaaaggtgctttgcagcatgtagcttgtatcttttgcttcccctggaatttaagcttcaaggccagcacactctggtatatgtgctgagaaacatgtgatggggctgcccagccacgtcggggaaagaaggaagatgtcttgaggtgcagtgagcttgcccactagtaattrttgtctgatcagtgtcctagagtctgactgtgccttttaggcatggggaaaggtagaagagggacttaagaagagagctaaagctcctggtagatttgtggggttttcttttgtttgcctggtgtccttaacsatagcctgtcaagagaacaaaggtggatatatttttcagtgaacacatacatgtttaatagtcattctggaaaatatttctaataccttctttggaattttctcatgctataaatttagatttttaagaattggtcatatcgcaccaattttagactaagaggtgtaggatcgtcactgcccccccatggtgcccaccatgtggctactaagtggggtgcacattaaatgcggacaacttgcttaattatttatagggtctgcaggagcacactattcctgyttttagcacagcactcatataattttttttttcccctccagccttccagaatacattgtagtgccaagttctttagcagaccaagatctaaagatcttttcccattcttttgttgggagaaggatgccagtaagtgatttctgttggattttatgaatgctgacgtccattgtttctacacagtgaagtaaggattctacctctcccctagctctggtgctggagccactctaacggcagtgctcttgtgcgaatggccctcatcaaagacgtgctgcagcagaggaagattgaccagaggtaattgagaaatggtcattgtcactttagatagttttacttgttgtgtaactacagtgagttccctactaattgaaaataacaaaatgcatagtcttactaattagttagcaccatgttttatataagaattgccattttgaaaagaatgtgataatattaaaattaactgacattggagttacactaaatataatttaattatttggtttgtaagacacttgtggatcttacattgctgacatcttgctatagcatttcctataacatactttcaaagtgcagtgatatccagttgagacacttcaggataaatcaaacttttcttgtagtttgatgtgtcttatttaggtctacacatttgcaatagctagaacagtggttttaattagccaccacagacgagtctggcatcatctgctgtggtcattagtaacctccacgtcattaaagtaggaggcctttctcagttgtgctcatagcagtgagcaatactattgatcactctctccttaaacccgcctgggccctcagcctctgctcctctccactctcctgaagctcctcttcctcactggcactccgtgccttctgcagacccatcctcttctctccagacattacacagattctaaggccgcttcctcatgttctgtattcttttcctaaagaagtttccccaagaatgtggctttagtgaccaacacatttatatcttcagtctaccttgacttctacatggaggtctcaaagaccccttaaactcattatgtccaaaaccaaactcaaggatatggcctccatgccctcccccagcctgctctcagaaaccggggggtcatcctggatgccttcctctttctttcccttccccatcaccaatccctcctcaggttttctcacttcacttttcagacaccttgcaaacccatgtgcttccacaaacccagctccacctctgcctgtgtgttataagtgctatcatttcctccttccatgtctcctccacccctgggctccagccccctggactttccctggtgttttcaacctcctgacattgtccagcgctcttcccttctggactgccttctttgcactcatctgggaacactctccacgcttacccacttggcactccttgtttctttttttttgagacagagtctcactctgtcacccatgctggagtgcagtggtacgatctcggctcccgggttcaagtgattatcatgcctcagcctcctgagtagctgggattacaggcacccaccaccacawccagctgatttttgtatttttaatagagacaagatttcaccatgtcggccaggctggtctcgaactcctgacctcaggtgatccacccgcctcggcctaccgaagtgctgggattacaggcgtgagccactgcacccggctcactcattctttatatctcaattcaaacatcatttcctcaagataagccttctctcccctctaaagtttgatcagacctcaaaagtctatgttcttagagctcctgagtttttaacatttatttcagtttttaattatatatgtgtgtgttacagtttgattaccgcctgtcgtttttactccatgagatgagggactatgtctgttttgcacaccgttatatatttagcacccaggaagcatatatgatatttattcaatacttgttgaataaatgaggagtaaatgaacagatcttataaaacaggcttatggagcctcagaaattgtgtatcacagtcctttttggtacagccagagtgtarggtttttccactgtaccgtaactgacagagccatattcactgaagcaaataaccatcaagtgaccctcaaatgaccttcagttttctggaaaggaaggtgactatagttcacacgagtccgtattctctgtggattttgatttacctgaactccatttggaattaactgtctgctgtgtcatactccaagccttgttttcattagcatacatgctgatgaagtgcacagttaggaattttgctgttaaagggacaattgtagcattgttgggtgagagttagttataaaaccttataatcagtggcagtttcagtgatttattaagctgaaaattactttaatgccttttgtgttttcagctatcctattcttcataagtagaacagatcctcttttttgtccaacctcgtctcctaacctttttccctcaggtgtgtcatctagccccactggccttctttaggtttctcagcagccatgcttgttacctgccacagggcccttgcactagctgccctctgyctagaacattttcaccccasatctttacattgcttctctattcatttaggtttcggcttcagtaccatcttcacagagcagctgtttttcaccatgtgacctaaagtagcctgtaatctcatgattacatcatccatggcattcaccacagcccatttatcttatcatctaccccaccccacgaagaatgtcaaccccccacttgcttgggcaacaccagtagtaaaattggaatgatacagggaaggttagcatagcccttgcacaaagatgacatgcaggttcatgacamattacatattttaatgaaatgggagcatattcttgttatttaatttttaaaaatcagtttatcaagcaaatgtacagcgccattttatttttcatgcctacattaaattccatacacataaaggtgcatagaggaaacctagaaagattgcaccaaaattttagaattctgagtgattttgtttttcttatcttttctaggtgtttttaaacattccacactaatttatattactttttctattcaggaaaaaaaaaaacaacagcagggttttgttttktttttttaaagtggtgtggaagttacccattgaatatagatgggaatcccagtcctggctgtttcctttgaaaagatctagagaccccatggcacatatttatagtagcccattctctcctaagaatagaggaagggtgggaggaattttggtgaatgtctgtacttgcagttyatcctacagcaaatcgttaagactgtgggaataggtgctttgcattctctagagctggagaatgtgcatctggtttgccatccttctgtctacatcatgtggaaagatgtgggagtgtagggtctccttaatctaaatgcagtgctgccccgccccccccttggcagtgtttctgtttcccaggcaagtgttccaatggatgtgctttattttctcccatcagaaataagggaatgagcccgggcgcggtggctcacgcctgtaatcccagcactttgggaggccaaggggggtgaatcacaaggtcaggagtttgagaccagcctggccaacatggtraaaccccgcctctactaaaaatacaraaatttagccaggtgtggtggcgggtgcctgtaatcccaactactcgggagggtgaggcaggagaatcgcttgaacccgggagggggaggttgcagtgagccgagatggtgccactgcactccagcctgggcgacagtatgagactccgtctcaaaaagaaaaagaaggaaatgatctaatttgttctgtgcactgcacgtgggggtggcagtgaggtgaatggcagcattctgcagtagtcaaagccagatgggtgggagaagttgggtgctaagagggaaacaaagtttacctgtcttctccttgatttcactctcagttttatgagaatacagaaaaatcatgcagagaaacctgatggaatagtctctaaaactaaaaaataagataagcaatggttctgtcttaaaaaaaaaaaagtaaactccatgaaggcagagaccttacctgtctcattcctctctctatcccctggtctatagtaagggtyaaataaatatatgctgaaatgaatgagtaatgactaaagtatttttgtctttattaggatttgtaatgcaataactaaaagtcacccacagagaagtgatgtttacaaatcagatttggataagaccttgcctaatattcaagaagtacaggcagcatttgtaaaactgaagcagctatgcgttaatggtaatttcattcttatttcatatatataatgaacacaggatacagagttgcatgagatgtcaggaaaagtgatgttcttaaaaatgtagaaatagatatatttaaggagtctatggaactatttgyacaaattatatattattgtatgagaacttcagaacctcctaaggaattaagtttaaactactttttgttttagagggggaaaaatgagtgtattaaatttccttcagatgatgaaaggtataggagaatacttttataaaagcatttgctgagtagaacactgtattaccttacagacaaacttaytaagattgtaatacatacagttatactttgagataggtgacttgacatgggtatcaaacagctgtgttatatctgtagcatcagaattctgatatatctgagcaaacgtaccaggtggctttcatgtgtcctgcgggatgagtcacatgaaagcatctttggtgtaatgtgggtcctcctcaagagatcctctaagtcaccagggagtcagcaaaggcagccttgcagcagatcttgagcaatgagtaagcacttccctgggggagggccttgcaggggcggggcaggggcaagttgttgaaaaaactagtgtcctgaatgattatgtgcactctgggcagggcagtgaggatgcctgtcctcatgcagtggctagccctcggccacgtgagccatgcacagaggcaccactggcagcaggggtggggcagggaagcaggagggcaaggcttgcagtgagaaagccaagggctagggcctgggcagctgacctcacaggtcaggagggccaggatcaaggcataggctgagcagggacggctggaattcttagctgttgggagtcagagttggttggactccaagatttccctgaaagagcgagagagaagatgatggagccccaggggaatgctttgttttgctttgttacagaattgtaatgtcttcttaaatgcttattccatgttattaaagtgaaaatgcatgatatttacttaaagctaacttttaaatattagaaactgatgtatctctttactctgatagggatcrtataaaataaaaagtaaaaatgtgtatgtatataatttattacagagccttttgaagaaactgaagagaaatggttatcttcactggaaaatactcgatggttagaatatgtaaggtttgtacttctttactttcttttcctttaactttttattttgagataactacagactcactggaggtacaaaaatagcacagagggccatgtacttactcttcatccaacttcccccaatagtaacatctcgtaactagagtacagcatccaaaccaggaagctgacactgggacactggatagctcttactcaccagttcatacatgctgtcgtctgtgtgcatgcccttaacacagctgtgcgattttatcacgtgtgtaggttcacgtaaccaccaccacagggagatacagacctgttccatgacaaggctcccctgtgctagccttcttataggtgcaccctcatcgccatctgtgtctgttgactaccactaatctcttctcaatctctatagttttgtcataagtcaaccccttccttttcataaagggtttatgaatttccctgatgaaaaagtacaaaatgaggccaggcgtggtggctcatgcctgtaatcccagcactttgggaggccaaggcgggtggctcacctgaggtcaggagttcaagaccagcctggccaacatggtgaaaccttgtctctrctaaaaatacaaaaattagccaagcatggtggcacgcacctgtagtcccagctactcaggaggctgaggcaggagaatcacttgaacctgggaggcagaggttgcattgagtcaagatcacgccactgcactgcagcctgggtgatagagcaagtctccatctcaaaaaaaaaaatttacaaagtggggccggttgtggtagctcatgccagtaattccaaagctctggggaggaagatcacttgaggccagtagttcacaaccagcctgagcaacacagtgagaccccatctccacaaaaaagttggaaactagccaggcatggtggcatgtgcctgctgtcctagggagcctgaggcaggaggatcacttgaggccaggagttcacaaccagccgaggaacatagtgagatgcccatctccacaaaaaaattttaaaactaggcaggcatggtggctcgtgcctgtggtcctagctgctcaggaggtggaggcaggaggatcacttgaggccaggagttcagggttacaatgagctgtgatatgccactgcactctagtgtgggtgacaaaatgagagcctgtctcttaaaaagaaaacaaaaattacaaaatatactcctttgagaaatcgtataagtaactaaagaaactttacggtaatgcgaaagctatgtgcmttcagtagaaagcagtcaatcctctcttgtgatgctgagtagcagcagggagccacagctgccagtcagccacacagtctcagtttagggtattttcagcttacagtgggttatcatgggtcatgagttatgggaatatcatgatcagagagcatctgtaaagtgagaaattagatttgcttgatttcaagtactttatgtatttgtagtggaaatttgatttttaacactrcttttccttttctctcttcagggcattccttaagcattcagcagaacttgtatacatgctagaaagcaaacatctctctgtagtcctacaaggtaactaaagtaactcctgaaagcaccatgaccaccataccagccagccttggtttactgcttgtccccattcaagtaaatcacatcmgttttagctatttcttatttactacagtaccatcaaatacattacagattttgcacatcatttgagtaaaacagtggcacaggctgggcgcagtggctgaagcctgtaatcccagactttgggaggtcgaggcgggcggatcacttgaggtcagaagtttgagatcagcctggccaacgtggtgaaaccttgtctctactaaaaatacaaaaattagtcaggagtggtggtgtgcgcctgtagtctcagctactcgggaggcygaggcaggagtatcacttgaacctaggmggcggaggttgcagtgagcagagatcgcaccactgcactccagcctgggcaacacagcaagactcaaaaaaaaaataaataaaaaccagtggcacaaggactgcaaatagaagaatagaaagtagtccagtttttaccctttattaaattatccttcctattttatgggaagggtgggtcccatcccctaatggattaatacttagtgttaattttgacagggcattctctctctgtaattttgctgtctaatttgtacaaatttgttttagtttaaataccttctggctcatgctagattatgactctaaggaagcagtttgagatgaagaaatttagactgaactgctgaatagctagtaatgtaatatttggtaggaataaacggtgatgtaaaaatctttcagttaagcaaaggataattacatattaaataacttacagctaatagaatttgtaagtttgcagataaagttcaatagactaaaaactaccttcgtataatacagtagtrggycctttgtacccatggsttccccatctgtggtcaaccaacccaggactgaaaatattggcgggggaaagctttggccrtaatgaacatgaacagacttttttkttgttgtcattattctctaaacagtatagtataacaactgtttacatagcatttacattgtattaggtgttataagtaatctagaggtaacttaaagtgtacaggaggatgtgcataggttatatgcaaatattaacatcattttatatccaggacttaagcatttgtggatcttggtatccaaaggaggccctggaatgagttccccatggatactgagggaagactatatactcatgttgcatagtatatgaatacaaaatgttgcttaagcttgcagaagtactttttttttttttgagatggagtttcgctcctgtcacctaggctggagtgcagtggaacgatctcagctcactgcaacctccacctcctgggttcaagcgattctcctgcttcagcctcccaagtagctgggattacaagcatgcaccaccacgcccggctaatttttgtatttttactagagatggggtttcaccttgttggccaggctgctctcgaactcctgccctcaggtggtctgcccacctcagcctcccaaagtgctaggattataggcrtgagccaccgtgcctggccaggcttgcagaagtacatttaacaactgccaaacttgattgactttaacarggcaaaaatctttaagactcttagaaaaaaatcaaatagtaatgtgtcatataaagtaatcctgaactgatacagtcagagtgtgtgtttaactcacaaatgcatgcagagcctaataatcacaatttctctcatccagtgggtgttctcatcgtattggagaaccctactcatcctccatttctccatgcatttgtaatagaaaaggcctcagaagtagcactgaaccttcattttactagcatttttatatacgtttatttttaaacagtttgtttagttaaaaatttacatactatggaattcacccatttttaatttgtaattcagtaaattttagtaaatatacagagtctagttttggaaatttttcatcaccccaaaagtcccagctccaggcagccactaatctttctgtctctagattttccctttctgggcatttcatataaatggaatcatacaatatgtggccttttgccgctggcttctttcattcaacatacatgtttttgaggttcattcatgtagtgtgtatcagcaatcttttcctttttatttctgaattgtattccactgtttgtaaatgcattttgcttacccatttacctgttgatggacatttgggttgtttccactttgtggctgttatgaattatgctgcttcatttatttagatctttcattttatcagcagtgttttattatgtaagtcttatatttattttgttaaatctcttaagtattttatttttatgtcactgtgaatataattgttaatttcattttcaggtttactatgtactcagattgttgtgtacagaatttctgtaaccttactgacctcatttattaattctagtagttattttgtggattccgtaggagtttttacatacaggatcatattgtcttcaaagacagtttttacctttttctttctgatctgaatgccttttattttctttttcttgcctaattgctctggctagattctccagttcaatgagatggagaagtgtagagaacagacatccttatcatcttcctgatcttagggagagagtatccagtctttcaccagtgaaatgggaataacattaattgtaggtttttgtggatgtctctgatcagtttaaatatgtttacttttattcctaatcaggaatgaaggtagaattgtatcagatgctttttcygcatctaatgagataatcgtgttggttttgtcctttattactgtggtacgttactacaattgacagatgttaaaccaactttgcattcctggataatttggtttactcatatttttattgatttttacatctgtaatcataagggatattggtcaatagttgtcttctgatttccctggctgactttgatagcgtggcaattctggccttattggaaaggacaacaactataaaagacaggagggaatcgtttgccacagcttcagttggtagtgaacagtcccactctccccattcacttctcagtattgccatgtggcctgtcagtagaaagattaccttatacttaataccttgacaaaagagcagtagaatggagtctagacggrttttctaccacaaaccattcgaatgtaaaaagtatgagtgatgagcttctattatctggcaaatatccatgtataaaagaccatctcctattaaatgctaatttagtttatctacaagtctgtaatattttagagttgctggaatccagtaaaatttccttatacagatttggaaggcagcctaggtgtgcagaatactaaattatctagtttacctttccttccctttctctctcagcatttttctatgttgtaatcattttctttccattttattaacagaggaggaaggaagagacttgagctgttgtgtagcttctcttgttcaagtgatgctggatccctattttaggacaattactggatttcagagtctgatacagaaggagtgggtcatggcaggatatcagtttctagacagatgcaaccatctaaagagatcagagaaagaggtaacaaaatcttgatgcctttttatcagtctttaaggatacacaaaataaaatttgtgtcattaaaagatgaaggggcttttaaaaaatactgtatttagtacaacttaatttccttagtccaaagctaactaatggattagagttcaaattgatgtacttattataaagattatcgtaactatgaaggtgaaatttttaaaagttgtctattgaatttgtctaagtggaaaactactgaaaaaattctgaataaaatactgaaaaacagataacaagcacattggctattttgaaaaatcacttttggaatatcatattttcttaaaatgggatacataggttaagatgaaaagtttgagagggccacctttgcaacagctgtggagttagtggctgcctcggatctctagttaggctgcggaaggccttacaaatatcttaccggccaggcaggtcagtcagatcagtttttagaaggttgtttcagagagcgccatttgacttgtggtgtctcataaaaaatagtggtcacccgctactgcacttggggacacaccacgtgacctaggctcatcccaaagtgttttctgaaatatggggatgttttctggatgctgagcctacaggatcaaccaaacattagagaagtttggttgatggttttgttttgttatataatctaaagaattgtttctaagacatgcttaaacacatattttgctcttcccccttcatatagtggcaacccgctcaactgtgtgctttgctgtttcaacttgttacatgtactgggcaaataagggttgtgatgtttatcacggttgaatgttacttcttgggtttgatagatgtgtatagctcagcttagaaggcaagtgttttaggcttcgatgttttctcattcatctcttctttaacatcagcagtacattttgaagtaaatgtgaacggctgaaggataacattaaatgatcccattgtctctttgtatttgccagtctcctttatttttgctattcttggatgccacctggcagctgttagaacaatatcctgcagcttttgagttctccgaaacctacctggcagtgttgtatgacagcacccggatctcactgtttggcaccttcctgttcaactcccctcaccagcgagtgaagcaaagcacggtaagcaaccctgtggctgtggctacgttttccctgtttttacaactttatcgaggcataattgaagtataattcactgcctatttaaaatcttatgatttaaaattcttactgccattttcagctgaaatttctgaatggattattttgaagacacaaaaatctaggaaattatttttatgaatgaacattttttgttttactctaatgtaaatgttttgtagtaaacccctttaaagatgtaaattactttaaccaccttaaatgtcatgcttttgtatttatatttcacatttgggctattgggtagtaaaaaacaaaagccctgttacacgacatttatttcctaggtcagtaggataaaaagttgtacaaaacaagattattttccttcacgagtttgaagtttctggtcacaattcattgatgtagaggatttatgactaagcagggtctcaagccaaacttgaaaccattctgaaccaaagtgccatttcacccacctcgaaccaacaacagaagctgacaaatgccgtggagaccattgagrgaaacagaaaggggcagctcttgtggaccttcaggaagcctttctaggaagaggattgccctcatagtgagctccggggtcttcagcctcagccgtaaggccctgggctaggcagtgtgacctagggagcgggaaacctgagttctggccctggtctgggaaaagtgctaggcccatgttccactcaggcttcagcctgagagtccaggtygctaacctgtaaaatggatctgtcaaactaacacttatgcctttagtctcattgtatgaggtgaaacattttgtaaactgtgaatcattatgcaaattttcctaaagacatatgaattattctggatttgttggtataaaagacaaaayacactggtcagttaaggagctgattttatttaggctattgcaggagggagaacttaattaatgggcatcccaaagaaaaggacaaggcctgggattttatagtcagaagacaggggaatcaggagggagggcagtctcagtccacaggagccagttctcaggacacaaaaggcaggagagattgtccagcattgccacttttggggaacccagggctcaaagaaactcaacaccgtcagcctgtctctacaaaaaatacaaaaattagccagacatggtggtgcgcacctgtggtcccagctactggggaggctgaggtgggaggatggcttaagcccaggaggcagagattgcagtgagctgagactgtgccactgcactccagcctgggtgatagagccagagtctgtcccctgcccaccccaccaggaaagtttgacctttccagatactgtgctgagaaccagtgatacaggcttagaggctcctgaggcatggaacgctcatttgttcctaaaatacatgctctcccagttgcttgtttttatttttcgtcaccataatcattcttggggcccctctctgcctcgagctaggctttccccctggccttgtttgcctccttcagctcttccccattgtctcccgtcactaccccgtgcgcacacagtgtgagcctgcaaaaggtgcgtgaggcgaggacaaagactttggggtctggggactgggcagtgcatgggtgggtatctgcgtggaggactcccagcccccagacaccactgcctctgctgcttggctgatgctgtgtgtgcggacagacttctcaccaggaatgaacattactgaattgtattgagggagctgtaaaaaatactttctacaagtatttcctctgctttccctgttcatgttctagtgctctttttaatttggctctttcaaaagccttttctgacaaatactaacatgaatccccctctcccttcctccctagcaggaactggtcattgtctaagggtcgtgattcttaaccgttctcagccccttccacacaggcaaaagcccaaagcatttcttccttttttttccattctgaggccaccttaggtgctagtggccaggtagtgtttatagaaaatctggtctctcttgggataaatatttttaatttttaccttttaaaaaagagaacatctttttttttttttttaagacagtttggctctgtcacccaggctggagtacagtggtacaatatcagctcactgcaacctctgcctcctgggtccaagcactgctctcgcctcaaccacctgagtagctaggactgcaggcgcatgccaccacgcctagctaatttttgtatttttttgtagagtcagggtttcgccatgttgcccagtctggtcttgaactcctggactcaagcaatccgcccacctcagcttcccaaagtactgggattacaggcgtgagccaccgtgcttggccaagaggacattttctatatacttactgaagggccattaaaacacgtttgggttcatgttttactagatttcagctcttaacagtgtttgaagcaaatggattgtttttaatccatgtacatgatgaaatgtcaagtaactaaaatttttttttttttttttttgagacagagtcttgctctatcacccaggctggagcgcagtggcatgatctcggctcactgcaacctctgccttccaggttcaggtgattctcctgccacagcctcccgagtagctgggactacaggtgcacrccaccaygcctggctaatttttgtatttttagtagagacggggtttcaccatattggccaggctggtcttgaactcctgacctcgtgatccgcctgccttcggcctcccaaagtgctgggattacaggcatgagtcaccactgcgcctggccaaaactgttaagagtatgtgtatttggtgcttaatgaatttttacttatttgaaatagaaaattttgtaaaactttacaaaatgccctgtgctgttacacagcttagccatttcttgatgattcaagccgccactgtgccagggaatgccacctggctgtgatgtagtcatggcctcctgactgctatattcttgtcctaataacattcattgtttgcctttttaataatttccaaataaattcttgggggtttttttttggtagaaaatttggagagtactgaaaggtacagaacaaagaatcagacatttcccatcatccagcgactttgtgtctggagttatttcctccagcgaactgttgtgtatacactgctgtggtagcctgctgccatcaatcagctgagatgagagtcctttctccacattgctaaatgtgactgtgcttcatagaaatggtctgggctgccttccagaggagctccatgtcttcctcacaatgcggtggttggctgtcaccctgtagccttgtgttgcctcagtttactgtggtgggaagccagataactaggctgcacccgcccagagtccgggctagaggtggactcctgtgaaggaggggtctcctgtgtacatggtctccatggttttagccacatgctaggaccacagggagttgatcccttccttcctaccctgagtctgtggtctgtgatttgagatcactggctcagtgaagtgtagctccccacttacgaagtaagttataaaattggtggcagtgatttccatccaaagattttgttaatccacttaccaacaggtaactacttaaatgtactgaccgtgtgctcataaaagtaaaatactgtaattatagaaataaattcaacatgtttaagactttctagtatcatgttagtgaaacttctcttaataacattcttattgcccaaagggcacggcttccttggggtcctaaggcagagggcacctgaaaagcacactccttgttcatggggactgtggggccctctgagctcaaaggccaggagcgtctcctctcttgaagtgaaagtgccactctggtgggttttgagggctgcagtacagaacatttaacctgtgtaatgatgagtggctcatctgaaaaaaggcattcatgagagaatctttagttttgcaaatatttatttatttattttgcaggaatttgctataagcaaaaacatccaattgggtgatgagaagggcttaaaattcccctctgtttgggactggtctctccagtttacagcaaaggatcgcacccttttccataaccccttctacattggaaagagcacaccttgtatacagaatggctccgtgaagtcttttaaacggacaaaggtaaatcacagctaacaaaacgtgatgttggctcacacgtaaccaaacacctctttttcagaacagagagcgttaaaagtaaaggcacttccaagagtaacactgctaatgcgggtttctgaggggtcattccctttttaactcaaatgactgtatcccaactttcttcctggtgtctgaggcccacaaagtctcagtacctgagagtgggcagattgcagctttgagcctgcaagcctgatttactaaagccccatttatccatttcttgatgattcaagccgccactgtggcagggaatgccgcctggctgtgatgtagtcatggcctcctgactgctatattcttgtcctaataacattcattgtttgcctttttaataattcccaaataaattcttgggattttttttggtagaaaatttgcagactactgaaaggtacagaacaaagaatcagacatttggcctcctgactgcctctgttcagtttgccattgttcttgatagaatcggccaggtctagtgttttttctagcccgtcttagaacttatccttaagcaaattagtggataggaggtactctcatcccgcccccattcaggctgatagtaacagcctaggtagagtcaacacataaaaaagtgtaattccaggggaggaggattagaataaggacacaaaggaagggaggaaaatgttctttgaggctgaaattccattaatttttcatagtattgagtttatatttgccattgcatccttcaatctttctaaaaagggaatccccggaacataataaaatctcttctgtatagaaaagctacagctccacactaagaggaatgccgtctgccttaaagaatggaatcatcagtgaccaagaattacttccaaggagaaattcattgatattaaaaccaaagccagatccagctcagcaaaccgacagccagaacagtgatacggagcagtattttagagaatggttttccaaacccgccaacctgcacggtgttattctgccacrtgtctctggaacacacataaaactgtggaaactgtgctacttccgctgggttcccgaggcccagatcagcctgggtggctccatcacagcctttcacaagctctccctcctggctgatgaagtcgacgtactgagcaggatgctgcggcaacagcgcagtggccccctggaggcctgctatggggagctgggccagagcaggatgtacttcaacgccagcggccctcaccacrccgacacctcggggacaccggagtttctctcctcctcatttccattttctcctgtagggaatctgtgcagacgaagcattttaggaacaccattaagcaaatttttaagtggggccaaaatatggttgtctactgagacattagcaaatgaagactaaaatagggtgttttctgaacattttgagggaagctgtcaacttttttcctctgaattaacattgctaacctaggcgtttgaatctctaataactttatatgtaagaataatagttggaatttgcactaatatttaaaaacatgttgaatcatgcttctttcacacttattttaagagagatgtaaattttgttcctgtcctctttctgtcattacaggtctggctcttgtaaccgtgatcaaactgttcatgttgtctgctacatttttgtctccatccatttttcctaccacctcctgaaggctatctgatagtcagtcacattagcagccccaggcagcagacaacaggaaagttaggaaatttgtgtttcgtgtcatttttaggagcatctgataaaacctccagcaggttttaggaagtattcatgtatttttctggttactttctgtcatctctaattgaactcacctgatgaaggttcagtgttctggggccagaatttatgattttagatcaccttctttggaaccttagatcactgtgttttgaaatcatgagtttgcttttaacttcatagggtcaactttaaaatgatatgcactgttaattttaaagcatttgctgcagataattaaacttagaagtgcctttgactttaggatacaaatattacagaagaaaatataatttcactttttaaaattggggtgggaaaatcccattgcatatttgaaataggcttttcatactaagcttcatagccaggagtccccagagtcttgttcctctgaaagccactggggagtggcctctggggtgctgattccacagaggtgtatgctgtagacaggagagtgccatctatgccaaaactcgccctcaaaaacaaacaaggcttgctgggaggcgtgctgggcttggccatcagtatttccagtgtggtaaactattgctggcacttccccctggaaataactaatgaggttacgagttgggcacctgcacagatgtccttctctcatagttcctaatgcttaggaatagaggagaaataaaaaaatggattctctcaaaacactgccatttgaatagcgacagaagtgctcccccagcccccaactttggacagcaaagttgaggagaatgagcagacacagttgtttgcttgatctgaatctctctaaagtaaagtatttccaaactgtgtgacaagagcctacctaccactgtagcggtcaaagctgaagcttcttacagcagtg

SEQ ID NO: 94335 - DNA, 19886 bp, Homo sapiens
taaaatgggctgggcgtggtggctcacacctgtaatcccagcactttgggaggccaaggcaggtggatcacggggtcaagagatcgagactatcctggccaacatggtgaaaccccatctctactaaaaaatacaaaaattagctgggcgtggtggcacacacctgtagtcccagctacctgggaggctgaggcaggagaattgcttgaacccaggaggtggaggctgcagtgagccaaggtcatgccactgcactccagcctggtgacagagtgagactctgtctcaaaaaaaaaaaaaaaatcattaaaatggtaaattttatgttacgtatattttcctacaaaaaaaaatccactactgtattttgtactttgaatgaatggatcctttgcctgtgcatgatttcataacaggtctttcaaatgttgatacatttcattatacaatatcaggaagccttatttatttacatcacttcagatctcatcaagaaagtcttttttttttttttttgagatggagtctcgctctgtcacccaggctgaagtgcagtggtgtgatctcggctcactgcaacctccacctcccaggttcaaataattctcctgcctcagcctcctgagtaactgggactacatacaggcgcgtgccaccacgcccggcaaattttttgtatttttagtagagacggggttccaccatgttagccaggatggtcttgatctcctgacctcatgatccacttgcctctgcttcccaaagtgcttggattacaggcatgagccaccttgcctggcctgtttttatttgtttgtttgtttttgagatggagtctcactctgtcacccaggctggagtacagtggcgtgttctcggctcactgcaacctccacctcccaggttcaaacgattctcctgcctcagcctcccaaggagctgggattacagacgtgagctaccatacctggctaaatttttatttttagtagagacagcgtttcaccatgttggctaggctggtctcaaactcccgacctcaggtgatccgcccaccttggtctctcaaagtgctgggattacaggcgtaagccaccacacccagtagaaaactctttaattattgggaagctgtcaagcttatgatggaagatgcaagttttctaaaattcttttttttttttttttgagatgtagtttcactcgttgcctaggctggagtgcaatgacgcgatctcggctcaccacaacctctgcttcccaggttcaagcgattcttgtgccttagcttccctagtagctggcattacaagcatgcgccaccacgcccagctaatttttagtagagatggggtttctctatgttggtcaggttggtctcaaactcccgacctcaggtgatccgcccgccttggtctcccaaagtgctgggattataggcttgagccaccatgccctgactaagttttctaaaattctaactttcacctgaatacttgaattttttcactgcctacaagtactgtcagatgttttccttgaggtgacgaggctcacttcgtttattgttgtaaaaatgtctgccaaatatttaagtttgaaaaaccataatttatctttcagttgttaattcaaataaaacaagatgttctatgaaaaaagtagctagatcagcttgcaacttgaacaatggcataagcattttccctaccttggcgtgcagaagtgctttatgtgtacttcccattttgtcatagcaaatatttaaaaatagggtcctcaagggtcaagattcaataaaatcagtaagtttttggccaggcatggtggctcagcctagcactttgggaggccaaggtgggcagattgcctgagctcaagagttccaaaccagcctgggcaacatggtgaaacatgttgtaggtttcttgtatgttttttgtatttctgtaaaaatacaaaaaattagctgcatgtggtggtacccgcctgtaatcccagatactcaggaggctgaggcacaataattgcttgaacccgggaagtggaggctgcagtgagccaagatcgtgacactgaactccagcctgggcaacagagtgagattctgtctccaaagaaaccccaaaacaaacaaagttttaccattttatcaatgacatagttaagtaaaactgaattttttaaattaattaattaattaatttatttatttacttactgtgagtgcatggcagtgaagaacacactggctattagtacagtttagtgtcactgtcttaatgtatgctaaggcaccagcagttctactcaccagcgcttttgtgccttcagtgcaaatgttaacacaacgaaaaaggcagataatgtcttagaattattatagaagggccaggcgcagtggctcacgcctgtaatcccagcactttaggaggccgaggtgggaggatcacttgaggccaggaattcaagaccagcgcagccaacacggtgaaaccccatctgtactaaaaatacaaaaaattagctaggtgcggtggcacatccctgtagtcccagctactcggaaggctgaggcaggacaatcgcttgaacccgggaggcggaggttgcagtgagctgagatcacgccactgcactccagcctgggcgacagagcaagactccgtctcaaacaaaacaaaacaaaacaaaacaaaacaaaacaaaacaaaagaattattatagaaatagttttgaccatgaagatcccttgaaagagtcttgtccccacaatactgagttttctattgttaatactaaaatggatattaactctctagcataatcttaacactatagtatggaaattttcaaagacacaatatagagaatagtattacaggtcaccatttatccattacccagcttcaacaaccattaacatctgctattcttatttcatttaagccctgacatgtttttcttacatatttttaaataaatcccagacgtcatatcatttcatccataaatacttcagtatgaatctctaactcatacggacatttaaaaaaccccaaagactctatctttattataactaacaaaactaacagcaactccttaatattatctaatgctaagccatggtcagttttccccagttgcctcaataatatctttttatggttgatttatttgaatcagcttcagaatgaagtctatgcgttgtaatcagctgatatgtctatttaatctacaatagtttccttccctccccaactttttttttttattttaaaaaggtcatttattaactgaggaaattgggccatttgtcctaaaaaaaaattttcacattctagatttggtgaacaatatgcttgatgtgccatctaacatgttcctccatctctagtatttcctgtaaactgatagttagtccaaagatctgattagattcaagttcaatttacttggcaagaatacttcccaggtggtgctgtgtacttcttcttgcatcacatcagcaggaacataatgtctagttgtcctacttttagtgatgttaaaactgatcactagtgaggacagactgatccatcataaattccacagtaagcttttcatctaatagtttgaaaaatcattgatgatcaccactttgggattttacactgtctctttaaccttcaaaaattagttatatgtagaaagaaacagctcaatgaatttaggatcccaaagaattaaccttaacacaaggaaaacagaccatctcccctctcctttggaattcaatttcaaatacatgtattaaatagaatcatccctcagtatccacaggagatttgttctgggccccatgtgaataccaaaaatccatggatgctcaagcccttgacataaaattatatgcacatcctcctatatactttaaatagtctctagagtgtttataatgccttagacaatgtaaaggctatgtaaatagttgctatactatattttttatttgaaatttttattgttagatttcaaaaggtttttatttgtttgtttgtttttagagatagggactcactatgttgctcaggctggtctcaagctcctgggctcaaatgatcctccccttgtggcctcccaaagtgctgggattacaggtgtaagccaccacactcagccagattttttttcttaatcgtttcttttcccctgaatggttttgatccacagttggttgaatctgtgaatgtgggaccttgggatatggagggctgactatacctatttaggcatctagtctcagtctcagggtaaataaacgacataaataactacttaaagttggtgtaataacaaatatgtatgaagtgccaagagcacctagatgaaggggtaaacagttctgtttatagaacttacagaaagtggaactgaactggaggatgagctcagaatctccaacctcattccactctactctccttaacttagttctagccatgtagatcatcctctagttcctcaaaactaccaaagttctttcccactttagggtttccatactctacctggacctatctttgtcacacttgtcctctggctatctcctactcattcattagatcagttagtatatcacttcctcagttagcctttctcagactccccagttctcccttatttttctcagagcaaccttaatttctttatatcatttttcacaatatgtaattacataaccacatgtggtggccgggtgcggtggcacacgtctgtaatcccagcactttgggagactgaggcgggcagatcacttgaggtcagaagttcaagaccatcctggccaatatggtgaaaccccgtctctactaaaaatacaaaaattagctgggcatggtggtgggcacctgtagtcccagctactcaggaggctgaagcaggagaatcgcttgaacccaggaggcagcggctgcagtgagccaagatgtgccactgcactccagcctgtgcaacagaggatactctgtttaaaaaaaaaacaaaaaaatctgtgtgggattatttgttctaagtctctctccttcagtagaatgtaagctccatgagggtaggctatattgtccaccatggtatatattcagtgctttgtatagtgctagagacatagcgctaaatacacatttattgaatgaacgaaggagtagcagcagcaggctgactcccctgatcacccagctggcctagtttctgccatcactttgccatcccagaatgactcaggtagagtccagtccagcccagcgcccagagcgactgtcctctcctctgcagcatttcagatcctcctcaatgacctggtttagggaggcagacataagcgccccgtgagtagagttagagactttctcagtggctccctacaggaatgatattaccttgggggttttgagcacaaatttctgtttgctttcatcaggacccagctgtgccttcagtttcaggagtttcgccacctcctcctcgatctgtggagggaaagaaggcgctgagctatccatctgtcactctcctccctcccccgccattcattcaatattcctccctcatcacatctctctgctcaggcctagctttgtttctctcgggacccaccccggatgtctccccacgcagcccactctcctccctacaagactggtcgcttccctcacatctctaccctatgtcccgaacaccctggctttacgtcctcccaggctttgccttggccctctcccctgctgcctaaatctcaccagctcggcgctggccttctgctgcttgaggcctcgcacgcgctctccctgaagtttcaccagctcctccagcgccgcacgctctgccatcccggctgtccacttgagccgcctgctgtctcgacctgcggtggttgccccagcctcagcaaggatgacttccggctatcgagtcgctgggtcgcacgcctagagagcctccgccgagcacaaaaattatttccggctcctcccggaagtgccgaagctggctactaagggaacttgggaggatcccacctcagccttcgtgactagtgaggtgcgcaaacgcccgagttttccctggtgcgcgggttccgcctttgcagtgccctccacccttcctggtgtctgacccgcctccttcccaggccttttgttcctgtcccggaaagccggcgtcctgccgcgcgatgcccctgctcggacttcttcccaggagggcctgggcttcgctgctcagccagctcctgcgaccgccctgcgcttcgtgcaccggggcggtccgttgccaaagccaggtgagcgagacagaattatctctggtctgtcccagcagggtctccagatctgaacgcatagcctcgcggcctgtattccagtagtgttacaatcggtttttatcgagtgcccactatgtactgacactgaactaagcgatttggatgcctggtcatttaatccttggagcaatcttgagaggttggagttttgatttccattctgcagttgaggaaacggaggctgcaagattaaatgaatgacttatacacggatatgtagtaagggagtattttaattcatatccacactttttcctgaaactcttggactcaaacagtaacatttttaagcgaaatatatgaatattcctagtaaatgagatgactaaagatcagaagtagactgagttcrtcttagaatttacctcaaaatgaatctcagaaaaacattttcagatgtcagagagttttggattttggaattgcagataagggattgtgtacttgaacttggacttctcttagggcagataatcgccatagtatggaaccaccacatyctctatttttggaagggcatacagcgtgctggtaatgtcactgattaagttttgccttacttcggaaagattctaatgctctcttagcagatgctttgtgctatcgtgaacaatagggcacagatcttttattgatattcaatcacagcatcttatcagtctgagttttttagytcattcaagaaatccatatcttatcattccacaggcttgttctgtgtccttgagctggttcccttgtcttcaagttacagttttcctctctctaaacctgataaccagtgctaccttattaaaaattattatttttttgtccgggcacagtggctcatgcctgtaatcccatcactttgggaggccaagggkggtggatcacctgaggtcaggagtttgagaccagcctgacctrtatggcgaaaccccgtatctactaaaaatacaaaaattagccgggcgtggtggcatgtgcctgtaatcccagctactcgggaggcagagacaggagaatygcttgaacccgggaggyggaggttgcaggagctgagatcgtgccactgcactccagcctgggcgacagagtaagactctatctgaaaaaaaaaaaaaaattatttttgctctttcagtaggaacggtgacctggagaagatcaccataatccctacccctgaatggttggtgttggtagtggtgggttgttcagtgccttcattattctcagattcttaaagtatttgagaatattaaaaatgcggctgagctcggtggctcatgtctgtaatcccagcactttgggaggctgaagcggttggatcacgaggtcaggagttcaagagcagcctggccaacatggtgaaaccccatctctactaaaaatacaaaaattagctgggcgtggtggtggcgcgcctgtagtcccagctactcgggaggctaaggcaggagaattgcttgaaccaggaggcagagattgcagtgagccgtgattgtgccactgtactccagcctgggcaacagaccgagactctgtctcaaaaaaaaaaaaaaaaatccatatacagtgaggaagcttgtgtggtgaagacctgacctcatatatattacacgtgtaattgtaaatacaacatagattctttggggtgggactgagattgggatagatgaaatggtgctttggcttcctgttgctcagggtgaagagtctttgcaggttggtggtcaacagggtcagagatgccacaggtctggccagtgtccagagaagccacatctcacattcattcttctgccaggttgcagaggcagtgttaacatcccaactgaaagcacatcaagagaaaccaaattttattatcaagaccccaaaggtaatactttttgcctaccctatcccattagagtgccttggaggactgacctctgccttgcatgtctctctgaccccttttaatgttctttacagtaaattttaaaaatatatactattcttgagatactaggtgcggctcagagtcatttgaactcagtagatttcagctccagacctgagattacataataagtgtagtttaactccttgtctgaaatggacttattttttgtttttgttttcactatggctgcttttggtttccagggtaccagggatcttagtcctcagcatatggttgtgagggagaaaattcttgatttggttatcagctgctttaaacgtcatggagcaaaggggatggacaccccagcatttgagctgaaggtaaggggagaagaaagagtacgtgcaacctcaytcacttcttcaatggcgttcagtgtcccaaagggcttctcatctgtgttttggagtcatgctttcaactgtsgctcattctgtttgasccctataggaaaccctgactgagaagtatggagaggactctgggctcatgtatgatctgaaggatcaaggtggagagctgttgtccctccgctatgaccttactgtatccttttgagtactrgagcctgacctgtctctttccaaatccagcgggctttctctgacaaaagtggagaacgtgactttgggatcttagaggtccattgcctatacttctagtttctcccagaaggcagttctgctacggaagcctggcctggagccctgtcatttaactctagtgtgtatcataatcctttgggggagcttgcagaagcacagacatttggctgcagtcccagagattcttagctaattctgtagctggaatggggctcaataatttgtattaaaaaattgttttttttggccagacacgtggctcacgcctgtaatccaagccctttgggaggctgaggcaggtggatcacctgaggtcaggagttcaagaccagcctggccaatatagtgaaaccccatctctactcagctcctgctgagctctggggctctcaggttctgagtctagtttgggactgactgtcaccttgtctccacagatctcttttgacgtaaaaagttagctggctgtggtggcaggtgcctgtaatcccagctactagggaggctgaggcaggagaatcacttgaacccaggaggcagaggttgcagtgagccgagattgcgccattgcactccagcctgggtgacaagagcaaaactctgtctcaaaaaaaaaattttttttgtggagatgggtgtctttgttgcccaggctggttgtaaactcatcgtttcaagtgatcctcccatcttggcctcctaaagtgctggggttacgggtgtgagccactgcatctggcctacagtctgcattttaaacaagcatcgtgggtaattaagatgcatgtagtcctttccctgcactttcagaaccagtagcttagaagttgttaggcaaatccaagttctgaagcttgactattttgagatggttcggaatcgatctgaatgggcagaaagacctgaagttagttcttgggtcacttctatctctacttgccttgctttctgctgaacttttagttttgctaggtgagattccttcatttgacactattcaatatatattgaattccaagcactgctaggccttggggatagtggaaaaaagggaaggtccttgttcttaccctagtggatgagatccaggcccagtcctccctaatgtctgtatactgggcctaatctttggatgcagtatccctcttccttaacccatttatgtgaggttccctttgctcgttatctggccatgaataaggtgaagaagatgaaacgttatcatgttggaaaggtgtggcggcgagagagcccaaccatagtccaaggccgttatagggagttctgccagtgtgtaagtgacctgatgggagcagcacagtttgatagttctaggggccacaaccttgaaactggctggataatggatgttttttcccatctttttctttgctgtaggattttgacattgctggtcagtttgaccctatgatccccgatgcagagtgtttgaagatcatgtgtgaaatcctaagtggattgcagttgggagactttctcattaaggtgaggccagggctgagaactgtgggagaagtctggatttggcytaatactgtttatgcaagtcccaaacttgggtgactccaacccttaagcctgcaactgtaggactttcctagtaaagctgttgtatttcctatatgtctgtactcttcctgtgaaatttccatcctttttgtgtgtcaggaaagtaggtactgccattgttttgagtggaagggcattgacaagcacttgggtcactgacattgagttctcaggtaaatgaccggcggattgtggatgggatgtttgctgtctgtggtgttcctgaaagcaagttccgtgccatctgctcctccatagataaactagacaaggtaacaaagaagacatacttcagtagaccctatctagcttctgccctgccctcaaatccataccactagtgaaaaataaggagattgtggctggaagtgggctattttggggtggaaggtaaggaggcatactctgaaggaagatctgagtcatgctatacagtggggattgtgactggatttcttaagctgtctctgactttgctgagtatacagttagctacttgtgatgtatatactgaatggaagttgagttgtcctttttcagtttgagaaagaaagatcttggggctgggctaatgtttgggtgtttatgcagatggcttggaaagatgtgagacatgagatggtggtgaagaaaggcctggctcctgaggtggctgatcgaattggggactatgtccagtgtcatggtaagaaccagggttttcagagctgtgatagaaccaggctgaaggtgacatgtgctcaaattctacctctgaaacaactcttttctgtagatatgctaagctccagggcctgtcctgaatttaatttctcttttacttattgtaacgactttgtgtcttcagatggcaaagctagaggcaaaggaggagggtcttgtcatgtgagactgggatcttttttttttttttttttttttaaagaaaatgaggaagactagctagagcacattagggataattttgaatgaaacacatgtgagtgaacagcagagactttatttctctccaggtggggtatccctagtagagcaaatgtttcaggatcccagactatcccagaacaagcaggccctggagggcctgggagacctaaagctgctatttgaatacctgactttatttggaattgctgataaggtaagctgaattgcaaatggacctcctgctgagctctagggctctcagggtcccgagtctagtttgggactgactgtaatcttgtccccacagatctcctttgacctcagcctggctcggggcctagactactatacaggagtgatctatgaagcagtgctgctgcagaccccaactcaggctggggaggagcccctgaatgtgggcagtgtggctgctggtgggcgctatgatgggctggtgsgcatgtttgaccccaagggccacaaggtgccatgtgtgggactcagcattggggttgagcgaatcttctacattgtggagcagaggatgaaggtaggtcctagataggtgtgaggtggggctggagacctaaaaaccctcctgtttctggaggtgtagttggagtggttttctgatgattctttttgtcttgatttttggaattgctggtggaaaggaggtttttattagttttactttcttctctcttattagaccaaaggtgagaaggtgcggactacagagactcaagtgtttgtggccacaccacagaagaactttctccaagaacggttgaagcttattgcagagctttgggattctggaatcaaggtatggtggagctgatatctgagccatctgggtatgtgtggaatttaggacccagggctatatctatcttatgtctggggtggaactcaaaacctttttagtctgctagctactactggctactagattggctttttagggtrggcggactagccacttayctctggctttcttggatatccatgttcctgaggtttgttgctgtgttcacttctaagtcccttactctgtcttgatccttttcaggcagagatgctatacaagaacaaccccaaactattaacccagctgcactattgtgagagcacaggcattccactggtggtcattattggtgagcaagaactgaaagaaggggtcatcaagatccgttcagtggccagcagagaggaggtgagtggcggcagcagaaatagaagggacgaagtrtttctgcctttcccagattctgtaagaaatatgcatcttctggctgagaaattatcttcatggttaatagtggtagagatgaacaaacactcactcaagatgaccattgctgcctgtgagtattgactgggtggccagaagaaagacaaatgaaatccgaatgggtattttgagactaatcaacataatagacatagatcaggtgtttgaatccctttcatcttgagggtatacattcttcaggtcaacccacactactcctttctggttgtataagtaatgggagaagatgcagagtaaaacaaatctggaaaaacagtggctaaggagttagtatcactttctagtttatcacatgaggattctcttatgtttcaggtggccattaaacgggaaaattttgtggctgaaattcagaagcgactgtctgagtcttgatccttgcctgattcccatctgctgctctttgtagaaaaggtttcctctagaactgaattcctctggaattgagtgatggacttcacaacaactagccaggaagggtgacaagtaccttctgcctcctccattcttcctgggtgcagaactgtagaagaccctgaggactcctgggctagtgtgagcagctattctgcatgggtgcagatggctggatgtgaaagagacatgctctagctgcagaggcaaatttgaagtgccacggaacgttgtcaagaggtagtgagattgttgctgtgagcaaggctctgggagagtcacctcaggctcaggattctgaaccattgagatcagaaaccagatacttagccttctactgtagctacggaaccagattctrgtgaatttgtccacaatcagccattggcctgtctggggagtttttggaagacagcaaagaggggcaatggctgctttcagctttgaggacagatgctatcctaagggcatggcagtacccatgttgatttgacatctctctagcccatccattgcttacagtagaagagtggggctgtatgcttgataatcttgaacattgaacttaatagatgacttgacaaggtagagatctgatattttgagattttggagaccatttcctgtgccagaatcactgctctattccataccgtgccatggaggctgttttagaagtggttggataacatgttaaataaaatattaagtgtagtagtttgggtaatttgttattgttatcaagggctttgtttgcatagaccatagaaaatgcttgagtgtacattggagaattctgtgaggtagaagtaacctccctgggatgatgcttctgtattcagtgatgagcagccacagtttctccctctttccctgtctcctcaagaggtagtttttttgtttgtttgtttttagacggagtcttgctctgtcacccaggctagagtgcagtggcgtgatctcggctcactgcaacctccgcctctcaggttcaagagattctcctgcttcagcctcccgagtagccagctaatttttgtatttttagtagagacagggtttcaccatcttggccaggctggtctcaaactcctgacctcataatccacccacctcagcctcccaaagtgctgggattacaggcatgagccactgtgcccggccaagaggtagttttgttgctaaaaatcaacatatagtgagccggtatgccacagtgcttcactctagagtgttgttgatgactggcctttccaaatccaattatgctgattaaattatgttctactataaagttccccagatgatggaaaaataagtgaaccaaagggtggtagcattgcttcaaggaaaagagcccaagtgcaaaacatgctttttatatgtgcgtcgggaagggtgcctctgttgcaaacgtttcagtgtagtttagggtcatatccctagtgcatgcaggtgaatgagaggcatctagaccccctaatggcgcttcggccttaaaaaaggtttagaaattcttggcagtggacgcaaagttgctagactagatcagagaccactgttttgcgaacctcagtttccttgtttgtaaaatagttgaactaaatcttgaccctttaatgcttgttttgaaatccaaggcaaaaaacaattgcaagcgcccttacttccgtgttgcttcatactcctcttgcgcctgcgctgtctccttggagcagaggcggggccaacaagcctgttttagaaaccctccagtccttagctcgtttagaacacaagactccaagcttattggagggctatcttgccttacggctccaagccgctttttacggcgtttttcagctcgccattcacttcgctgtgaagatggcgtcgggcagcggggtaggtgttgtgtctgaggaggaggttttgcggggtggggaatggtttttcagacctgaatagagacaaactcctgcacccgactggcttcccgatatctcctcgagatcccagggttcaggttcaagaactccccagtaataggccttggcagagggtcagtagaatcgcggaggtttctcgggttggggtcttgaggctacctcagtcttctcgtacagtccaaagaggctttgctttcaaaacgtcctgtagacacctggaccgcgagggcgcggttccctgcttctctaggggcccagacacggcgacggatcttgacgctttttcctccccacagacaaaaaacttggactttcgccgaaagtgggacaaagatgaatatgagaaactcgccgagaagaggctcacggaagagagagaaaagaaagatggtgggtgctaactacatcaagggctaagggtatcacagaggcgatgcgatgatggagagcgggtgggagttgaagtgcgctgccttcccacgcggtgtaagctctggcagagtgctgcttccctgggcctaggtttctgcatttacaaaatgagagcgaggaggtgggatgaagtaagtagttttgagatgctcttcagctctatttcactctgcttccttgcccaccctttgcttggctcgtttaatgctttcctgaagtacagagaagataacggcatccttagtagtgacagagaagttaagtagagtattttgctgctgtgcattaccgctatcagtgacccccctctttcccttgaaatttcttaagggagagaacattcctggcccaatcaagaccctcccatatagtctgagaaaagccggggaactttgcaggatctgtgattgtttcagctagagcttagtagtgctgtttctctgtgccttgtacatcagggagttggtgcttctctcctgtttaagagattgcataaagaaatgttttattttgtcatctgtttcaaacgtgtacattcttctttccctttacctccaggccaccttgcactcactaactctttcattttttatgtaacatgtaaaataaatagtgcttgacatgtaacaggcatttcctagatgttggtccccttttataaatttgcccagctctcagaaggttcctttccgttatgcctagggtatctgcctgaaagcattcttgaatgtccttgctcccgttttgaaaaagttgcttctagtaattcttcagaaattctcccccacaattcagttaatcaatgaatataaaacatactgtttttagatttgctggctttaaagtggagaaaagctgtagagttgaggattgcttatgatttcttcctgtgttgagattctccccagctgctactttaagtgtctgttgtgtcctttcaggaatgattttgaaatgagtaagacctgaattttggatttcatgcattttttttcctttctggttgaggaactataatattgaagggacttccttccccattatgtttcaggaaaaccagtgcagcctgtcaagcgagagcttttacggcatagggactacaaggtggacttggaatccaagcttgggaagacaattgtcattaccaagacaacccctcaatctgagatgggagggtgagttgcttatcatttttcctctgcagccaagaatgcatctaataagccacctattttggttttaggaagtgttaaggaaggtccttggccccaggattacgtccttcttgcctgtaattctatctttatatttgtttttctgtgtctcccaaggtctcaagttgacatgatagtgtctctaggagtggtcactcagtgggtttcttcatgttattagcattggctgggcacagtggctcacgcctgtattcccagcactttgggaggccaaggcaggaggattgcttgagcccaggaattcaagaccagcctgggtaacacagtgagaccctgtctcaattaaaaaaaccaaaacaaacaaaaatcatactatgagcactacagctactactcaatatagtttttaaattttttattgccattgtacttgttatcaattctgatttactattaatattttaaaagggattatttgatctgtcagaagaagaaatgaaggaaaggactactgaggagatttctaggagagaaattaggtggagctagaatagagcctaggagttgttaatggtgaagaagaggggtttgaggttccagactagctgcaaaggctgtagttgttatggatgcctgattgtacaccttcttccaagactataacctataggaagaagggtcctacaagagcttgtcacccttttgccccccactgcttctctgtccagttaggttttctggcaggagagcaacacagatagcaatgagtgacacttctctgagctgcttagtaaacccactgttgtccattcctgtctgtattagttatctattgttatgtaaattaacaaattaacctaaagcttagcagcataaactacaccactcacagtttctttgggtaaggaatctgggagtggcttacctaggtggttctggctcagggtcttcatgaagctgcaatcaaggagttggcaaggtaggtctgcattcatatgaatcttaagtggggctggaagatctgcttccaagctctctcacatgcctgtggtttggaagcctaagttctttgccccatagacctttcttttttctttttcttttttcttttctttttttttttttttctgagacagagtttcactcttcttgcccaggatgaaatgcaatggtatgatctcggctcaccacagcctcgcctcctgggttcaagcgattctcctgcctcagcctcccaagtagctgggattacaggcatgcaccacctgatttttttgtatttttagtagagacggggtttctccgtgttggtcaggctagtctcgaactcccgacctcaggtgatccgcccgcctcggcctcccaaagtgctgggattacaggcgtgagccaccatgcccggccaccccatagacctttctataagactgctcacaataaagcaactggcttccccagagcaagtaacccaaacaaagacagaaggcatggtttttaaaataacctaattttggaagatactacttttgacatattctattggccaaacagaccaactctggtacaaattgggaagagactacacagagtaggaataccaagagggtggggctcatcctggggctgtcttggaagatgactgctatactctctcgaaagctaaggctttatagaaatgaaggcttaacacttctaaaaagaagtttacctaaaaatttgagtttcttggttgaaaatgataagatccttaaaaccatatttgactcaggtgctgtttcttcctgttagatattactgcaatgtctgtgactgtgtggtgaaggactccatcaactttctggatcacattaatggaaagaaacgtaaggcttggaggtagcttgtgactagggctggaattgggttttggaggtggggtggaatggaagggtagctttttttttcttctttttactcatcaaaagatggctggagtaagaagggtagtttctactgggctcttttttgatgcccctattagaactctccagttgtttcagcacaggccgtcttttacttcattatgtaatatttctggaggccgtgaggtaagaggcctcattctggaggccatgaggctttcaacagcacccaaaccatgtgctgctcctggacccagctggccaagggagtttcttttagccataattatttttgctgtgtgttttatgagatgtcagagaagtcaggaaaataatttttgaggggctgaggatgttgtaatgaacttgccttcttcactgttgaccctatgcagatcagagaaacctgggcatgtctatgcgtgtggaacgttccaccctggatcaggtgaagaaacgttttgaggtcaacaagaagaagatggaagagaagcagaaggattatgattttgaggaaaggatgaaggagctcagagaagaggtaagggtctcctatccttcccctctcccccagatttgagttttatgttatgaatcatgggagaccctgtcctcatcccactcctactcccacccccagagttgtatctcctgagttctgtatattagcggaaacatttgttgcctttgtttaggattctcatgatctgaaggaaatggctctgaaactacttttttctcctagactctctgggccttatttttttttttgtaattttaaaaaaaattttttttttttttggtcatacagatatttctcaacttctgatggggttacctactgataaacctatcatcaagttaaaaatatcataagtcaaaaatacataatacacctaacctactgtagtttagcctagcctaccttaatgtgctcagaacacattagcctacaattgacccaaattatctaacacaaagcctattctataataaagtattcatctcattaatttattgaatactgtactgaatgtgaaaaacaatggttgtatggatacttgaagtacagtttcaaatgcatgtcagtttttcaccattataaaattgaaaaatcttgtcagcatcataagttgaggactgtctcatctgtattctttgatttaatttttttaaaagactaaactttttttagaggagtttaggtttgcaacaaaattgagagggagttataaagatttcccatatacccactgtcccccacaacatgcatagcctcccccataa

SEQ ID NO: 94336 - DNA, 89805 bp, Homo sapiens
  misc_feature (1)...(89805): n = A,T,C or G
caaccatttgttatttctcatgattctgtggactagttgggctcggctgtggtttttttgttgtcattgttgttgtcgttttccattcttggtgctattggctgaggtcattcattcaactgggtcattcattcagcagctgcaatccgccgggacctcggacagggcttacatatgcaagatggtttcattcacatatctggaagttggtgatggtcagcgggggggccttagttctctttcccatggcttctcatctgctagcagtttaaattatctttcttacagcatggcaactgagttccaagagggaaaggcccatttctccacaagcacttatcaagtctctgcttgcattatgtttgctaacatcgtattgcccatgcaagtcacgtggcccaagctcagggtcaatatgggagggcacaacacaaggacattattattagaaggcattagtcattagcagcagcctatgtagcagtctacaatattcattcattcaaccatcacttataggactcccagatcctagggatataatgattatcagggcaaaatccctggcatcaagtagcctagctcattgcatttagggggaggtcagggtagggcgagtgtggaaggaatgaatatgcatccttaacaagtaccccaggtgattctgacataagctaatgtttgagaacctctgccttaagctttacctaccaatattcttttctttttctttgagacggagtctcactctgacatccaagctggagtgcagtggcgagatctcagctcactgaacctctgcctcccaggttcaaatgattctcctgcctcagcctcccgagtagctgggactacaggcatgcaccaccacacccagctaatttttttgtatttttagtagagacggagtttcgccatgttggacaagctggtcttgaactcctgacctctggtgatccacccaccctggcctcccaaagtattccctgggaatacaggcatgagccacggcacccagcgttatctaccaatattctaagtggattgtttgattgttagcagagacctaggatataagagaaaagggcagtaacaactcatgaaacagagttctcgcacctaatggttttgccacaattttgtcaaactagaaaattaaaggttccagcatatgcgtagcccagtggttctcaaagtgtggtccctgtatgtgcagtattggcatcacctgagaactattaaaaataaaaacttaaaaaatctggggtgtttgcagcctggcaacctggattttaacaagtccactaggtagttctgaagtaggtaaagttttttgttattgttattgttgttttgagatggattgttgcccagcctggagtgcaatggcacgatctcagctcaccgcaacctcctcctcccgggttcaagtgattctcctgcctcagcctcccaggtagctgggattacaggcatgcaccaccacgcctggctaatttgtatttttagtagagatggggtttctccacgttggtcaggctggtcttgaactcccaacctcaggtgatccgcccgtctcaacctcccaaagtactaggattacaggcgtaagccaccatgcctggcttgaagtaggtaaagtttgagaaaaactatcaaaccctaactcgattacaactgcaatgctgcataaaacgaaacattattttaggtagttacaacttagattattaacatgcatgtgagtgggtgcttcaatttatagagggtgggggtaggctcccaatttgcctatttttatcaagcgggtttaaattccgaatctgtgggccgggcgcggtggctcacacctgtaatcctagcacttctggaggctgaggagggtggatggtctgaggtcaggagttcgagaccagcctggccaacgtggtgaaaccccgtctctactaaaaatacaaaaattagcggggcatggtcgcacacacctgtaatcccagctacttgggaggctgaggcaggagaatcacttgaactggtggttcaaggttggtggtgggctgaggttgcagcgagccaagttcaggccacttcactccagcctgggagacagagagactccatctcaaaaaaaaaacaaaaaaaaaaaaaaaacaaaaaaactgaatcccgaatctgtctttaactccctctgctaccttgggcaaaacactttgtatatctgcttaaatcatcccaatcccataaaataacaatgtgcctgtgctctttactatagtcctttccagcactaactccacgttgtacttccaatattcatattaatccatatccaagtaatcattaaactagcaaggaggggttaaggaaagggtagctttccaaacagactaaacttgaaaacataagtgttacttctcaggcaaataagtgaagaccaagaagcacttctgggggaaaagggggtgcagagattctcgagggaagtgtaggctttctgcttacataaattctgtgtaaatcaacaaaaaacaggaaaaaccagaggaagaataagtgaaacacctagggactctccaagagggaggttaccattgatttcctgctttaccagtcagaaatcatcacagtgagctttaggtgactcaagctacttaatttgcatgaaggaccttgatcttcacctctgggtttctttgatggagataggacagtgagactgcctcttgcctttcatgattaaccgttctgcttgtacagtgctttagcaggcattacatcatttaagtctcacattgacccatctacgtcagtgacattttccctattttacaaacaagtaacaagaagccatggaaataaatgagttattactcaagcccatgatgattaagtgttgaatggcagggccaagatcaaaccaatgtccttctcttcccagtccagtgttttctctattgctttgccttcatatctggggtgggtggtgagaagaaggtgaaccagcatcctgtcttttttcctttttgtttggtttcctacctaacttccttcagcttcccttccctcagactctggtaaaagggcactaggtttgatgtcaggagactgaaattctggttctgattctaccacaggaggctggctagtcttaagatgtatgtcacttatgcgctcttggcctcagaggccccattgttattaatacttccaactctgtctcaattatagtaagaaaaatggaatcagagtgtctattggttgatttttacaattatataaaggttttggacaatagctggggcttgagggagtgagaaaagtcaagcaaaaggggatttgtccctctggggattaattccaggacgaccccacccccgccgccctcaccacacacactcaccctccctaccccgaggatacaaaaatccgagaatgctcaaatgccttatataaaatggcatagtatttgcatgtaacctatgcacatcctccagtaaatttaaatcatctttagattaactataacacctaatacaatgtaaatgctatgaaaatagttgttacatggtattgtttttatttgtattgtttgttattgttgtattgacattttttcaaatatttttgatctgcggttggctgaatccttggataagagaccctcacatatggaaggctgactgtaattctaaaaaaataagacaaagtggacttataagaattcacagtaggccggtcgcagtggctcacgcctgtaatcccagcactttgagagtccaaggcgggcggatcacgaggtcaggagttcgagaccagcctgcccagcatggtgaaaccccatctctactaaaaatacaacaaattagccgggcatggtggcgcgggcctgtagtcccagctacttgggaggctgacgcaggggaattgcttgaaccaggcaggtggaggttgcagtgagccaagattgcaccactgcactccagcctgggcgaaagagcaagactccaactcaaaaaaaaaaaaaaaaaaaaaaaaaaagttcacagtaaatatttaagataggctgagctcaactcttccatctaacacctttccccttatctttacctcatctctaacagggtgctgagatgtgacgcctgaaaggccaatattttggcttttcagttttgttttggtgaaaggaatgaggatgtggaatacacattgttgtaggaaccataggatcaacaaatttaagaatcccccatgtacatctagcccaacttattctgaaatgtctgaattctgatcccattgtgctgccaaacaaataatttgctgtcctgttggaatctgagagtcaaaagtatgtgaaagttcaaacgtggtcagggattttttttttttaatggatcgatgtggtaggtttggtggctttgtttttactgccttctagaaccaagaaaatccttttctatatcattcactcaactaatgcctttcactgtttttagaggcaagttggcctggttccttgcttatatgcctgtctccctcttttcctcttccaggaaattcagagatactgactcatcttcactcttatattaaagcaagccagtttatcgatagttattaaatctagtatgtccataagcaggcttcatctggaacattagaatgtgaggtctagacggtgtttaggaaaatttgctttcagatcatgtgtggtaaaactatacaaacagagatggacaagtgacgtggtgtagagcaaggtaagaaaggaaaaaaaaaaaaaaggaaaagaaatgatgttccagaacacagagatttgggaaagggatggaaagaaatgacagtgggtatagcggagtgcttttaaaattgatagagagcatggtgggttacaaaagcaatttagtgattttcaatcagcattaaaaaaaaatgatatgccatagaataaaaatacagaatgcatactgtggaaggacaaatattgttttggaaagtttttctatacatacataaatgtatattagatgtatataacatgtatttacatgtgtaacaattgtaactacaaatgtgctccccgcccacacacactggagcctgggtttgttttgtaaactgtttcacagtgtgggtcttggttccaagtttgaaagccyttagaacacaggatccagaaggatccgrgcaaggtaaattcaaggtcaagggagagtcccttttctgtcccctgccatccaaagcagttaatggagggagaggaaatggcgtgtgggggaggggaccgcagagtgaggccaaacgaggagcaagggcgcgtcaggacggagtggtgccgggcgccttctgcctgaatggtcgatagaggaacttggggaggttgattttgggtgctttccttaaatgctaaaccgaaagaacttccgcgtttcttgtccctgaaaagcttgcaacggtgaaggattcgcgttgctccttgaggtgaccctatatggggtcaatcccagccaaaggaatgattacgattaccaggggccagatgcagggaggtgggcggggcgtgggaaacgcgggaaggccgggccgggtaggtccacacagcgactcacgtcgctgcacgactctgcacagcccactggagggaacaagcagttctacacactttgagacccctatggaggcgagccccaggacactagtggaagtgcgctcttttcgccggccaggagcgctgcctgccaaagggcagtactcgtctccgccccatgccatgcagctggatggctctgctgtccgctcgccgggcccccacgtgacctactgcgcgggccgccgcctccaccgcgcccaggccccgcccccgtgacgtctcatcgccctctgcctgtccgagcgttcggctcttttgcgtttgctgattggccagcccaggtgacagcgcccacccccaccccccctgacacgcccctggagccttgggggtacgcggtggggggcggggcctgggccggaggggcggggtgagaaggctgcgcgcgggtaaaggggccgcctcgagcgcggtccgagcgttcagcggacgcgcgcggcctcgatctctggactcgtcacctgcccctccccctcccgccgccgtcacccaggaaaccggccgcaatcgccggccgacctgaagctggtttcatggcagcctcaaagaaggcagttttggggccattggtgggggcggtggaccagggcaccagttcgacgcgctttttggtgagcccggggtgacatgtgaagaggcgctgagccggggcgggagtcgggggacggagggggtggctgttgtgtccccatcccgcatctctccggcccggtgccccggccgctgggcaaggagggaggccggaacgggacctgccacactggggatgccccacccaggcctgggggacctcggcctctcatgacccccatggccgagttgaacagtcgcagttttggtggcggagctgggtcacctactaatggggtgactcttcccccaaagggagcagggactctccgagcatccgcgcagagcggcccgcttgcagtaggggacaggtggccacattgacggctaccgcggtcttccccaggaacatttggcctgcgagacacaggacgtccttggatggggggaaagctgtgtcacggctgtggtagctaacacagcgtcctttccagcagtagaacgaataaagtattggagtgatgatgcgttgtcatcctctcccataaaaattgcagagggttgaatactggggagggtggcagaacaaattaggaaacagtcacactacactggttttgccataatctttatttaattccgaagactcgcaaatttcagttctgagactttgcccattacaaacaaatgattgtccttactgtgcttcacagcataatgcgacacggaaattctgtttctctttttatttaccatgtgtgacagcacagttttaccacaaaagattgctatttaagtgactgctgattaatttttgtgcaattagtaaacttgctcttaaagtgacctagcacagagttcagtaagataatttaaaagtaattgaggccgggcgcggtggcttacacgtgtaatcccaacagtttgggaggctgaggcgggtggattacctaaggtcaggagttcgagaccagcctggccaacctggcataacaaaaattagctgggcgtggtggcgggcgcctgtaatcctacttacccgggaggctgaggcaggagaatcacttggacccgggaggcggaggttgcagtgagcagagatcacaccactgcactccagcctgggcaatccagcctagccaacagagcgagactctgtctcaaaaaaataaaaataaataaaaaataaataaaagtaattgaaatgaatgcctgctgataaaagcccatgctttcaatggatatttgactaacttggcaagttgatgtaaatatttaatgattatttagctcttcactttaccgcaaatcatgttttcctgtgttatttagtatgtatatatctgtacatatatacacatatgtgtatatttatacataggcattatacatacaatgtatatattttttcaaagttctgtcagagctggcacttgactaaaaactgcatttgtgctttgatcctgacatatctttttttgtctaaagtgagaagctttcagtctaattttggtttgaatcttatttaatgacttaccctggtttgagctgccaagcatagttccactgtctcttgcactgtttatcttttgatcacccagggcaggtttcactttgtcttatattcatagaaatgtttatagagtaatcctgaatcataagaaagtttgcttaactggatttgattaatacataatatacacgatcatcatcttcccaacttaagaaagaccattaagacatgtgccaactaactgtgggttgatgtttaaagccatattcaagaattgcccacacaaatgcctgcagggaccaggcaggtagaagggggaaggcagactagagagatatccaggtcaaggggacagctagtagctgccaagcaggaacacaagcccagtgctgccagatcgtcagattaaaagcaggtagtctagagttttcaatgaaatctttcaattcttaaatgttggcaattagtttataaagcactgtgggggccaaaccaagcatggcagatgttctcaagtttatacagcctttgctcaatatgaaaatgggtaaaatatttcataactttgtaggcttcctttaggagtcagcttgaactgtccatgccttctttttgactgttcattattgctgtccatgtagcccagcaatcttctttattcactrcaggttgttcttggtccctcaggttttgttgcctaaaagacatctttctacatcaatgaagaagaacttgatcaacttcatattaccacaattaattgttcagtctgtaacatgaacaacatgagccttcaaaaattggctcctgtttactgggttctgtgaggcctcgtctcattgcatgtaagctaagatgcaaattcagaagattcttatcctgcttagagaatgattttataaaagttgatcagtaaaattgtcctctccttgagaaacaactatgaaagcatgctctagaggcaaataaaaaaaccgtagagatcctgtgtgaagtagtgaaaaacttaggaatggtttagcaaggtgttttttcctttgtttataaggagagagrttgctaaaccactccctgcaaaatgcagataaaagatttgctgaataagtgcttcaatcacaagatgattcccgggagttattccagtcatattactccacgttgtaattatgactgaaaaataattgcttacctctcaggaaagaatacagtggataagaactgtcataaggaagcttataaaattaaagatatttaagtaatttcctattattcattaaatttgcatatttaacttgactttcctgagaccaataatctctgcaagctttcttcttcttttttctctgttagcaatattagctttctcccataaggagaaaaggctttatctgtgctctttcatcccagggaaatgcctccacctctatcccacatatccgcttctctacctctaaatagtggctcaactgccaccttttagtgtaagtcttcctcaaaccgttattcagaattccccccccttcctacagcacttttaaaaatacttctattaatagctcttattaccttcccccttgtattataatcgtatacctgctgtacttgggagcagggtcctccttttaagctatttgtcatgttgaccaagatgttttatgaaatacaaagatgaacagcacttaaagactgttcagagagtgttttatacatgtttattgagtagatttttatttctctttaataagttaactgaattattttttattttattttatttttttgagacagaatctcgctctgtagcccaggctggagtgcagtggcatgatctcggctcactgcagcctctgcctcccaggctcaagtgattcttctgcctcagcctcctgagtagctgggattacaggcatgcgccaccacgcccggctaatttttacatttttagtagagacggggtttcaccatgttggtcaggctggtctcgaactcctgacgtcgtgatccacccacgttggcctcccaaagtgctggtattacaggcgtcagccaccgtgcccagccaagttaactgaattttaattctggttttctttcttacctcttaaaacattcttgggtacgtttggttacttaatttcttcttacattttagtagtagacatacaatagaacatgttcatttcctcatcaaattgtcaaagaattaatcttgggaccccatgcatatgctttgtacaagcggaaaatttccaacttatctgataggaaagtgaattggggttggcacatggtaactcagattgcagagtaggaacttcttggaaagagaattagtgtaacaggttttaaggaggggccatttctttgtaagacaaaagtttcagcttaaacaatcaacttccttctttaatttggtaacttaattttttccccactatgatgattttttaaaagacttgtaatgtgttgtggcttgaaatgtgtcaggtactatgttgaagacttttccagcattatctcatttaatcctcataactctgtgatgtagatcgtattagtaagcttctttacacaggtgattagactgtggctgaggattgtgcccaaggtcacagagtaactggtggagctaggattcaagtccaggtctgttatactctgaaaccagtcctcctgactactgccttgggttccccagctgtgtagagtactgtgaaggggaaatgagagaagggggaggccaccttctcacctattaatcaagtgtcagttctgattatcatcacgaatgaatcttcaccaagaaaaacatacttataaattggttttgcaatctataaaaaatattgcctttgaatgagtactgtgggttatgatcatcttgtgactcaaattcagtgggtcctaggcagggctcaggtgtgtcactgtggataatggttgcatcatcattttgtttcaaccgacaatacatataaagaatgactagaattgtagctcagtgcttgttttggcaggaagcattcccttggccccagctgtcccatcatacttagagatctcataaggcttacagatggatttcctctttccttcatttatgtattcaacacatttattaagcacccattatgggccagggactaatgaacaataaattttggtaaaactgatttggctcacagttggaatgaggccactcttgtgataagtagagttgtgattctttttgttttttttttttctgagacggagtctcactgtgttacccaagctggagtgcagtggcacgatctcagctcactgcaccctccgcctcccaggttcaagcaattctcctgcctcagcctactgagtagctaggattacaggtgtgcgccaccatgcccagctaatttttttgtatttttagtagagacggggtttcaccatgttggccaggctggtcttgaaatcctgacctcatgatccgcctgccttggcctcccaaagtgctgggattacaggcgtgagccaccacgcccggccaagttgtggttcttttgttgtttctttctttctccactacatttgcttgtttccttgcccatcacattacacaagtaccaggaacacattctcaacagagagctgccacccactcttgtcttgtctgtcacaagactaagtggtaagagctttcaattttgagcttcttgagggatagaaccatgtcctttttcttccccaaagcctgacacagcatctggcatgtggtagacacatgttacatgaaccaacattagcagcaagggacctgcaaggactcaagtgtgttgactggaacacttggattagaatagaccgataaaacttgaggcatcttggaaaaagtcaaaatcagaaactatagctctatttgatgtatgtatatgccatttactacaatttctttctttctttctttcttttcctttttgagacagagtttcactcttcttgttgcccaggctggagtgcaatggcgtgatctcagctcacggcaacctccgcctcctgggttcaagcgattcccctgcctagcctccccgagtagctgggattacaggaatgtgccaccacatctggctaattttttgtatttttagtagagatggggtttctccatgttggtcaggctggtctcaaactccctacctcaggtgatctacccgcctcggcctcccaaagtgctgggattacaggcgtgagccaccgtgctcggccaatttcatttttaagaaaaacataatttcatttgctatgttttctttacttctgtggcttgttggaagatgccttttctagtcaaatttggcatggaacatatttgtggctaatatttttattttcagtcactcacatttacgtagtatcatggtgttctcaagaggaagtttacatttctgaataatgtcttatcacatggtaaagtttagtgtgtcataaaagagtagactagtggggaaatcacatggggagggaaatgaatgtgcacatttatgataggacagatgaattagtcataggatgagtgaggcaagcctacaggacagttacttagtaaagagagcatttcagctccccagaagtctcattcttataaggcagagaatacatgtgttgtttcagaagctaatttttaaatattttttgtttttgagacggagtcttgctctgttgcccaggttggagtgcagtggtgtgatctcagcttactgcaacctccacctcctgagttcaagtgattctcccacctcagcctccccagtagctgggattataggtgtgcaccaccacacccagctaatttttgtatttttagtggagatggggttttaccatgttggccaggctggtcttgaactcctgacctcaggtgatccacccacctcggccttccaaagtgctgggattacaggcgtgagccaccgggcctggccaaacacttttttataaaaacaattttccttgttttttcagtttttaattactctcctcctccaaatctggaattgagtcatagtttgcgcatagagctgaatatagacctggtgacttccaactgtaatactatcacttataggtaatagtaataataataataataataataacatagcagtagtagcagcagtgacagtagtggttacatcttttgggtatatactgtgtctgcacggagctaaattctcattctatgttcactttccttgtttcttcctttttaaattgcccttcacccaaaacaaaatctggaattgagacatgatttgggtttagagatgaatataggactggcttcctatattcattattcagaatgagtgatttctaatccttattctgtcatctattagtggtggtgggagtagtaattgtaataaaagtaattataaaattagtagcagtagtagcaacaatgatagtgttgacaccttttggatgtatactctgtgcctattctatgctaaatactcttcataaattactttattatccttttacaaatgaaaaacatagaggctcagaaaaaagtgtcaaatagctgatgtgggcagggctggagctcgatgtgccccagctctctgtgcttccggggtctgtgtgtgctctttgcctctacatcacaccaagcatgacgttgtcaactacctttctggcccacacaaaagtctgagaacagattttttttttttctttcttcttttttttttttttttccgagacggagtctcgctctgttaccaggctggagtgcagtggcgtgatctcggctcactgcaccctccgcctcctgggttcaatcgattctcctgcctcagcctcctgagtagctgggattacaggtgcgtgccaccatgcctggcaaattttttgtgtttttagtagggacggggtttcactaggttggtcaggatggtcttgatctcttgacctcgtgatccgcccacctcggcctcccaaagtgctgggattacaggcatgagccacagtgcccagcctggatctttttctttaagcttatgacctaaaatagaagcaactgatgactggatatctccacttctgtgcccaagcaacatctcaaacacacattatctaaaacaaaatttgcaatctcctatgcgttcctgtccggaagctactgctcctaccctatcccttgtctggtaaacactgcctactcagttgcactgacctgtaacttgtcatccctgggtgttgctctttttcctgcttgtacctcctgaattaagaatctctctgcacttgcacttcacttctgtcaatcccatcgcagcggccctcctagtggaggcctctgtatgtttcacctggactgcagacacattgcaactgctcttcctgtcccagtcttgcctccctctaatcctttctcatcaacaagtactgtgcaccctcgcccacctgaacaccctgcagtcctatgcccactgtcccgcatggactcccttctgttcaacctgaagtcttagtttagaagttaccacttctgagagcccttctcagaccctcataattctgggttacatgtcctttctcctcttcatagccctgacagccctatgtgaggcagaagttgcagtgagctgagattgtgccactgcactccagcctgggtggcagagccagaccctgtctcagacaaacaccccagcaaaaaaccaaatgaccaggctagacattgtataaagcaagtgatacagccactgctatctttaattgacaatgatttctgaaatgtacttgaaaaaatcagactagcattcttgcctctgggtactgtgttttaatgtggagttaattatcctctaccatagagtcttgtggaaacatcattagccttctttgtacatttggccatctgcagacaaatcaatggccagaaggcttcatgtgaacctagatatatgaggaaaaaagtactctagaacttcatgtccagtacaatagccactggccacatgtggctactgattactttaaatatggctagtctgaattgagtagactgtaagtgtaaaatatataccagatttcaaagacttagtaaaaacaaatcattaatattttatatctatcacatgtcaaaacaatagtttatagatatattggcttaaatgtgttattaaaattaatttcatatgtttctttttattttttaatgacacaatttaaaattagtatgtggcttgcgtttttggtttgggttatatttctattggacaggctacatacactaaggtggtgtcagtctcctaagtttcagagctttgatgaagtagggaggtctaggctccatcctggtacatccaaatgttgtttgattggatggcttcatggtctaatacagcaaatagaatttaccaaaatccttctgttttctgtgtctcttccaaagatccatgaattcatttttagcataagggccctgacgttgccctagttaaaactaggaggtgatggaagaggggtctcattccattcagagccccataggtctgctattgaggtttttatgaattcagccagcaaaaagggacaccttgtttctttctttctttctttctctctctctttctctttttctttctttctttctttctttctttccttctttctttccttccttccttccttccttctctctctctctctctctctttctttccttccttccttccttctctctctctctctctctctctctttctttctttctttctttctttctttctttctttctttctttctttctttctttcttttctttctttcgtagtttcgctcttgtgtcccaggctggagtgcaatggcgtgatctcagctcactgcaacctccacctccttggttcaagtgattctcctgcctcagcctcctgagtagctgggattacaggcatgcgccaccacgcccaacagatttttgtatttttagtagagacggggttttgccatgttggccagggtggtctcaaactccagacctcaggtgatccacctgcttcagtctcccaaagtgccgggcgtcagccaccgcgcccggccaatactttgttttcttaacctagagtcctttagggatttgagagtagcagggagcagctgtaatatgaataacagtaacacagctggaatttcctattgtagtgaagtttttctgcacataagtgtttctcattttatctgataatttttgtcctaataagtacatgtaatacatcatgttttttggacattcaacaaatacttattgagcaccaactttgtgcctggcactattctagttcctagggatacttcagtgaataaaacagggcaaatggaactggcttcctagagacacaccctaatgctaatggagttggtatcctagagacataccctaatgctaccttgtaaatcacagggctatcacatggtgtatgatgtatcaagttaacctttgacttgtaagatattttatcttctcaaaggacttcagaatttgccctcttgctttcattatgtttattatttcctccagaaaagaggaaagggggcgtgtgtgatatagaaggaggaaggcaacattcaacgctttttattttcttagtctgcattgaacaggtaattttctcccacaggaaacctaggcatggaaacactttactaattggaagtgacttcgctgctgtaattagagtaattttggaagttaattttaatcaaaatatgcatcttactctgtaagagtaagtactttggtactcaaatatagatactataacatggaaacaatatatatgaaaaacttgctctctctctctctgtatatatatagatatctatatattatatatatattttatatatatctatatatattttatagatatatattttatatatatctatatatattttatagatatatattttatatatatctatatatattttatagatatatattttatatatatctatatatatttatagatatatattttatatatatctatatatattttatagatatatattttatatagatatatagatatatatatatcttatatatatatatagatttttttttttttgagacagtttcactcttgttgcccaggctggagtgcaatagcgtgatctcggctcaccgcaacctccgcctcctgggttccggttcaagcagttctcctgcctcagccttctgagtagctgggattacaggcatgcgccaccacacctagctaatttttgtatttttagtagagacggggtttcaccatgttggctaggctggtctcaaactcctgacctcgtgatccgcctgcctcggcctcccaaagtgctggggttataggcatgagccaccacgcccggcaaaacttgctatattttaaaaagtgttgtttttagtagtgctaaaattgtagaggatcgtattacacttctttgttagttttcatccattggttttaatgttttatatcaagggtcagcaatttatgacaagcatgtcacagagagtactcagctggatggggccaagtatatacttatccctttactaacaaggactctattgcctttttttttttttttttttttttgagacggagttttcctcttgtcgctcagggtggagctcaatctcagctcactgcaatctccatctcctgggtgggttcaagggattctcctgtctcagcctcctgagtagctgggattacaggctcccaccaccacgcctggctaattttttgtgtttttagtagagatggggtttcaccatgttggccagtctggtctcaaactcctgaccttaagtgatctgcctgccttggcctcccaaagtgctgggattaaagatgtaagccaccgtgtctggtcttctatttctcttttataagagctagatgcgtagccacacttcccttcaaaggaatctacacagtacgtgtctatgtgcctgagtatctgtgaccctttctgtttccacgtccaagataaatggagtggaaacttacaccattgctattagtattgtatcagctctcttttattattcttggttttcctattctgtaaaataaatccatattattaattaatgtgttaaatttccgagaaccattttggttttttaaggagtagggaattgcttcttaatttacctttatcttcaataggtttctttttacctaaagagaagttatttctgatgctgccttatatcttttatgaatccatatgaaaagaaagtggaacatcttatatggcatttcatctaattggactttttctaccagtgaacaagaacttcagttactgaataactttaaacatccttgatatctgcctgcatttttacattaatattacaatatctttttcaggttttcaattcaaaaacagctgaactacttagtcatcatcaagtagaaataaaacaagagttcccaagagaagggtatgtttcctaatttaatatgtaaagacacattatgtttgttagtccatctcacccaacttgccctgtggatttgtaaagtaaacttggtcagacatcctcctgaaaacatttgaaaggttgttattagtcaagaaaatatgcaataacttggtatgtcttacatgtgaggaattgatggcttaggaattcagttaaagataaggaatgaataataaagtaataaagcaaaagagtattaaatatcagaaatttcacattaactttgaagtcatttagttttgtgttcctattattgcaaaaatgctgctttgctgatttgagtgtcaggtttgttttataataaaggtatctttttaaaaaagtattcacatatcttaacatctaatactaaaatcacatttttgggaatagtattcataagtagtaattgtgattaaatatgatgttaagtatattatttaaaatttaatgatttttatgatataaccactttgaaaaactgtgttgcaggttattgcaaagctaaccatacacctgcagcatttcactcttaggaatttacccaagaggaataaaagcatatgcccatcgaaagacttgcacatgaatgtttatagctactttattaaaagtcgccccaaactggaaaccacccaaatgtctgtcatcagtaagatggataacaatggaatgccatttagtaattttaaaaaagtggacagatacttgcaccaacacaagggaatgtcactggaaatatggaaaatgaaaaagttggatacaaaagagtatatactgcatgactccatttatctgaaattttataatagtctaaactaatctaggatgataggaatcagaaaagtggttgtctgtgaggtgtgtgattcacttgaaaggagcatgaaagaactttctgggttgctggaaatattttgtatcttgactggggtgttggttagatgggtatttccacttgtcaaaactcagcaaattgtgtgctttcgatttgtgcatttcactgtaaagtttacttcaatttaagaaagagagaaaaaaattgatgcgtttctaaattgtattgtcttcttcacatgaaaaaatgttctaattttttagagttcctttgtttaataataaaagttattgatatgttagaggcattagcatgactgtccacaagcctgaacccagtgcaatttgtaaagaagatacctgagtcttggctagatgaaaattataaatacacagaaggagactgggtttttaaaaataaattagagacgacttggcgcggtggctcacgcctgtaatcccagcactttgggaggccgaggcaggcggatcatgaggtcaggagatcgagaccatcctggctaacatggtgaaacctcgtctctactaaaaatacaaaaaattagccgggcgtggtggcgggcgcctatagtcccagctactcgggaggctgaggcaggagaatggcgtgaacccgagaggcggagcttgcagtgagccgagattgcgccactgcactccagcctggacgacagagcgagactccatctcaaaaaaaataaaaattaaaaaattaaaaaaaaattagttagagacagaattcaaagcccaggaaagggaagcatttagttaggcctgagaaaggcagagaagaaaggcagttggaattcccttgctacttctggatcctatggtagaatcattttagtttgtatcatttctacttttggacttcctcaaattaccatatttctcctaggcttctcacccttctcatttactattagcctttcatccttctgaggccctggtactttaccaaaattatactgagattgggtctgagaacttggaccaatcacttatctacatgaaatagttaaaaggagttttaaatttctccctaaattccaacaaaacattttgggaaaaaagtagcaaaaaagactagtatacttatttgacttttcagaattccttttgcttcccaaatatatcattctcaataataataaatatatttccatctacttagaaataatcagcgattagtgaaacatgcagataatttatcaaaattaattaaatctgcaggatataaagaaggggaactaatttcttattagacttggaaaaataattttaaaataggtagatatttgctgtttgtggcctgccattagtggcctccttgaaaatgattaattactatgtggagaataataaaattgtaaggaaataggcttttcttgaaatcatttctttaaaatgtggaatgtaatttgctttgcttaatctggttttctttaatgtatgcmccagccacaccctcataagttaacatttctatagaaaaaagttatatttgtgttgctttcttactaaccaaatgccttcttttgttcaaagatgggtggaacargaccctaaggaaattctacattctgtctatgagtgtatagagaaaacatgtgagaaacttggacagctcaatattgatatttccaacataaaaggtattttagtagaatattttacccacataataagactctctcaatcaaattcattaatttattctttcagcttataattgagtgcctatgcagtgccaagcatttctatgagaacttgaggatacaacactaaagaggaagatttaagttcttgtcctcatggagcttttatttggatgggggcgagataataagagcagaaaaatataatttcaaatactaaaaagttccattccaaaaaataaaaaccaagtggtatggtgggttttgcctagaagggcttgctttagattaggtggccaggaaaagcctttctaaggatgtgacacttttgctgagctctcagagggcaaaaggggtcagccatgccagtgtctagaagagtgtttgaggaaaaggatgcagcacgtacaaaggccctgaagtgggaataagcctgggacatttccgggtcagaaagaaggccagtgtgtcaaaagaagactaaagatgttgagcagtgagactgggtagggggtttcagtaggcgatcaaattgtggaagtgggtcgggcttcatcagccatatttaggattttggatgttattcttagtatcatagggagccatgagaaagtttaagcaaggcggcaagggatgacttgcagtttcaaggcaactttctgactgctgtgtggagagtagatggtaaaggcaaaagtgtggacacagggagactagtgcggaggctgctatggaagtcctgagagaggatggtggcttgaccaataatggtagcagtggaggtggagagaaagggccagaatttgctgatagactggatgttggggtaacagagagagtagtggggttgagggaagagattggtcaaaggtgatgctttggtttttgccagagctcctggatagatgaggatgccttttgctaaggagagaaagactagaggaatgagtaggttgtggggaaggggtatttggaatccaaactcttcacttctaaaatttccctgaaataattgcttgagggtgttagattgttatggatttctctgagaagtcctagtagttttttttttttttttgagatggagtctcgatcttgtccccaaggctggagtgcagtggcatgatctcggctcactgcaacttccacctcccaggttcaagcaattctcctgcctcagcctcccaggtagctaggattacaggcacacaccaccatgcccggctaattttttgtattttttgtagagacggggtttcaccatgctggccaggctggtctcgaactcctgacctcgtgacccgcccgcctcggcctcccaaagtgttgggattacaggcatgagccaccgcgcccagcgaagtcctagtagttttaattgaatatctatgtttggcttttcatcattcatatagggaaaaaaaatccagccacccaagattgatataatagcataaaaggtggaagcatagtgtggaagtttgctgtctactttatagcctaaaattttcaagtttaccattcaagggctctttttttcctccttaggtagtttgactatagatagagagaacatcaattggtggtggtggcttgattgccatcatcttggctttgatacttaccatcgctcctgagcctttcccctatttgtataaattaaaactcacttaaaaaaaaagactacaaatctatagagtgcctactatgtgccagatgtgctaaggatacaatggaggtaatgcttaagtgcagaaaacatgttaatctgataatcacaaataaatggaaatgcataaaataatagagttatttctgttattgcagattttttaaaagtataatttgatattttattaacaacttttaatactatgcacatattaatcctatcctccctttatccctacatctaagtggaagggcttcaaacttctcttagggttgtagtcctgaactttagatgagttgtgcattagtgattgttgttgatcatttccttgagctgttcttgcacttctcacagtctaaacagtgcaaacaaataataggcaatcagtagcacactcttgtcaaaattaccaaagacgtaagtaatccaggcagcttaaagccatgtttagaatgtagagtccagggtgattgaccatggctttgacatcattctacctcccttacaggtaaggtaggttgtgatgtgttggctttctggacccacttggatgctattcctttctcccttgtttttacggttatgtgaagatgacacacaactcctgcccaagtgatttgtcttccgtttgcactacctggtctaagaattgaacaggcagcttctctatactcctctgtgtctggccagtgtgaagtccacatctgagccaaactgacccagcacttccatctgtacaactaccatcctctggccacagaagagaacatcccacaagctcctccataccaggccagttgtactatttttttttttcccagaaaatttatccaattggcattgccaaggaccaagcttttgcttgcctgcatagaactctatatcacaaactgttaaagctgtaaaggaggctgggtgcagtggctcacacctgtaatcccagcactttgggaggctgaggtgggtggatcacgaggtcaggagttcgagaccagcctggccaacatggtgaaaccctgtttctactgaaaatacaaaaattagccaggcgtggtcgtgggcacctgtaatcccagctacttgggaggttgaggcaggagaatcgcttgaacccaggaggcagaggttgtggtgagccgagattgccccactgtactccagcctgggcaacagaacaagactttgtttcaaaaaaacaaaaccaacaaaaaaggctgggcgcacagtggctcacgcgtgtaatcccagcactttgggaggtcgaggcaggcagatcacctgaggtcaggagttcgagaccagcctggccaacatggtgaaaccctgtctctactaaaaatacaaaaaattagctgggcgtggtggcgcacacctgtaatcccagctacttaggaggctgaggcaggagaatctcttgaacctgggaggcagaagttgcagtgagccgagatggcgccattgcactccagcttgggcaacaagagcgaaactccatctcaaaaaaaaaaaaaaaaaaaaaaaacaacactgtaaaggatcttcagtcaactagaccagctccctctatctgcaaattagggaagaggacttaactgcaggttatgtagctttttagtggtagattaacattaaagcacagctcccctgactcctagaccagagttctttttcctgagccacactgatggtaatctcacaaaccacttctgtttttatttcttgtgtggcaagtaaattaactttgccaactgaagagtgatatcatttatagtcctacctgacagtcattaagagttcttcatgtctggtatttccttggcaaatttcaatttcattggttttgttatgcttatctgacagaaggtttgttgatttcaagtcactaggaacagtgcctccaaaattaaaattcactctccaactgagcagcacacactagctcaaggcaattaaatagactgcttctttccttctagcggtagagtcagctctgtttgcctgtcactgggctcaaggaattacaaagtataaagagttacagtagcaattccaaaatacaaagagttacggctgggcatggtggctcacacctgtaatcccagtactttgggaggccgaggcgggtggatcccctgaggttgggagttcgagaccagcctgaccaacttggagaaaccccatctctactaaaaatacaacattagctgagcatggtggctcatgcctgtaatcccagctactcaggaggctgaagcaggaaaaacgcttgaacccaggaggcagaggtagcagtgagccaagatcacgccgagccgagatcatgccattgtactccagcctgggcaacaagagcaaaactccatctcaaaaaaaaaaaaaaaaaaaaaaaaagagttacatattcattcatgtgatagaacgaaaacacaacataaactctttcaaaattgagagcataaaattctcagagattagattatcttgtatctaaaacaattatttccctgttagagaaaagggaaacccacatatccattcctccactgccttgccctacccaacatattcacacacatttctaccacctcttagactcatactgtcaggggcctctcaggggtttcaggaaggcacctcgttctccaaaatgtttccagcagcagccacatctcatttgcaatttttctaacccacctcaagtacacatcttccagagcctgttttaaaaagttttatcaggccgggcgcagtggctcacgcctgtaatcccagcactttgggagactgaggcgggcggatcacctgaggtctggagttcgagaccagcctgaccaacatggagaaaccccatctctactaaaaatacaaaaattagctgggcatggtggcgcatgcctgtaatcccagctactcgggaggctgaggcaggagaatcacttgaaccagggaggcagaggttgcggtgagccgagatcgcgccactgcactccagcctgggcaacaacatcgaaactctgtctcaaaaaaaaaatgaaaataaaaagctttatctctcttcccacatggtattcctttttgtagccagagaaccttcctctgaagctcttattattttgttctgtgtgtttttagttttctcctaaaaaatgtgttataattatatgttatgattttaattttaaaaaaggatgcatctcatccataattctaccaagacaacaattattaacatcctggagtattttcaaaggctcttttttctaaggtatattttcttaactgtgattataacttcacggaaaattttaagaaaaattaaccagggattttgagtgtagcttttaactagtttaattttactactgacattcagtgtagagaaaagtgcccccaaagagaatatgtgggtaaagtatgaagctggtaaatgcaagagcaatacgatatatgataatggttatgatgtccgtaaatgaaagactttgaggccaggaaatacatgttttatgcatgtgactttcatattatcttaaacagtgcacatgaggaggagtggagaattataaaacctgaatgtgttattccaagaaagaaggaattaaaattaggaaccattaggaatggcacatgtgctgagattagcagttggcaacgttttctttaaaaaacatagaggattttagggtaggaatgacaagacactggaacattgaaaaagttcagagataagttcacacataagacttgtgtgccctggggagaaataggtagtaaagacatgtttgtggctggcagagaatcctgggaagctgtttcactggactttgcctgcaagcaaagcaattttacttggcatgaaggaatccaattaagatagaagagaaaaaaggaatgcccagggaggaacccgtgactgaagaatcagattgaaatagctctaaattagattctgaagaaaagttaaaatgacctggtaaagataggtagcatgagaggcatagaatagtgactcaaggattgtgagtaagaaagtagccagcttattgatggtaaaattaacatagtgaggaggaataggagattttagttgactataagttcattgtgatcccatgttgtaaagttgtcacacgcacaaaaaaattacattcacaatatgtacccatagagctgctgcagaattcctttatttgccctccttagctcagtcccattctctgaaactgttactctactctcttctcaataataatgaccatggcagcagcagtaggtaacatttattgagtgcttactgtgtaccaggcatgtgttttaatatacattgactcctcactgtaaccctgtaaagttggaactattattctctccattttacaagacacaaaactgagacccagagtcacactgctaggaagcacaggaattggaatttgaatcccagctatctggcctcagagcctgagctctactgaatggtgccccaaactcttgccctgttttggcagataaccctacctcctgcttcatggagaaagttgagggtctgcggccttaaatcctcaccttcctgttgctgtgcttaatatctggatctcctgccaactttccttcatcacaagggcagcaatagccttctgccccacttggagctcctccctccacttgtgctggtaatccatcctctcctgtcactacatcagtcagaaccaagtccccattgattcccagccccatccatcccctcattctcctttctcttctttatttacttttataaacatttttgtcttacccagaatctcttccttataccctatgcctctaaatttctttggagtagaatctcaatcatctttgtatctctagaaaatattttttaaaaaatatatatatatataaacttttagatacagagggtacatgtgcaggtttgttatgtaggtatattgcatgatgttgaggtttggggtacagacccgtcacccagttagtgagcataccacccaataggtagttttagaaaagatgttgaataaagtaagtcaatctgcattggataaatagtattagaacaagggagctgatgttccccctcagctctgtgctggtcagaacattcctagagtattgtgttttattctggacgtacagtttgagtgatatggacatacacttgcatgttcctaggcgtggtgataaagggactttaaaccatgccatgtttaggtggggtcagttgaaggaaattggattgtttaggctacacagcagaagagaagacttgaggtacaaaagagctgcttcaagttttgaaagactggcatgtagaaggattacccttattctatatatctccaaagaatatgactaagatcgggaggtggaagctacacaaaaaatgatttttttttttttttgagacagagtcttgctctgtcacccaggcaggagtgcagtggcccgatttcggctcactgcaagctccgcctcccaggttcatgccattctcctgcctcagcctcccgagtagctgggactacaggcgcccaccaccacacccggctaattttttttgtatttttagtagagatggggtttcaccgtgttagccaggatggtcttgatctcctgacctcaggatccacccacctcggcctcccaaagtgctgggattacagacgtgagccaccgcacccggccacagaaaatgatttttattcttctttttttttttttttttgagacaggatctaactatgttgcccagtctggagtgcagtggcaccatcagagctcactgcaaccccaaactcctgggctcaagcaatcctcctgggtagctgggactacaggcgtgcaccaccatacccccctaatttttaaaatttttttttagaaacaaggtccaactatgttgcccaggctggtcttgaactcctgggcttaaggaatcctcctgagtagctgggactaaaggaacacaccaccacacctggctaatttttttttttgagatacagtctccctctgtcgcctaggctggagggcaatggcgcaatctcggctcactgcaacctccgcctcctgggttcaagggattctcctgcctcagcctcctgagtagctgggattacaggcacatgccaccatgcctggctaattttttgtatttttagtagagacagggttttgccatgttggccaggctgatcttgagctcctgacctcagatgatccacctgcctcggcctcccggagtgctgggattacaggtgcaagccaccacgccaggccatctggctaatttttaaaaatttttttatagagactgggttttgctacattgccgagggtggtcttgaacccctgggctcaagccatcctcctgcctcagccccgagtggctaggactacagttgtgtactgctgcatctggctaattattttatttttttgtagaggtgaggtcttgctacattttccagtctggtggatttacaaaaagaaaaaaagcaccaaagttgtccaatggagattgctctgccttgagagatgtagtgaatatcttgtcactagaagtgctatctggatggtcatatgacaggagattctagagaagatttgagcttgagaagtatttttgcttatacagcctttaaggtctgtcctaatcttaaattctggaagagctggatcctttggccaagtgtgttctatccaggatgcacattagaatcacctggggaagttttaggaacccataccaatgctcacatcccatcccaggtcagttacattggaatgttttgaccagggcttggtcattggtattttttaagagctcctcagttgattctaaagtacaatcaagtctgaaaacctccaatttagctcaaccaagctgaattgaataagatagtgtgggttagtgtttttttacactaaatatagtacttgttttatgtaggtcaatataatgtaaatgccattatatattatatttatgcctgattcaaattcttatgtattgtgacatattaaaaatacaggaataaaactgaatttctaacaaaccataatataaggatgctcagcatgaaggattttgtccatagctattttcttaaaatgtaggcatgtacatgtgcacacacacacacacacacaaatgcacacacatagggaggaaaatttcttgtagcaattggtaaacaaatgaatgagttgattattggtctgctcagaataataaattgggtattataaatttgtgaagttattgcattccttaaagcaaccagtgtgccttttatttgggtattgatctgggtccatcattgtgtgctagtagtaaagctggaaggagtatgtagaaatgaaaagaaacacttggcattgggtattgactttttctggagccactcaaagaaaataaactaatatcactacaaatgtttcaagtatttttttgatttgctatgtttagttgtgtctctagtaagatgagagctgttttcctgaagtagtttcctacttgttaaatttttgacttccttctgtttaactttctctttaaagctattggtgtcagcaaccagagggaaaccactgtagtctgggacaagataactggagagcctctctacaatgctgtgggtaagctgtcatgcatggatgtcaaatgtagggcctttcttcacattgcaaatgtggtcatattaaaatatcttgctaaaaaagcatgcagtcgccaggcatggtggctcacgcctgtaatcccagcacttcgggagactgaggtgggtggatcacgaggtcaggagttcaagaccagcctggtcaacatggtgaaaccccatctctactaaaaatacaaaaattagccaggtgtggtggcacacacctatagtcccagctactcgggaggctgaagcaggagaattgattgaacctgggaggcagaggttgcagtgagccaagaccttgccattgcactccagcctgggcaagagagtgagactccatctcaaaaaaaaaaaaaagaaagaaaaaaaaaaacacatgcagtcatggtacctataatcttgatgggatgggcagaagagtctgctaagaaattaactgttgtatatttaccatttttggatcatacatattcacatagtgaattaactctcccatgctctctcctcttgcagattgtcttacaaatgagtgaatgtttgccaaattgttttataacccctgctgtttgtgacatctaaaagagatcttacctccttaccctcaaaaaattaaaattacgtgtgttcacagtcatttttctataaagtacttgtgtgtttgtctttccatctaggaatttgaattattcttctaaggttataaaaatagaatattcgaattttagctgcttcttctacaaatgtggctatttgagcagggatttaaaaaaccccaaatctcaaatataccacttttaggtatcacaacttattaggtgtaaatgatcctgagtatattttagcatcattattagcatgacagttgttgaacaccgaatgatactaccacttcctaaaaggaaaattttgttctaaattacaatcactaaaagacttcattgtgtcagaaagcaaagcacaattttttatcaattaaatactaagttgtgggatggggaatggaatcagaaattatcagagaggggataattttgggggaataatctttattaaaagttaaagtatttaatgttattgtattataagaaagtatttagtatgttttctgtatttatgataaaaaattaaattctcaaaaaatttgaaagaattacaactaaagatccttttagtacatctttttctgtggtgttttttttttttttctttcctctgtttttttttttttgagacagtcttgctgttgcccaggctggggtgcaatgacacaatctcggctcactgcaacctccacctcctgggttcaagcgattctcctgcctcagcctccccagtagatgggatcacaggcgcccaccaccatgcccagctatttttttttttttttttttgtatttttagtagagatggggtttcaccacgttggccaggctggtcttgaactcctgacctcaagtgatccacccatctcagcctcccaaagtgctgggattacaggtgtgagccaccacacccagccagaagtacatgttttaaatgtttattttgttctcattctcatgagtaattcattttgaatataagacagactatttaatgactagtatttaggagagtatcctttgatagatcaatgttagctaacttcctgaactagttaaggttttactttcttttgttttcttaatgaaaggaagagcctactcaggcaaaccagaaagttccagttaaattctgagctttttttttttttttctttttttgagacagagtcttctctttcactcaggcaggagtgcagtggtgcaatctcggctcgctctatctcccaggttcaagtgattttcgtgcctcggcctcccaagtagctgggattataggtgtgcaccattatgcccggctaatttttgtattttcagtagagacagggtttcaccatgttggccggactggtctcaaactcccgacctcaggtgatctgcccaccttggcacgcccggctagttccagttatattctaaacattgaattgtaaaaatggaactttggactttggattgttatttttcaaataatgcaactaggtaagctgaagttatgcttacagtaaagatttaagtaaatgttttactagaaaatctttctgtgatgttcttatttacttatttccttctcttctgcctgtgtccctctgcacccctcccccattctacatgctttgcagtattaattcaaatgttcataggatatgaggaactcttttcttctatcctgagccacatacatgttttgagaacctcttacatgtttgatgttatcttgggtactataaaggatacaaattatattggctgtttttttaagcactttataatctagttttggaaagagaaaactagattagggaacaatccataaaacaaaattagggaatagttgataaatcatgtgttgataggttgaaaaggacttagagcaagtacatatcagtatggattttgaaattttagcatacttttcacagtggaggttgaacttcacttgggccttgaagcgtatattggattgcgttaggaaaagagaaaattgaggaataatgtgaacaagctatgaaggtgaaaatgtgtacacatattttgccagagtaaagaaatggatgagtttcatgcataggttgactcatttttttttatttttagtagaactagcagcgataataatactcagtaagtgctaactgctattactttgggattgtgctaagtattttacccatattatttaatctcactgaccctgtgaaacagattttactacccctattttataaattaattgtggaaaagctctataacttgtccaatggcatgtagctataagtagagtaaagccacagtttaaacatgaacactctccaaccttaaagcttgtgttctaatttgggtagacaggggttggtgaggatatagagggggctgaaagccatgcagtgtagtgtagacttaaaacacggggcagcttgaggcaaaacagatgataaaggagagtttagccatcccatgatggtggaatgggttgtttcaaacacaccagtatgcggagaacaaccagaaaagctggwtgaaaatgaaataaaattctgaagaactggaaggctaccaaggcagtgaggacagaaggaaagcccagagacataagcctagcatttggcattgcttatctcctggagatatcggtaggttctgaaaggagtatctgacaggctaagccacacttctgcaggtccataaagataaggaggcaaaaggtgaagtcaagggctgccaagggtggggatgagtgttggtaaaatcccagactttggactgggactgtgaaaggtcaaatcctggaagtgaggtaaactgaaaataaaccaaccctcacaggaattgaagcccagattcaaatgatctttaacactaattggattaagatgatctgagattgctaatgctagtggcctaacttcctttcagaaataagagtaaatcctttctggaggaagacaacatcatctagagcctcaaataatctctagaatttttcatacgcattatctagttttctatttaaaaaaaccatgcatacaaaacaaaacgtgactgaaaagcaacagaaacaagtgacattagaaacagactcaagaaattcagatattagagtttttagagtttaaaatagccataattaatatgttcaaggaattaattgacaagattgagattgataatcttggcaaagaattggaagtccagtttaaatggacattctaaaactgtattaagaactcaattgatggggttttaccatcagaggagacatagctgaagatgaatttgtgagctggaagataaatcagaactgggagagagagtaaaatatttagactgaagcacagagaaacaaaagtttagaaaaggcacaaaagaatctaagagaaatatgggaaaaggtgaagaagtttaatatatttgtaattggacttccagaaggaaaggaatgagaaaaaacgaggcagaaataacattagacagataatgggagaaagtttttcaaaactgatgaaagatagcaagctgtagattcaataagcactataatccctaggcaagataaatatacagaagaccatacttaygctgggatatgaagatataaagttttgaagtagctgaggaaaaaagatatataaccttcaaaagagtgaccctaagactttcagctaagttatcagtggaaacaaaggaagtcagaatgcgatggaatgaaacctttaaagtactcaaagaaagtaacttccacatacagttctatatccagtgaaaaaattattaagaaatgaaagtgaaatatactaggagttggtgaggatatagaggtcaccaaaagctatgcagagtagtgtagacttgatacactaggcagctaacccattctcttagtccattctggttactataacaaaataccctagattggataatttataaacaacaaaaattttattgtttatacattggatagggcataaggaggagggagaaaataaagcaggcctgtgagattttcagcctgagagaacagaaagaaattaaataatatttagggggtaccaacctgagagaaaaaatggccttgttttcgacaaagtgagtgttgaacttgtaatagaagctaattctgggcaatgagaaattagatggttccaaatgtagacttgaaaattgataacatagatgtgataatctcaatttattatggatgaactcactatagtaattaatataaaattaattcaatgaaagaataggtgcctttctgtgttctaggttttgtgataacccttggcatatagtgacaaaccaggaagaccttgtacttgactttctgctacagaaactaaggatagaagtttggaagctagaaggagaaagggaaataggaaaggaggagagccactaagaaatgacaaggatagattctgccttcagttttatttcatccaggaaaactctaaagtgtcatatctccatgtaggtcttcagttgaaaatatcaacataatattaaatctttagcagttttattctaaagcaacacaaggtaggatggatggaaacaatgagattttcacgtatatttgtctttgaacttcttttgctttgtttatatcacagtctgcaggttttatacttttttctctgtctcggttcaggctgctttaacaaaaatatcatagactgggtggcttatagattagaaatttatttctcacatttctggaagctagaagttcaagatcaaggtgcttacccatctggtgtctagtgaggaccttcttcctggtttgcagatgactgtcttctcatcctcatatggcagacagtgataaaaagaaagtaagctctctctttttatgagggtactgatctcaatgagggctccaccctcatggcctaatttatctctcaaaggtcccatctctaataccatcatattaggggttaagattttaacatacgaatttggaagagacacatacattcagtccatagcattctctttgtatgttttcttccttcgttgtctatttctcttgtaaatctctgtaactctatgcctgtccttctcctctttatttctgtcttactaaattatacaacagatgatatatgcatatatatatacagctgtatataaatatatatattttaaatacagatagggtctcgctgtgttgagtaggctggtcttgaactcctggcctcaagtgatcctcccatctcggcctcccaaagtgctgggattacaggtgtgagccaccatacccggccagatgagcaatatttattacaaacaagcatatgagaggagcacattatgtttccctttttaaaaacttctatgtggcctcctttgtttatggctcagggacacttgataagcaataattcactcacccccactacggtaacagaaaaaccaagataggagaacttcaggatatcattggtggccacggcataggcttgatgaaggtaaagactgagaagggctatttgtttttgcttgcaataaaggtgtgtttgtttattgacatcttttctatcagatacaattataaacagaaaaaaatttaaatgggtccattgaggaagagatggcctaatttacaagttctatgtatttttagaatttatctgttaattatgtgattaataaggtaaacattaatgtgatatctaaaatgggaaagtgttactttgcatcactgctttccagccactgtgccatgatgcaggcatttacaataatgacctcattggtggatcagcaagagctttgtggccctggaaccaaagcaggccttgggcttctcttgcctctcttcagttgccctagtcttcctggtacttctctctttcccttttagcattatcttcaatattcccttccacggggtttcctctacccacccatttttctaagccttttccttccaaaagcagcttttattaatggtctacataactggttgtcttctattattgaaaaagtaaataagccacagactaaactgaccaagaagcacaaaactacccaagtagttaaaatgtgaagcgggagaaggcttgaatcagtgatgtttagtatgtttacacacacattttactgatgctaccagggaaatgttctgtccaaactagaatggcctagctgtatttccccctaattggccaagtttgctcactcaccactgcagttgattggtatgtatggtaagtatagagcaatatgaccctcactctggtagctttctgtagagcacaattcttgatttaatataaaaataccattcatannnnnnnnnnnnnnnnnnnnnnnnnnnnnnnnnnnnnnnnnnnnnnnnnnnnnnnnnnnnnnnnnnnnnnnnnnnnnnnnnnnnnnnnnnnnnnnnnnnnnnnnnnnnnnnnnnnnnnnnnnnnnnnnnnnnnnnnnnnnnnnnnnnnnnnnnnnnnnnnnnnnnnnnnnnnnnnnnnnnnnnnnnnnnnnnnnnnnnnnnnnnnnnnnnnnnnnnnnnnnnnnnnnnnnnnnnnnnnnnnnnnnnnnnnnnnnnnnnnnnnnnnnnnnnnnnnnnnnnnnnnnnnnnnnnnnnnnnnnnnnnnnnnnnnnnnnnnnnnnnnnnnnnnnnnnnnnnnnnnnnnnnnnnnnnnnnnnnnnnnnnnnnnnnnnnnnnnnnnnnnnnnnnnnnnnnnnnnnnnnnnnnnnnnnnnnnnnnnnnnnnnnnnnnnnnnnnnnnnnnnnnnnnnnnnnnnnnnnnnnnnnnnnnnnnnnnnnnnnnnnnnnnnnnnnnnnnnnnnnnnnnnnnnnnnnnnnnnnnnnnnnnnnnnnnnnnnnnnnnnnnnnnnnnnnnnnnnnnnnnnnnnnnnnnnnnnnnnnnnnnnnnnnnnnnnnnttgagctcaatccttttatcttttctggaactggcttatgtttcaaagaatcagcagaaaagaaaaccatagatgacaaaccacctaaaacgcctaagcacacttaactttaaacaataaagtattttttttctttttttttttctttttttttgagacggagtctcgcactgtcgcccaggctagagtgcagtggcgcgatctcggctcaccgcaagctccgcctcccgggttcacgccattctcctgcctcagcctcccgaatagctgggactacaggcgcctgccaccgctcccggctaattttttttgtatttttagaagagacggggtttcaccgtgttagccaggatggtctcgatctcctgacctcgtgatccgccggcctcggcctcccaaagtgctgggattgcaggcttgaaccaccgcgcctggctaaaagtattttttttcaattagttctttgtgggagaaggtttttcacttttgtaaaatctagaattttcagctttattaagatccacttattttccgttaaaaaaattccattattacaggattctttgaaaaccttacatctccctcaatcctgggtaaagaaatactgctgtatttattttgcagtgattgaattattcaaatctggccaaataaaaagaaactgacttagttttcaactttgagttctccaatctttaataattatttttatcccgttaagactgtgacgtcatcatggctatacctacctagaggtttaattctagattcaggttctgggttcagatcctagcttttccacttcctaccattctgtgcctgttaccttgacagttaaactggggagatgaaaagtgtagacctcatagacttgaggtgtagatcagtgagttaatccatgtaggatacttaagccagggcctgacggactataaggcttcagtaattgttagctagggccactgttctgaattggctgatagcctttttcatccagtaatgccagatgaaatgattggtttatacatgataggtgttcctaggggaaatgcagagcctacctaggatcacccacactcaagtcagtcattgatattttggcattttatacccaagagctgaaattggcttcagcccccgccttttggcatatatgtaaatcaatctttccttcccaactctgttttacttttggccccacctgtttctgagaatgtcatcaggtgaggggcagccatcaatatagtctcttccaccttgcaaatgaccacttacccagcttaattaatagcttagcttttgacaaatagtaaaatgccataactaaatctgttttactatcatgtctcttgtgggagaaacaacccaataacactttgtataactgtcagcagtctgtgcttaggatgtgttccataacctggagcctcaccttcacctcacttcctatcaccctagcagctcatgacagaccatctcagagaagatttattatttgcctgtttctagtcaaatggaaatcagctagatgattttagtggggtttttttttactttattttgtttttccttctattgtcatgactaacgaaaaactggaaagttatgaggttttattattctaaatatttaaaaaataatttattcctctgtactgtttgttactatgtcactaactctagcccatggggattgaggcaactacatttatcttcactcttcaaactttttttttccagaacaaactaaatctaccagacagattggatgtgactttatttaatacaaataagttcagatcatccaagttatttttattaacttacttatttgatgggcttgaccatttacttctgctttacttggtgtagataaggggagggacataccttctagaagtgggctgtctagtgttctggactccctagcatcaattttccttctatttttttcctaattactttggaagttagcaatcccctgttccctctagacacgttgctcccttctgtgaaggtgccctttactcccagctatcttaccaggaaagtgctttcttggggacctgccttcccaaagcagccctttcatgtcttaatgtagatggccacaacacagactgtagcatgctccttgccattcctttctaacatcctctaggattgtgctycctcagtacatcatccatcatttcaatttagtggttgaatgagtagtcagttaccacctgagccacttttctaattaggatgcatatatgttgccagatagagaagagtcatcctaaacaagaagcaggtatttacctggtcttcatccaaatggaaatattattgaatcagagattcatactggacttcctttgttccctttctgctccctgcctcttccttttctttttctacaccaatgtgtagaaaaagtgttcattctgataaacttgcccaagtgatctaccatttcctaaatggtcaacaagagaccttgaacctggccatctctagcgtgaattgcccttatttcttctaatgctccagctgctccagtttctcctggcccttcagttccagttgccgttgttccctctggctcttcagttccagctcctggtacttcctcaagtattggtgctctggctattgctcacttcccagcctcccaagtcctatatgttgggggaaattgacttctgctgccagatctggatctgtcattccttttgattgttctcagagattacctacacaaggggcttagtcctccagcttgggagtcttctctttggcttttggtctctctgcaaatctaattctgccatcttagcttctttaataagttttctaatttttttgttcttaattcaattaattttgagcatttgtgaattgcttggtagtgtaccaaccactgatatttttctctttggcagttttactaatgcattccatgtattctaactgccttaatgtctgtctataaaaacacagtaattattatgacaggtttctatgatcatggaacaatggaaggagaaagactttagagaccatctagtccagcctccttattttatatttagagaatccagaccaagaagggtaaaatgagttgcctaaatcacatagcttattggtggcaaagccaaacattgaattttggtctccctgatttcacatccagtgttttgattctttgtggtaaggatttaactctgtgtttaccactattgtcagtcacagctgcaaactttcaagtgaggaataaagtgcctaagtggtccttgccaaggagcaatagaatcacagggccactgggacttggagaaccatctgattatcgggggggttctttagatttttttaaacatataattggaacacacctagtattttaaagaatatkctcttgaaaagatgaaaagagtttctcccgggaggcggaggctgcagtgagccgcgatcgcatcactgcactccagactgggtgacagaaagagactctgtctcaaaaaaaaaaaaaaaaaaaaagggagagagagagaaagaaaacaggtcctcatgttttagtattatactgaattacttgagacacttttaacaaaagtacagaggctcagagctcaggccttgcctagacctgcaaccagaatcatgcaaggtagggcctgaattttaaggttttccaggtagtcctggtatgctttataggaaagaaccactgccgtgaagtctagcagtgtttctcaaaatggggcacctatttaaaagtcagatttctgggcctcattcccagaactactgtcctagaatttatggggatggagcccatctttaagctcccttgtgaatgttatgtccattaaaatatgaaaaaacacggtctagaatattttaagtcattaaccaaaaaagcctggggcagtggctttcaaatgtatttgttcatgccccttggtaagaattacattttacataatgatccagcaaatccacataactaaaacaaaagtttcacaaatcaatatttatcttacccagtgcactgaactctgatattttccattctaattcatcctatttcaatttttaaagtaggtaatcaaaactcactaaattcatttttaaactcatagctcactgtattttgaaacactgagtattgagatgtgcttgttaattttacctatcatagatttaaaacttttctaattcttctactttttctagttatttctgtgagccaataacacctgctaggattgcttacctgtaaggaaggtccacatttgtcacagtcatacagtactgccactgtgtaaaagtagactgcccttgttccctgggcatgggagatcttgccacctccatgatgatgtcactaatggcttgtatcaatcacagtgtaaataatagaaaattctatttcaactaaatgaagtttaaagcagggggcagttcttttgctcttggaagcagcagtgcaagggtagctaagttcaggtgctgtttgattccagactcagacagtatcacctgcatccccctcaagcctgccttttctgggatggctcctgatgtggcatattcaactcccacttcatgagggcagcaggcccaagccacacactgccaaggtcagctgagaagagggactcttgcagactgagcacaaatctctttgaccacatgtttcctgatccagtcactggggcccagacccattcctggagctgggagtaagatcaaatctcaggtacactacatggctgagggtgagggtggaacgatttcctaaaaagaattcgaaatacctctcccccaacagatgcaggaggagtagatactgggcagcaaatgcagatgttatctattataggccatctattttcatggtctttctcttttccctcctgttttcttggttgtggtgagtcttttcttgctgcttttcccacctacagaaacccgtatcttgtcctgaagtccccagtttaagtcttgtggaaagtagccactgtcaaaatgaagtgcagggccctccagggaaatgacagcataagtaattagaaagaattgattaaaatttactacaggaaataactgctttttagtgaagagaatggagtaatatagaagagttaaccaaactgcacaatgattgctagcattcaaatatgtggtagtgggcaagcttgtatagtcttccctggagtcctttaaatagactatgaaactgagtcttttcaggaggtatctgagcagtcagtgtcctaaaaatatcaaatgaccacaaatagattaaaagttatcgaagtttaagtacaaaacttaaatctggcaaataaagcttagctgattctattggctgcctttcacaattactttatgtactatttagtgtttcctcttcctcaagcctactaacatgaagtaaaacagaaatcgtttccaccagggggttagaaagtagataatagctacttagtaaagataatgttgatccattaaaatggagattttttttttttatactccagcagagagaaagaatggtgcctttaaaaggattctaatgattccgggtctagcatacttggaaagatttcaatgtaaataagcatttcatacataacagacggaatcttttgtttcctgaataacagaatcaagttatctactttgtcttagtcacaaattgctccctagtttgttaagatgcacactttatatatggtatgatgatcctgggttttgcattttgtgctaccaactagcctgcctagcttttagatattctctggcctcatgtatacttagaaaatctatattccaaatattttttgtagttttgttctataaaaataatacaaaataagcactctaaggtttgtattattctcctaacttggtctgtaattttgcataaaagctttaaatcctctcataaatttatttttatctaacaatatgcccattcatttctaattttctaatttctatctcttaaaagctatagaattttaattccttatagaaactaatcagtcttttatccttgatagtgatttcagtaagttcttattttttaaatgaagtttttcatgtatannnnnnnnnnnnnnnnnnnngaattccaggaaataataactttgtcaaggtaagaatttcttcagaagtatactataagaatgtttctttttttaaaaaaagtttgcagatttcactagaaagaagcatcttatggtacaatagttatttgatacaatttatagaatctttttcccggataattgaggccaactcaagtctttaccttcccgtctttcttgctctgtggtggattggaacaataataacacaaaattgacaggctggaagagattataatgcgtcccagtggcttaagtcacacttcccaaggggtgctttttttttttttttttttttgagacggagttttatgcttgttgcccaggctggagtgcaatggtgtgatctcggctcaccgcagcctctgcctcctgggttcaagcaattctcctgcctcagcctcccgagtagctgggactacaggcacgtgccaccatgcccggctaattttttgtatttttagtagagatggggtttcactgtgttagccaggatggtctcgatctcctgacctcatgatccgcccacttcggcctcccaaagtgctggtgggaggggtgctttctataattgaactatgttttccaaatctatccctattttttctactgcccatcaaagaatgttctggctgcttttgagtttttaagcatctggattcagggagagagaaagtaaaagacactctagccctttattgaacccctcttccactttgttcatatgaagaaggctaataaaactgcctaattttcagtccttgtatagatccctcttcacataaaggaagggagagtgaatttttaaaataggtgaggaattttttttagcaaggtcaaggccaagttcttctagcgtctaaaaggaagttccctttttctgtttttgttttttgtgttttgttgttgtttatcccgtttttatttgtcagtgggatgcttgtatcattttcttctaaaactattgttgaaatcccattaattgcagtaatctgaccattccgtccccccacaataacttcagacttgtcctgaataaatcattttctattccgttcccttcatcaccctgcccaatcctcatcctcacctccagctgcactctgcttcgagggatgcatgcttttctctccgatgtcattttaggcaacttttacactttctacccccatgatgaaaataagatattatgtactacctcgctattgactttgtgagatcttcccaggtcatcttttgggatgacccttgttccttcaaattaaataatatttccataaaatatctccttccattttttttttcgagacagggtctcactctgttgcccaggctggagtgcagtggcacaatctctgctcactgcaacctctgcctcctgggttcaaatgattctcctgcctcagcctccccagtggctgagattacaggcaagcaccaccaagcccggctaatttttattctatttttagtggccaggctggcctcaaactcctgatctcaggtgatctgcccgcctcagcctcccaaaatgctgggtttacagacgtgagccaccgcgcccggcctccttccattatttttgtgcattgattttttttttttaaagaaagctagaaaaccttgagttaagatttttaatttacaggttgcattaaagtattaaatcctttggtttgagttttcttacaaaaccatactcatatgagataggagggaaaaagttatcactttctgtagttaggtgataaataagaatacagatggggaggggaatcatagttgcattatttttgtgtatgtattttctttttcttttcyttttttttttttttttttttttgagacggagtctcgctctgtcacccaggctggagtgcagtggcgtcatcttggctcactgcaagctccgcctcccgggttcatgccattctcctgcctcagcctcctgtgtagctgggactacaggtgcccgccaccatgcctggctaattttttgtatttttagtagagacggggtttcaccatgttagccaggatggtctccatctcctgacctcatgatccgcccacctcagcctcccaaagtgctgggattacaggcatgagccaccacgcctggcgtattttcttaactagttaactttaatcagcctttatatacatttagtgtttaatatactaaccacaaatgagttgggtttgacccattctcaaggaagattggtaagcacatatgtgtttcatttttgcccattaatctttcttcagttcacattccctctgtttaatatatttgctaaatttaggcaactgctgttttagatagagtaattctgtgttgctttatttattttttattttttattttttttgagacagagtctcgctctgtcatccaggctggagtgcagtggtgcaatctcagctcactgcaacctctgcctcccaggttcaagcgattctcttgtctcagcttcccaagtagctgagattgcaggtgtgtgctactatgcccagctaatttttatatttttagtagagacggggtttcaccatgttggccaggttggtttcgagctcctaacctcaagtgatccacctgcttcagcctcccaaagtgttgggattacaggcatgagccaccacacctggccctgtgttgctttaatttggcatgtctttgagctctactttagtgtctactaatttcatgttatgttatttgaacttgtgtgtgtatatatgtaaaatatattattaagtcttattgttttaaaagttttctggttatgatcattagtttatgatttggtatactctctggtttttaatagtttaaatgtcatttttatggaatataaaataaacagcatagttttgggctaggttctacatacaatactaatttattgcaaaaatcaacatctacattgtcactatctaattacaggatgttgtgtcatttaattttctctttaccttgctacgtggatgccctttgaactgtaaacatgtcaccctaatctttgttcatgaacatgctttcctgtgccatgagacaggaaaagtatttttattcataatactatgggattgccttcagggtctttgaatattttgtgatttgttgagttcttttgtttggtggttttgttttaaactgttacacttttcatttgctaactgaacttcacaactgttttagtccaagacaggccttccacttagcacttacttcagtgcagtgaaacttcgttggctccttgacaatgtgagaaaagttcaaaaggcygttgaagaaaaacgagctctttttgggactattgattcatggcttatttgggtatgtttaaatataatggatatatggagaattttttcagraattttttctagactgccttgcctattgtttctactagcaggtcagactttttaattagcagcattatgaagaaaaaccactcaaaaagcaacaggagaasttttcagcttccattcgagaagcatttttgcctacttcctctttattttttcttgtcttacttcagtgaaaatgaaggataattaccaaaactgtatctaatatctattatctttaggatgagtaatttagataccctttccctattgtctgttatatactcctttcccactagccatgtcttagacgaaataactatttagcaggataaaatacctagagtacttttatcttttgctttcaacattacataactgtctcttgtataatcaagccataatatgaaactaaatcatagtggaaatttctatttagaatctttttgcctaagctgaatacacagcaatcatcaacctatggccaatcttatttctactatactcacatattctttctccccacagataattttaaaacaaatgccagacatttcattttatttgtaaatatttcagtaagtatgtaatgatcttttttaacattcaagggaatgtcaaggaaatattgtccccactctcacttgacagatccacagagcaggtctttcagaacccatatcagaaagaggcaccttcttcacctctccatgtgcttggccagggcagaatgtgctttgtgttcatggccagccattttcacgtgtgtcagtcacagttgaatgagtacctttgacaattgcatcgaaccagagtaaggcaagatgtggaaactgtgagctgcaggagactcaagggagcacattttggctatatcccactggatgctgtttattgacctttgttcctttcctacctcttattgcttccatgtaaaggaaagcagcagtgccttcagttcaggcatgtgggtacacctgagaaagaaagtttaaaactctcctttcaggatatatgcttaggtgagtgtagatagcataatgcgaattgttatttaaacaacaacagcaacaacaaaaaaaaccaaagagataacaacaacacacaattctctaataatccttatgaggcagatatttccatttatttcatctcgccgaatttaataagactctgagttttctcaacataataggatgaaaacaaaaccgattttttatttatccatcaagtaactggaattrtgctgataaggtggccactagccacatttggctattgagcacttgaarcatgatcaaattgaggtttgctgtaagcatggaatatacaccagatttcaaagacttagtacagaaaaaagaaggtaaaaaaatgtaatgttcygttcttttgctttatgtgctctgctgattatgacccttaacaatatgtaaattaaattgccaataagtacaaatttaacctgatttttttactctgcctagagtttgacaggaggagtcaatggaggtgtccactgtacagatgtaacaaatgcaagtaggactatgcttttcaacattcattctttggaatgggataaacaactctgcgagtaagttctgttttgctctaaatatagttttcccaatacactacctatttataaccgaaatcttaatattttcagatgtcagtggagcaccaaaatttaactgttgatatttcaactacaatatgcaaatctatgttatgtgttttttaaagagagactattattgcatttataataaacaggccaaattaattattcttcacggaagtttaggttcctttataaaagtactttggtttctgtgtgctttctaatttttattgattggcttgcataaagttagaatgttaaatatctaagaatacagctatgttctgttggcttacgtatttattgctatctaactccatgctcaaaaacatccatttctaattgttatttatgctttttgcatttaaatacatataaatgtttctagatgtctatttaaaacagtgttaaatacccaatcttcttgtttttcagattttttggaattccaatggaaattcttccaaatgtccggagttcttctgagatctatggcctaatggtaaaaaacaaacaaamaaacaaaaaacacaccaaaaaaccaaaaaacaaacaaaaaaaaacctaataattaaagtttttttattacaaaacaagtttactattcataattcaaaagtcaactgtgttatgttttgtgacttaaaaactttacagtcctttttacaatggatttgcatttataaactttaattggtttttctttgagtattattatttttaaagaattgatgggatactctaactttagatgttggcatgagccaatttattctttgaatccaaataactgtttagtggttgtgatgtctgcttttaatttagcggagagactctgcatatttagtagtgttctttttcccgttgaatcttttttatggccaagctatgttatatattagattctttgcctgagcaaaatttagcaaagaaactgaaagcaaagagtctgtttctgatttgggattgctaattaaactagtttctgtaatggacatttttacttttgatttcactgaaatccagtaaagacatagcttcagcaaaagtgtgcctagcatcattaagagtctgtggttaaacatcaggaatgaaaacctctaggaggatttgcactggtgtttgagcacaaaaatctggaatttatgataagactcaggaataagtctgataaattacaaaaagtattgcttagacatttcatgaaagatatgagaaacttcacttacaaagttaataataatatagatgaacactaagtgctctggataaagcttgagcaagaatttttaactgttttatttataataaagctttttaaggcaacatagaatttcttaaggaagccatagtcactgcttatctacagtaaaagtgctttgatcatttcatagctgtctgcaaactgacttgggtcaaggaaaaagaaacgatgcttgagaaatagtttcacaggatggttagaaaaaaaaacgtggaactggcctagttttctcttgtatttaaaatattatgcttctatccttctytctcccccttgctgactatagaaaatctctcatagcgtggtgagtaggttgcccgccaattatgtacccattcatttggaaaagatacagtgcacttccatttatttttagacaagcagaagtccatttactaaacatatatatctagaatttccgtgaccttccaaattattataagctctagtcagattttaatttttacaaaaacttaatcttgtttgtttttaaagagtaatgttctaaaataaaagactaaggtagtttcctggaatgagagattctgatattctcataaagtacaactgtgatgtgctttgggctttaccataatagggcaattagatagatacagtttgaaatgtctattttaaatgatatattgaccacctttccagaccagttagttggaaatgcactgttactttttctgcatgcttcatcaaggatgctccaggaggagcatcagaggtccctccctctgaagaaaaaagagcactttacatgcctgaacacacatagtagatcctgttgatagtttgttaattttgaaagtataagcaaagacttcttgtaatacttaaatatatcaagatatatagcctctaggtttcctatagattcactttaagccttttatgaaatttaccctttacttaatatccaggttcagattttcaaagaatatatacagtaaatgaaaatagcaggttttgctgggcacggtggctcacgcctgtaatcccagcactttgggaggccgaggcgggcggatcacgaggtcaggagatcgagaccatcctggctaacatggtgaaaccccgtctctactaaaaatacaaaaaaattagccgggcatggtagcgggtgcctgtaatcccagctacttgggaggccgaggcaggagaatggcgtgaacctgggaggcggagcttgcagtgagccgagatcgcgccactgcactccagcctgggcgagagggagactccgtctcaaaaaaaaaaaaaaattagccgggtgtgctggcacatgcctgtattcccagctactcgggaggctgaggcaggagaatcacttgaacccaggaggcggaggttgtggtgagccgagatggtgccattgcatgccagcctgggcaacaagagtgaaactccatctcaaaaaaaaaaaaaaaaaagaaaagaaaatagcaggttttgaattaaccagaaaacaagaaagaaataaaatgataccagctatctagaggacattttctattttgtaaagggtttctacatttatgctattatttcttcattatcatagctatgtgaggtgaattctattcttgccctcactttaacagacgggatatctaaagctcccagagcctgggagacttgctcatacatggcagaccaaggagtcaggtccaaagctttagtttggtgctcatcctagtacatcacccctacttcagggattttatatatatatatatgttttatatatatgttatatatatacatgttatatatacatgttatgtataacatgttatatatacatgttatgtataacatgtatatatacaacatgttatacataacatgtatatatataacatgttatatatatatatacacacatacgttttatatatatatatacacacacactttttttttttttttgagacggaggctcactctgtcacccaggctggagtgcaatggcatgatcttggctcactgcaaccccgcctcctgagttcaagtgattcttccacctcagcctcctgagtagctgggattacaggtacccgccatcatgcccggctaattttggtatttttgtggagatggggtttcaccatgttggccaggctggtcttcaagtcctgacctcaggtgatcctcccacctcggcctcccaaagtgctgggattacaggcaggaggcacagtgcccggctggggatcctatttcttagttctcctaattccttaatatcattaaatattgccttgagttaatgtgtctttttttaaaattaaggttgtcaagtctacaatcagccacttaaatctcatttttcttcctagaatgctggccatcatgatcaaaataaaaaccagtatttatgacataaattaactgttgcttatctaaatttgaagaaagatgtttgctatgaacaaataatatacaatacctgaacactcttgtgtttagagcagcttgagtagaaagaaaagttgctaaaatatggccttgcaaaataaatgtgtttcatactggtttgatagctattggaagaatatattagtcatttcttaataatggcaataatagcaaagtactaatgaacttgagcaatcacgtagcccaatctccattttgtagagaaataatgtgatgtattgagaggtttcaacagcctgctagtagattaatactaactaactaaccaagagtagagccctcatttactggctcccagtctaacgttttatgttcattctccagtgccacatctcttcctgtcattctaggaatacttgtagtatctgtctctttatcattcatttagttgaaatgctttctttgtcttgtctgcccacatcctctggcacattgctacttgtgttcactcttgttgcagctatgttagtagagccaaaattttgtgactattcataatcctttttttaaattttattagaaagctggggccttggaaggtgtgccaatatctggggtaagtttcatcaccaagtgtctccccatccccacccttccccatgttatggctttcctcctcttagttcatcagtgtgcctctttttaaactagggaaaacaagtaaaagttgcaaaattggctaattcttgttcttacatgtcatactgtgggccattgagaatcttttgaataaattaattttaactctcccttcccatacctattatcttacatattaacaaatggtattaacaaatggggaaaatggccaaatggagaaaatgcaaggaaatagacagttcattctttgataaataaaaaatgaaaaatcctatggctcttctaaaaagaaagttaatactattgtattagtcagtgttctttattgtcatttatactttcagtgtttaggggaccagtctgctgcattggtgggacaaatgtgcttccagattggacaagccaaaaatacgtgagtttaagaaacagacttaaaaaccaatgctgttttgttttttctacttggtgctttgaataaggaaaagcttttgaagttcatccaggatgaaaatcaatagcttaatagctccaatatgcatatatacactttttaccatttttttatatctttaaataaaatacaaaatgccatatatatgcacactgatgaagcttataaagacctaaatttgtaggctgggcgcggtggctcacgcctgtaatcccagcactttgagtggccgagacaggtggatcacctgaggccgggagttagagaccagcctgaccaacatggagaaaccccgtctctactaaaagtacaaaattagccgggcgtgttggtgcatgcctgtaatcccagctactcgggaagctgaggcaggagaatcgcttgaacccgggaggtggaggttgcggtgagccgagatcacgccattgtatgccagcctgggcaacaagagtgaagctctgtctcaaaaacaaacaaataaacaaaaccttaatttgtaaaattcattaccttttatatcctaaaaactaaattttggttcaaagtattcttgcctttttggggagattggtggggtggtgagaggggtgggaagaagtgaggaagagctgtaatatatagtttttggcatattaagtctttctcactaactgtaaagttatatttttgtgggattttcaaggttattttcctggcattgtgctttctctccattatctgaagtttcgcctttcctggcattgtgctttctctccattatctgaagtttctcctttgacaagaagcagaaagaatgatagaagtagagatttggtatatttttctctcaatctcatcttcttactactcacacatgcagaatctggaacaagccccatatctaagagtaataagaagatgactcccactttaggataagaaaatggatactcaaggagcttgcctaaggtcatagccttgacacaaaagcagaaccagatctcaaggccatgccttctgagtctgaatctggcactctttctttctgttcccaccaatcactatatttatttgaaggtaatctttttatttatttatttatttttactttttatttttatttatttttttttttttgagatggagtttcgttcttcttgcccaggctggagtgcaatggcgcgatctcggctcactgcaacctccgcctcccaagttcaagctattctcctgccttagcctcccgagtagctgggattataggcatgcgccaccacgcccagctaattttgtatttttagtagagacggagtttctccatgttggtcaggctggtctcaaactcctgacctcaggtgatctgcccgccttggcctcccaaagtgctgggattacaggcgtgagccaccactcctggccaaggtaatcttttaaatattaaaaaatctacctgccaattatacgtattcatgaacaaaattaaatatgcctcaaaagctgaattaatactaacaattataacacaagcttagccaatggctattgtgttacctataatgtttcatgtgctttaaacacatgatatcatttaatccacatatagatcctattattcccattttatagatcaagaaactgagaattaaagaaaaaaatttatgcaacagcacacaactagtaagtgggagatgcaatatttgcacccagatccatgtcattccttagccagggttcttaacctgtgtactgtactacctcctgtatggaaaagatttccatataactggcaagaggctacatttaattgctattttcttgaggatttcctaattatctcatcgattttaacttcagtggttaagttcttcctttgtgaataatggaatgtgtaacatttctagattaaacgttcttgtagtctagcagggtcagtggctctcatgcaagagtgtgacattatttgtgtgagagttttttgaggaggagggatgtgggaattctttgcaggtcatggtaatctgaggttacatgaccaagagcatctgagtcagcctgagtctggaaacattcttggaatctgggttccaggcagctggaatcaagtgccatgagaaactttgaagcaaagctgttgggtttcaatgggaggatagaaaagtcacaaaagattatcttagtaatgagatgctttgaaaaatgagcagtattggagggtacagggaacattgaacaaagatacgtatggggaaatagaagactttgtttagagaatgtagagaacattagagtagggaagtgacaaaaaatataaagctaggatcatgttgtgaagccctatatttcaggctaaggagcttttcttgataggcaataggaaacttttgaaggtttataagctggtgttcagagatgactggagttgtcagtagcagtcttgggtgaaagtgaggaaagactagaggccaagatgccatggaggaagccaccatagtgtcccggtaatgagcacatgggctcagaaggatggagacagagagggaggccatgagtgaatgtgcatggcactgcagaggagaaagggaggggaagtaggtatgtcatctaggtacctggaccctgtggttaggcttagccaaagtaaggaaagggtctgagtggaagaatttctgttcagagcgtgtttgtggtgctggcaggctgtatgttgcacacatttggaaatgtggaataagttcagtataaaaatagaaatttttggccaggcacagtggctcatacctgtaatgccagcactttgggaggccaaggcaggtggatcacttgaagtcaggagtttgagaccagtctggccatcatggcagaaccctgtctctactacaaacacaaaaattagctgggtgtggtggtgagtgcttgtaatcccagctactcagaaggctgaggcatgaaaattgcttgaacctgggaggtggaggctgcagtgagccgagattgcatcactgcactccaacctgggtgacagagagactgcctcaaaaaaaaaaaagatggaaattttagaatttccctagatagaggggattttgaagcaacagaagtagatgaaattaccaagaaaaaatatacaagtagaggagatatttacacaagtagaagtagcaggcacggggatggagaagtcagaaaaacaatgcagttattcattttatatatatatatatatatatgagatagggtcttgctctgtcacttaggctggagtgcagtagtgagatcccagcatactgcaaccttgacctcctgggctcaagtgatcctcccctctcagcctcctgagtagctgatactacaggtgcatgccaccacactcagctaatttttaaattttttgtagagatagggtcttactatattgcccaggctgtgtcaacttcctgggctcaagcaatcctcctgcctcagcctcccaaactactgggattataggcatgagccactgcacctagcctgaaattattcattagtgtggaaatccagggtagacatatttatgagggaggcatggtcagtagcgcaaaacattactaagaggtcatggaggctgagtaccaagaatggaccattatacatagaaattaggtcttcgtttggtgactttttttttttttgagatggagtctcgctctgtcaccaggctggagtgcagtggcatgatctcaactcactgcaacctctgcctcccaggttcaagcagttctcctgcctcagccccccgagtagctgggactacaggcgcccgccaccacacccagctaatttttgtatttttagtagagacggggtttcaccatgttggccaggatggtctcgatctcttgacctcatgatctgcccacctcagcctcccaaagtgctgggattacaggcgtgagccaccgcgcccagccgttttgtgactttcaagagtgaagttgtactagaatgctcaagatagaagcctggttgcaaatggtcaaaagagatgtaagcaggtaggaaatcgaagacatgtgctttgcaaaaatacaaccatccaggaatggtgagagaaggacatagtttgtgaggttaacaggattatgtaacattttgggaattttgtttgattttgtttgtaagttatggtaagaccagagaatgtttctttggagtctgagcggagaacagatgaaagttgtaaaataaatgggggataagtgatggacaagaccaagtaagaggttagagagattgggattgaaaatttagttaatttctcccaacctcagcagggagaaaatgacagtcagctcagaattcaatgaaaagcccatctctgtttcagagtgggggaagaaattatggatgattctaatttttctttcagcttagctgtattttccaatttttctagaatgtaaaaattatttgaacattaaattttatttttctgaaagagcacatgagatagctgtctcatttgtccagtagtgctgactgggtgtgacagagttttttacctccctcacagcttcctctggggtcaacccccctgcccctatgcgccatcttcgtcacacctctctgggctgctcagtcctgatctgatagtcatgaaggagagcaagcaacgtttacctttgtagaagttagaaaagtgagacatctttctgctatgtttgaacacagtacagtgttctgtgagtacaatgtacaatgaggaaggcgaggtagatcatgtaaatgctgaaagctccatatgtgcttgatgactgggaagaaagaacaataaaatttaagaggaaaatacttgcctgtgtactgctttaaaagctgtggcctaagtatagcaaagaagtctcttcatatttgctaatactcattaattgcttattaagtatactcacttamgaattcacttttattaagtaccttcagtcttctcatcagttttgcactaagacgcgtacgctactgttcagtatagtgtttatatggatgctaaattggtacagatttctcctttaaaaagcatgaaatagataattaacttccatttttatgaatatttatcacagtagattaacttgaaacatgtagctttttcagtgtgcggcaataaaacggtatagtgattttgtgttttagtttgtaaatgtattacctgtacctagtgttatttgacaagtatctttacaaaattagatattagtcccatgctccttgaatttgtcacctgctcatcaagcaggccaagaatatatttgggtgagaagagatagactatcctaggctaatccttatggtaacaatggtacctggaaaaatgtcggaaaacaatttcccttggttttgtgtttgttgcacaatcaaaatgcagctgatgggatctgttgagttagtgctgactggtggtagcttcttctgggatccttctgccagctcctggactgagcactgtcccatcttycagttgctggaatgtcaccagcacagttagaaccctggtggtgcagggcacagcagcaaggcccacggggaaggaatgcccagcttgggcagagccaagcaagggtgactgtagcaaccttgttaccccaagcttaactgttcctctgtgacccttactggtatcactttgggccacttatctgcctggcacatgtcaaaactacctattaatgtccaagggccagacttgctgcagaatccaaagtttatattgataaggctgccacaaaataaattcagttcttctgtatcagccatgttacattctggctctgattatcaaaggtagaccttaaattgccttccgttccatgccactcttgtcctagctttccaactacaccctcccacactctgtatccagcctccccaccctgccagaaggtagtggtgtttctcattttatgactgtattaatgatagagctaagctggctgtcagtcatgatgcttcactccacatggattagtagtaacataactatgacagaacttagaatttgttgtaattcagtggtattttataaacacagccctggcctaggactgactaaacactaaatactatatctgcatttttctattaagattgcaatggccaggcacagtggcttaaacgtctgtaatcccagcactttgggaggctgaggtgggtggatcacgaagtcaggagatcaaggccatcctgactaacacggtgaaaccccgtctctactaaaaatagaaaaaattagctgggcgtggtggcacatgcctgtagtcccagctacttgggaggctgaggcaggagaatcgcttgaactcgggaggcggaggttgcaatgagccaagatcgcgccactgcactccagcctggtgacagagcaagactccatctcaaaaaaaaaaaaaaaaagattgcactaagtacattttcttctaggctgatttctaaaacattattccaggaagatatatgatttttgttaactttaggaacttttataaaactataatgacttttttggactaaattatatgtcagttttgatcatttgtgttattaatgtttcattatttgctttcaataaaattgtcttactattcattctcccttcaaccataggtatggaacaggatgtttcttactatgtaatacaggccataaggttggttttttaaattaaaaaattgatttaaaagtctaagttcatctaaataatgcttgaacataatttactattaaayaacttttagtctttagcttttacttaatctttatcagggtttaatttagagctcaatacaaaatttgaatcgttctaataagaaccattttagactctttgaattttatatgtgtgtttttaattgtgytggtgggaaatctagactgagacctcatcaaattcttaatgcaaatytaatttgaaacaaggaataaactttttatacagcttaaatgtgttcttaattctgatcgttttgactgtaaggatttattttaaaaattggtttattgattgcattattttgtacctatgttattttaactttaaaaaaaagttctcatgttatcttttcattttccactactgaaatcttttttttttctttcttacagtgtgtattttctgatcatggccttctcaccacagtggcttacaaacttggcagagacaaaccagtatattatgctttggaagtaagttctttttaatcaatatggataatatgacaaacattcaaagctaataaaaattacagtgttttctaacacttttctggtaaatcttaatacagaggactcaaaaagttctgctttcttggcatttgattgagttgaaggaacctgaaactgatctgggtgtcaggactcacaggagaccttgattagattggttcctcagttcttatgccaattaatcatgtcaccttaggcatattacttgagagctctacaatgtaaggttttttttttttttatctctaaagtttaatcggattaacgtgctctctaacatttctttcatcttgaaaattctttgattttataaataaaatgctccagtgttccaaagagaaccctgggcacaaataggcagaacaactctcttcacttgtctcctcataaaaataaattttgtgtaacattttgatatagaaaagaaagtgaggagatttatgccacttatcactggaaacatttgtttcaaacatttttgtatgttatagtaggaatatgccagcctaagcctataggatatggtaagttagtgttagaaatatttatttataaagtcaaagaaataatattctttttgtaaaattagatacatttcttataagcatttctatataattaattttgaaatggctaccttataatgcacaagtatacacttgatctgcagactcattgaggctcattttttggagtgcctgataataatttggtcacaagttaaagacttctagttagagttaaaacattttattagtcattatgcctagcacatgaggaatattagtttatttctatttttctcccttccccaccccataaacactataatatttctccccagctccttttctatggatggaagcatttgtgaaaacttagtctgtatattaaatgtatcttaacacttctcagaacttaaaatcctacaagccctctccctctctactttccctctgtggagagtgcatagcacaacactaggcacatagaatatgcacttgataagtgttacctataatataataagaatatgattctgctttttttcttcttgcatgggaaacaatcagtgctttagaatacaggtgccttagacctgggacaggcctcagggacaggggtcactcggtcttaactcccctcccaatgtgaaaaaccttctcctgtctcctttaccagtagccatccaacttctatctgaagacagcacccaaagttgcttcttaataacacctctagcattggacctgcattggttgtcaaaagtgttccaacattagaggctgcggtcagtttctctgggtcttcctcctccagggtaaactgacccaatgccttgatctcacatggtttctggatgctttatagttctgagctcccttcattgggtgcattgcaattcatgtcgtccagaatggaatataacattctacatctaatctgacctgtactcaatcaataggatgatttgtgcctctcctaccataagcactacttttgctcctctagcctgagagttcattaatttagactaatatttattaaattaatatttattaattaaaataattaatattaatttagacttcatattattggccctgggagcatatgctaaaaaacctagctcgttttcaaatgaatcattgtcaaaccaagtctgctctgttctgtatttgtgtagtttttttgttaaatctaaattcaggtctttgtttcttcctgtttaatttcataatagtgattttagcctattcctatatagtctgaattcgttttcactctttactgttactctttcagttttgtctcatctagagatttaacaagtatatgctttatgattttgtttcaatttatgtaatgcttttagatgcttagaattgtaaaagctcagagagacgctagatcatatgacaatataccctcctatccccttgttttacacgtgaggaaaccgagattagaaaagtgaaattggagtcccttggccaagtaacttttgacaacagtaagtagcagatccagatgcttggacatcaaagccttgatgcctaggccaccctgctgtaccatttccttccttgtaagtctgaaagttctgggctccagtctcccaagtccagtgttgttgtcactgcatctagcttatgtcccttccttcatctgctaacctagcggtctcagcaacaacaacaacacacatacgcatactaatatgttaacggtgtagttagaatttttttctttgttttcttaatttttttttacaattaacaaacatttaaaaaaaattaaattaaaccaaaccaaaaaacaagggtggggaataatgctagactggtaaaactttttatcagtaaacacatgctaatttcacttggtcatactaattcctttttttgtaaatgcttacaaagtatatatttaataatattgtctttcatttgatcaattgttgttaggcttagaagttggagataggaaaattttagtctttatgctctttaaaacctaaaactatagctacccatcttcagtcttttagtctttttccattcttcctctgctgatttgggaacaataagatacatttctatgtttttattttggtgattttttttcttttgcgtataccctcagatttttaagatattgtttaaccatatatttttctaagagtgtatgtcattttttggtatttttaatctcccgaccatgataaggaactctaatattttattctaccgcctccatcaccaattgtgttattttgtttaaagctttcatttcccccattttgttcaacatgtaataattactgttgttttctttgcagtccacagtaaatcatatttattgacttatttttcttagtttgtgtccagtatcatttctttggtctcacaccttttttattcccacctacttttttcctttttttcttcttctttttttttttgctgaggggcatccttctatagttcttttagttttagtgtgggatagtaagcctattctttttaggtttgtctttgttttgccctcactctgaggatgagtataaaagcctatattaacaattgtttttcccacatcccttctggccattttcgatgttgatgagacctctgctgtcaatatgtggttcatttgtagataatctggtttattgtctgggagtttctaacattatctctttatcattgatgttctgtagttttactatgatatgcctgtgtttggatttatttttatttatcctgttaggtacttggatccaagtctgtcttcagatctggaaagttctcagcaattatctcttcaaatattgctcctctaccattacctccatcctcttctggaattgctattggatgaatattggaacctttcaacccatcatccatgtctcttaactgcccttttatatttttttaatctctttgtttctctgtgctgcgtccctggtgagtttctcagtatctaccttccatttccaaatcctctctttaaaacaaacaagacaaatcataaaagccttttttgtattgtgaaatataagacacatagagaaaaatgcattaaatatcaatgtacaacttgaaaaattattataaaggctcatgtaacttgttcatagaacgccgccaatcccaagaacctctatttgccccacgatcacaacttcctccctctccctgagataaacatcagcctgacttttatcataatcacttccttacttttctttgtagttctaacacttaaatgtgcagccctgaacaccagagtttagttttgcatgtgtttaatatttgatatattaaaaatataaaagaaaagagagagagagcatgtgcatgcatatctgagtcacttagtatgtatttttttgtattttttgatctggcttctttcactcaacattatgtttgtgagattcatccacagtattatacatagctgtttttttcattgcttcttattgctatatgaaattattgaagtttagtatttattcagctgttgatgacattcgagttgttttcagtatttggctattatgaaaaatgctgctatgaacatttttgtatatgcctcctgatgtaaatgtattcacctttctgtaggagtagaatttctaggccatagattatgtgtatcttcactttgagtagatagtgcaaaccatttttcacagtagatgtgtcaagttacactcctaccagcaatatgggggaatgctagtttactcatcctctctatctagtctagagtttaccccatctagtacatttttcatcttatttaatattttcatttctatagtttttatttggttatttttcacatccacctgattttgtttcagttctcttttttttttattcttagtttcatgtttgtttgtttttaaaatggaagtcatttcctaatttatctccgaatacttaaaacatatgtattttaaaatctgtgttaggccggaatgaactctagtccagctattaagtttgttggatttcttttttcttttctttttttttttttttttttttttttgagatggagtctcgctctgtcgcccaggctggaattcagtggcctgatctcggctcactgcaagctctgtctcccaggttcacgccattctcctgcctcagcctcccgagtagctgggactacagatgcccaccaccatgcccggctaattttttgtatttttagtaaagactggaaataacgaagtttcaccgtgttagccaggatggtctcgatctcctgacctggtgatccgcccgcctcggcctcccaaagtgctggaattacaggcgtgagccaccgcgcccggccttgttggatttcttaatacaagatttcttcgtatagtttagaattgtcacttccagccttgtcttccattaagccatatagcctcagtcagcaaatacacagttgcttgtttttctagcatccctacacaagtaagagagcgccacctagcycctggcttcaagcattgagcctgattctattccctgtcttgcgcaaaacattttggacccctttcttctggaggaaccagttcccagccaccactcctactccctgacacatatagaaaaataaatcagaagccatcatgcttgtggcttcagtcctgtttggttatgtgtttccgtgtctgtccacatagatgttattctgtatttgagtcagcatgttgtttcagttttctcttttatatcgtgtctgttatcctctgtggttagaacaaaggggatttttgaagtacaaactcattatttctgctcatgtaagcatctgcatcttctttttcatcaccaagagaactctttttctctccctgaagcccctggcaggtgatagtaaggcctgacattttaatacctctaaattctcattttcattatttgtaaaaagaaataggtgttcatgatccttaagttgttctgtgacattaaactcatattaaactggttaaatttgtcccaccctttctagttggaaaatatttctcagtagtggaagagactggagcaaaatagagccattgagtggttctgccttccctctggcatccttgttcctcttctttttccaaatactgtttcacaaaacaaaaatccttttgggaacttttaatatgagtatgaacctgagcttacttatgacttgagacttccatgttccgtgttttgtcactagaatatagatttcctgaggccagggtacttgtctatcttgtttaccactctgtcccagcaggctggcagataatacatacccattaaatattgttcaaataccgaatcctatgttaggccatttttttctttttaaatatgagcttcaaagagggttccctatattgcctccctggtttctttaaatatctcttcccctatcttttctttgttatggtttaacgattatagcgttaagatttcctttttagagtttttcatccttcttgagctaaatccctattttaggtataaacctatgtaatagattatctattgctgtgtaacaagattaccacaaacttaagtggcttaaaacaacacatttattgtttctcagttcccatgggttcagaatccaggcacagcttagctgggtaccctgctcagagtctcacagggctgcagtcaagatgttgactgaggctctgctgtcatctgaggtttaatctgcttccaggttcattcaggttattggcaaaattcagttccttgtggttgtggaactgaggacttcagtttcttgctacctgtcagatggaggccaccctcagctcctagggctacctgcagttccctgctatctgagggacccccagtggttctctgcttccttaaagtcaggaagggagggaatatctccagcaagacaggcacagtaaatcatgtaatggaagcacgtacacatcaccacacatatcccatcacttttgacatgtactgttgggtagaagaaagtcacagatatcaccacgctcaagaggcgaggattatgcaagggtatgcacatcaggaggcagggatcatgggagccaccttaattaaaagtctatctgccacaagcatataaacattgtttatgaacttttataatgttctttcttgaaaagtatactttctgagcaataaatgcttttaattttagttccccaacttgttactgaagtattaatgaaatctgttacatttcaaaaataatgttgctccaattcaactcttccctttctctatgcaattaaaaatgctatagagttagacactgcatttgtaatctaatatatacaaattaactacattataaatcatatacgtacagatacatagcactgtagtatacacaaaactgtgtttgctatgcctgatgaatgattgtaagcaatttagggtaatctttactttacctgatttttctccatactcaccaattttcaccctaattgccttgtaagctacaattctactgcatcctgaaatatcctgctttatttttatactgtttgtggcagtggcattcatgtcaaggagcttttgaagaaaaatgtatttgcctgctatgacattacatcagatctacttgattatttttaattcaatcttcctatagcctgtttattagcctttcactttccaggctacatgtctagttttaaaataatttattcctcttgccctgttataatttaatttattattctttacaccctctcactttcattgcatctcccttagtgtacaactattaagcttgcatgcatcttttccagggaatcataacctagaacaagggctgattcaaatttgtagatgatatactaaagtattggatctttatacttagggtgtaatttatggtaacttaactgataacaagtagacagtcaccttcttttatcattttaggttttggctgctatactcttttcctgtccagctttgaaacattattaccatcttccattttatttcctgcctctgaattcagaagaccacatgtcttttgtgaattagagatgtctctcatttttatttctttaaaagctaaatcataccatgtattatatcctgacagcaaaattatttacttttttcagataagtgtttttatctaccttttattgtgttatattgaatctagtttttcaatcacaacaaaacacttctgtgtattcctgatgacagaatttaaaacagttatctcctggagccttaacagtgactatgtattttttttcttttgttttaatctaaataatactctgattctcaactaattacctctaatcaaaaccttgattttccttttgctaaaatcatattgctttctcttaaaaatatggtgtaagcatgtaacatcctatctttttcaatggaaatgaggtatatcagcacgtggtttcctagagtataaagtcccaccagctgtgccacaaaatcactttactagactcctagcacagtggcttctaaaaattcgcagtttaactgtacttgcctaaaacaattatgtatgcatttcttggttagatgctatttaaggacagtgtctttgagagtataaggaggagggacacctgtttttgtttttctttttcaattaggtctagaattatactgcccatggcagccatggccacatgcagctattgagcactggaaatgtggctagtctgaattgagatgtgctgtaagtgtaaagtatataccagatttcaaagatagtacaaaaaaaaatctcaataatttaatattgatttcatgttgaaattttttttaatacattgggttaaataaaatattaattttaccttccttttacctttttaatgtggcaaaaatataaattacatatgtgactcactttatatttctgttggacagcactggtctagaaactcttacatatttactagtatttggcagctgctatctctgaattgtctgtttccaaaggaaatttgaatcttaaatctctttaaaccaaaattttacttagttctcttgaatgatcccactaagtacctaaatatgtaaatgtgtcaaacttaatacaacaacttattttaggcagggaatgagctgtgttagagtcccttgtaaggtatttsttgaattgtttttgtcccatttttaaagccttgtcatatttgcacagctatgccagatctgttcctcaaatacttcctgtggttaaaaagccattttatatatgtaatgatacagagtactgtatgtatgtctacatatataaaaatgtataaacagaacaattgtggcattctgtagctttgcagtaacatagtaacttctcatagaagctatgaatgatggaatataccagcatattcattctctagtttacttacattttgacaactgacaacaagaaggcatgaccatttgtaattcagttaatagaactgaggacaggtccctacatttaatattacctgacgtttggtttggagtgactctgtggaagtaatttacattaataatctatatgaatgaactatcagagctaaaaaaaatttcttggtattcctaatggttcgtgctgatacttctttttttttttgccttcaggatctttttataatagctttattgagatatagttcatattccacacaatttacccttttcaaatatacagttcaatggtttatagtaatactatatttacagatttttacaaccatcaccacaatctaactttagaacattgtcaccaccccaaaaagaaaccccataaccaccccctatcccccagcccaggcaaccactaatctactttctgtctctatggatttgtctgttctggacatttcatatgaatgggatcgtacaatatatcgtcttctgtgcctggcttctttcactttgcataatgttttcaatgctcatccatgttgtagcatgtattaagacatcattccttttcatagtccaataatactccattgtgtagacatactgcgttttatctattcatcagtcagtgatatttggctgatacttttttaacattaaagaaattaatgaagtcaatatttacatttagtaagaaccttcacatatattctcatattgagcctcacagtaatttgtttaggtaagtgttgtcatagtcatcattttataggtgaagaaatggaggctcagaaagcctaagtaacttaggcaagttacttagatgaacttgctaagattaacttactaagttacttagattagttactaagattacacagcaattaagtactagaactgggactcaaagccagtttatccaactctgaaatatgtttttattgttattgccacagctctaggtgattttgttttaaagaaaaattacttactagctagcttctttgctttttgttttcttgatttactatactgttagatatgggaaacagacttgaaaaaacttttaatgtggcctctcccaataattttatgaacaatatggcaatatatttctaagtgataacatacctcagtagcttagcaacagacagaaaattgttcaagaagcaaactgatcaaagatcaatgtccacctatggggacaaatccaagggtgtgctggaaagctcacttcttttcctcatcccgtgaaaaacttttattagtgacttagataaaactatgtttgtattagaagacctagtttacatatttgtcggagtctcaaaatggaaactgaattctgtccatctgattgtgtcatacacagaatatgctcaataaaaaccttggatagtgataaaatatattctgtcttgaattcctttttttctttagggttctgtagctatagctggtgctgttattcgctggctaagagacaatcttggaattataaagacctcagaagaaattggtgagtgtgttctaacaaaagkttagaaaatctgaaaaatgacacatttcagtattttatctctgcaaagtaaatacttatgctttgccccaaatgtgatccataaattatatggatccctattatgagtttgacttatgcaaaagactatcttgtgaagatttataaaacaaggaattgacataattagtggtggttgttaataaactggcaatgtagggcataaaaattacccaagtgtaaaattgaacactggagattgccagaacctgcagatagagaagttgagttaaatttatctgatgagaaagagctttaactcttagattagagtgagcattaaaactctggtacctataatttaagtattaatacggctgttttcagtctatagataattagtttgaacttacctactcactctttcatccacttgcttaactttgcctgaaggtgagacaatcagaaatacattyctgattagggacacactagaggccactttttcatctcctagtcagcaaccttaaaaatagtggaaatgagctaaaataccttaaataaatgaatctggttccttgatttcttgagctaggctacattttagtrgggggtatttaatgtgagagaaactcatttctgttgatcctagcatactactgtagttrgcaacattttgctctaccaatgaattggaaaccaaaacccctgtcctaatttttctaatttttaaaataggtatgcttatataataatacacaatatttgtgtgatttttgttttgttttgtttttaatgttagaaaaacttgctaaagaagtaggtacttcttatggctgctacttcgtcccagcattttcggggttatatgcaccttattgggagcccagcgcaagagggtaagtattgaaaatatggagtgcttttggggatcttgatttatttaccaaagtcgttaataacttattagtttcttatctattttcaaataattataatgtgttgagaaaaccttttctttttggagaatataatttcagaaactttaagctccaagaagttatgaatcagctgacaataacccctgccatatccgtattcatgttatcttttatcttcatgatgtctgtaagttgtatagtgaagggacatcatcataatgaatactgattcagttttatgatgccatcatcttttcaaatgtgtcatgaattttttcatacatgaatgcagaattgtgaaatataaggactttctgagttacttaatgattatgtccaattttctcttcctggacatttytgtctaccaaatttgaccttttcatatttgagatatttcaaattgattggtttatatcattctaatctgaaaatctttgtgcgtatttttaggataatctgtggactcactcagttcaccaataaatgccatattgcttttgctgcattagaagctgtttgtttccaaactcgagaggtaacaaatatgggcctgttttcttgtacttagttcacttttatcactcttaagttatatgttaacacccgagatttattcagtactgaaaatgtagttaatcaaatattaaggctgcctaaatactaatctaaatataagcagggttttccccctttttccagctgtcattaccttctaagttcctgttccctgtcaggcactgggaattttatggttgtggggaggctgagtggcacacattaggcaaaggaaacagcacaaacataggcatcaaggcagaaaaacagggtgcaaaatagagttgtatagcttagctgaatatcaaggtgaatgcagaggtgtagtgagagaaaaggttggctgtgaccagatcaaagagggcttagaagaccagaataagaagtctcaatttattccataggctcttggaagctcttgagagtttctgagtggaggattgccattttcagagatgttactatgaaatagatttataacattaattgcactggtttatttaagattttggatgccatgaatcgagactgtggaattccactcagtcatttgcaggtagatggaggaatgaccagcaacaaaattcttatgcagctacaagcagacattctgtatataccagtaggttagtaagtcttcattccyttaaactcccagagtaatgtttcttgtggaataactagttctttgggcatatgtaaccacaaagatattgatggaactctctctcctcagtgaagccctcaatgcccgaaaccactgcactgggtgcggctatggcggcaggggctgcagaaggagtcggcgtatggagtctcgaacccgaggatttgtctgccgtcacgatggagcggtttgaacctcagattaatgcggagggtacatttaaagaatgaaatgttcagtgatatactgtgaaaacgaccttagtgcacgggagttttgtttttctgtttagttaaaagttaaggaaccaagtaaaatagtaaatgttatcattgcagattcggctgccaagcatattgggctttactgaataaatgtgaatgagagaaatcgttgcttatcaaaagaacttctaaaatcactttttaaaaatcatttgcttttactgtttatggtcctttagtgtaggataataatactgccacactgtcaggtatagctagttagaatagcctttttttttttttgagacggagtctcactttgttgcccaggctggagtgcagtggcacaatctcggctcactgcaagctccgcctcccgggttcatgccattctcccgcctcagcctcccgagtagctgggacaacaggtgcccaccactacgcccgcctaatttttttttttttttttttgtatttttagtagagacagcatttcaccgcgttagccaggatggtctcgatctcctgacttcgtgatccgcccgccttggcttcccaaagtgctgggattacaggcgtgagccaccgcgcccggccatagccttttttaaagtgagaaggaagatatatcagccactcatccctaatgtctacaccagatcatctttggtgccagtggcccagttttaggacataattagctgggttaagagacactctggtaacttttaagcacagcaggactaacctgatgaaggcagcaacaatttaagtaagtgaacattagatatctgattcactgtgctaactaagctaagccacaagctgtgatcagcacttttactaaaatgtagtgatgcggttcttaaatttaaataaatgtagaaaaataaggttttatatattagaattggttttataactttttagaaacctatgcataaaatagcatcagctgggaatggtaatttgtgcctatagccccagctacccaggaggatctcttggcttgggcccaggagttcgagtccagcctaggcaacataatgagacccctgtctctaaaaaaacaaaaggaaaaaaaaagcatcaaagtggattttgaggtattgggaataagctttcaaatgcatttttgtttggttttctgggagaatataccagtgtttctcaattttattcattcttttaacatataagaaaatgaattataatactagtaattttatagtcagattataccatgtaccttgatttagaaatgtatttcaccatctgatattctgtcatttttaacttttgcaatactggataaaatatgaagttcaaaaaatttttctacttttcaaaaaaaatcaactttataatatgcaaataatgtccagagcgggtatatggcctctaaatgccaatctcactcttaaagcaaggaagttctgtgccaagagagccatctccattcttaggggagccatctttgctggtgttgaaggccttagcctggggttgatcagtcatgccctattgtcctccctctcaccagccctcactcctccccataaacgaatgggcacctaggcatagatagtacattttgccagcaaacagttgtttatagccaaccacaggccagagactgtactgatgtggggatatagagatgaataaggccttatcttcttatcttcttttgcccttcagaagattagagtatattgggagcagaagacaaaaccataaaaatttggtagctgacatcctggggtgtgtgtgaagagagagggggggatagaaatggggcactggaaagctttctgaagtgagtgattcttgagccttctctcctgggtgttgcaggcctcaggtgctatggaaagtctgggaggcttgagagaaaggtagccccacatggggttcagcacccttagaagtgtacaacatcaagctcatttttgtttagactttctattgtggatttccacctttaaaaaatcttgctttaagatgctggggttggggggcatggggctgtctcagaggaatgcaattcaaatcttatgagaaatcagtatttgttaaatcctgtgactgaaataaaaacgtctcctgcggggcgtggtggctcacgcctgtaatcccagcactttgggaagccgaggcgggcggatcacgaggtcaggagatcaagaccatcctggctagcacggtgaaaccccatctctactagaaatacaaaaaattagctgggcgtggtggtgggcgcctgtagtcccagctaccggggaggctgaggcaggagaatggcgtgaacccgggaggcagagcttgcagtgagccgagatggcaccactgcactccagcctgggcgannnnnnnnnnnnnnnnnnnnnnnnnnnnnnnnnnnnnnnnnnnnnnnnnnnnnnnnnnnnnnnnnnnnnnnnnnnnnnnnnnnnnnnnnnnnnnnnnnnnnnnnnnnnnnnnnnnnnnnnnnnnnnnnnnnnnnnnnnnnnnnnnnnnnnnnnnnnnnnnnnnnnnnnnnnnnnnnnnnnnnnnnnnnnnnnnnnnnnnnnnnnnnnnnnnnnnnnnnnnnnnnnnnnnnnnnnnnnnnnnnnnnnnnnnnnnnnnnnnnnnnnnnnnnnnnnnnnnnnnnnnnnnnnnnnnnnnnnnnnnnnnnnnnnnnnnnnnnnnnnnnntgcatagcaggcagtctgtctgccaatctccctttaccctgctgaatttcccctatcctgtttttgtttgtttgtttgtttgtttgtttttgggaccgagtcttgctctgtcacccaggctagagtgcagtggtgtgatcttggctcactgcaacctccacctcccaggctcaaatgatcctcctgcttcagcctcccaggtagctggtactacaggcagggttttaccacattgctcaagctggtctcaaactcctgaggtcaagccatcctccctcctcaccctcccaaaatgctgggattacaggcatgagccactacacccagcctccctgtgtcctgtttcactccaacttccaagcaagcatgtcttccagtcactggcagtcatcagcaaccatgtgctttcaaatctgagtcctgctaaagccctactgcagtttaatgtgtgcaataatttgtcaagaatgttgagtgatcataagtatggtactaagaacatctcagcaaactacctttcgttatgtgttttttctaccttctaattctagaaagtgaaattcgttattctacatggaagaaagctgtgatgaagtcaatgggttgggttacaactcaatctccagaaagtggtaaaaatgtttttgtttattattgtcacattttcttagtatattaaatagttatttaagtatctaggcatttacacatagccaggctgctctgaagaaaagcattatcatatgtccagagattctgacattttgaaaacactttaaagttctaaacacaaaatgtaaattatcaggttgatatacatactttaactttatcctgccatatctttccttattagtttattcttggtacttcaattgacaacttagtcttccaagagtaaaattatttctagtttcttcttaatgaaaaaaaaaaatcaactagagtcttcatttttttcccctctcctcttactttacctttttggggggctgtctttatgacctgaaccaactgaaagctgtattaatttcagaatatattctgctacttcctaggctgattccaagtacataatgggaattcctttggaatcagagaaagaaatataccaaacatagtaaattcgaactcttataaatagattgggaagtgctcttagcagaaaaaatagtggactattctacctttcagtcacttaggaaggtcaagagcttaagtaaaccatttagatttaaacagccttaagatgcatagtattattattttttgctaaatgcaagatgtggagcataatgaatggaacaatggcagataatttattgaagcatatacttttttttttttttgagacagagtctcgctccgtcacccaggctagagtgcagtggcacaatcttggcccactgcaacctccgcctcctgggtttaaatgattttcgtgcctcagcctcccaagtagctgggattacaggcgcccaccaccatgcccagctaatttttttgtatttttaggagagacggggtttcaccatgttggccaggctggtctggaactcctgacctcaagtgatccgcccgccttggcttcccaaagtgccaggattacaggtgtgagccactgcacctggcttgagcatatactttaatggggaagagttgacaaatgaaataatacctgccttccaaccccaaagttaatgtatctgttttttaggagaagcttccagaactatctactgccacagataactgtggtctgtattttcagtcccggatgttcctatttgaagcttttgtttttctcctaaataagcttaatatcttttgttgtgagactcagcttcattttccaagatggtggcaacgtttttcttgctaagactgtaattttgagagaccctttacaactaaacttctcaatcataagtacttttctagcacagtgctagttgctgtgtgagatataacagacgtaagccttgacttcttttctagttgcccttaattattgcttataggaaattgagttacattatttctttaactagctggatgttttaaaatggcactttaaatggcatgtttaaaatgacattttgttttgttttttgttttttgagatggagtctcactctgttgcccaggctggagtgcagtggtgggatctgtgctcactgcaacctctgccctccgagttcaagcgattctcctgcctcagcctcctgagtagctgggattacaggtgcctgccaccgtgcccggctaatttttttgtatttttagtagagacgggggtttcaccatcttggccaggctggtcttgaactcctgacctcatgatccacccgcctcagcctcccaaagtgctgggattacagacatgagccaccgcgcctggccttaaaatggcattttaatcctcctgtctccctccctccaaccccatgccttacacacagatacacagttctcctcactagcggttgaggatgtaattttaactgcaaaattcccacaaaatcaactgatcatttttcccttgtttgtgtactttactatcaatgaatttaaaatactaagaaaaagttnnnnnnnnnnnnnnnnnnnnnnnnnnnnnnnnnnnnnnnnnnnnnnnnnnnnnnnnnnnnnnnnnnnnnnnnnnnnnnnnnnnnnnnnnnnnnnnnnnnnnnnnnnnnnnnnnnnnnnnnnnnnnnnnnnnnnnnnnnnnnnnnnnnnnnnnnnnnnnnnnnnnnnnnnnnnnnnnnnnnnnnnnnnnnnnnnnnnnnnnnnnnnnnnnnnnnnnnnnnnnnnnnnnnnnnnnnnnnnnnnnnnnnnnnnnnnnnnnnnnnnnnnnnnnnnnnnnnnnnnnnnnnnnnnnnnnnnnnnnnnnnnnnnnnnnnnnnnnnnnnnnnnnnnnnnnnnnnnnnnnnnnnnnnnnnnnnnnnnnnnnnnnnnnnnnnnnnnnnnnnnnnnnnnnnnnnnnnnnnnnnnnnnnnnnnnnnnnnnnnnnnnnnnnnnnnnnnnnnnnnnnnnnnnnnnnnnnnnnnnnnnnnnnnnnnnnnnnnnnnnnnnnnnnnnnnnnnnnnnnnnnnnnnnnnnnnnnnnnnnnnnnnnnnnnnnnnnnnnnnnnnnnnnnnnnnnnnnnnnnnnnnnnnnnnnnnnnnnnnnnnnnnttttttttttttttttgaaaggagtttcgctcttgttgcccaggctgggagtgcaatggcacgatctctgctcaccgcaacctccacctcccgggttcaagcaattctcctgcctcagcctcccgagtagctgggattacaggcatgcgccaccatgcccggctaattttgtatttttagtagagatggggtttctccgtgttggtcaggctggtctcgaactcccaacctcaggtgatccgcccacctcagcctcccaaagtgctgggattacaggcgtgagccactgcacccggcctgaaaatgttttttgaatagatttatgaaaaacactctaatatttaatattttgggggtctctaagctgtataataagcttggaatagtaataaaatgctagttgtattcctttaagcaatctaagctatataactatataagttatatgataatagcaatatagatagaatcctattttgataaacttgagaggatattagaattgctacctgtatcttaacctatgggaagaatatcaggcttgcttaagtttcaaagcaatttgccaattttgaagcaatcataattattttcttgtttgtgactatatttgaatgctttgtaaacaatttttaacatacttttcatatgtgtttaaaatgtattgtcaggtgcattttgttacgcaccaaattctattaaaaaaataaaactgaactaatattttagcaaacatagggttttaaattcatcttaggacactaatataactcttctctcatggccaaaagagaactataatttgaacttaggtggaattaaatagatcatttaatatatttgggggaagaatcaagaaagctaaaattaacagcctcccaaaaagttatccataggctcactctggctttgccagtggaaggctaatgttagtctatatgtattatgttcttggctgtgtggcatgctatctgtattgtttgttaactgtcataaaccttcaatattgattatatttttgatttgaagtaataactctttgctagcttttatgaatatactatttttatagcttattttgttttgctatcttgtgattcttaacacaaatattgtaattatgtgtctctcttttggtttgcttgactggaattctcttctgcttggatgaccacaggtgaccctagtatcttctgtagtctgcccttgggcttttttatagtgagtagcatggtaatgttaatcggagcaaggtacatctcaggttagttactctttaaattagacaactctattagttagctttaatgttttcgtgtataacttagcagaaatttttcagtgtttttcattctttctgtgtctaggaagctggaaaatcaataaaaggtctaattagttagaccaattaatctttgggggcagttagaagtaagaactgtgactctgcttaccctttttaaatttttaatgtgatgacttctttaagagggactacattctgctgtcagctgcagcaataagcaaaagtgaaaatactaatatttaaatgaaaggactttcagactgactgctgaaagttaaagtatacttttgacattaattaaattgtctttcaaatgtatataaattatttttcataatcctgaaaatttgctaagcaagtcttaacttttcaattctggcaagtttcagccagagcatgtccacagagttcctgtaaaaccctaaaaccagggaagatttatagttactcttattttagttaaaagaatatcttttatgaactgaagttttaaaaatgattccttaaatgaaggggttgaaatgaaaacagaattatttttccacattaatttatactgaataatctttttttaataaaagtaaaatggctcagcatgttatggaatatattgcataatcttattaatttataatagccatttgtggaagctgctcctggtgatagctcaatttttcttaaaattactggcttaaatggaaatgatgcttcttattctgtatgttcccatgaaagtgaaacttaaaaaaaaaattcatgattagggtttcatgaaaaggccttgtttctatgaaaattgagacaggttgcatctctctaagctaaaagatgggctatgtgtctagagtcttagacttctaaaatgcatgtggtcactatatgtaggttatctcttcggtgacatacactgcaatttgagagggctggaaattgtttgccttggtaaacgattagcaacagtggcaatatttgttaattttggaattggccctgtttgttgcattttaattgtgaggcatgatttagaaatcatatggactttctagcttaataaatgattgaatcatctgcattgctttaactcctgaattgtatgcatgtattattgacatatatggtttttgttccccatttcaggtattccataaaacctaccaactcatggattcccaagatgtgagctttttacataatgaaagaacccagcaattctgtctcttaatgcaatgacactattcatagactttgattttatttataagccacttgctgcatgaccctccaagtagacctgtggcttaaaataaagaaaatgcagcaaaaagaatgctatagaaatatttggtggttttttttttttttaaacatccacagttaaggttgggccagctacctttggggctgaccccctccattgccataacatcctgctccattccctctaagatgtaggaagaattcggatccttaccattggaatcttccatcgaacatactcaaacactwttggaccaggatttgagtctctgcatgacatatacttgattaaaaggttattactaacctgttaaaaatcagcagctctttgcttttaacagacaccctaaaagtcttcttttctacatagttgaagacagcaacatcttcactgaatgtttgaatagaaacctctactaaattattaaaatagacatttagtgttctcacagcttggatatttttctgaaaagttatttgccaaaactgaaatccttcagatgttttccatggtcccactaattataatgactttctgtctggatcttataggaaaggatactttcttttttcttccatctttcctttttatattttttactttgtatgtataacatacatgcctatatattttatacactgagggtagcccatttataaattaagagcacattatattcagaaggttctaacagggctggtcttaagtgaaccactgtgtatataaatatgttggaaaacagctgtatacatttttgggcaacggttatgcataatatttaccaggagaatttttttcttaacaagccaacatttaaaatttatgttttatgtcaataaaagaaaatatactttattgtgacttcaactatatttcttatcccttacatttttatttaattgtcttagcttaaaaaaagaagaaactgtggaatactacagtaaatattgttttcaaacacaagcaataattcaaatagttatttttcttttgaattaattttagacatattttggatcctattgaggggataagaggatgtcaaaaaagttaaatacctaagtagaaaaaaatatagaaataaagccaagaatctctttcagttcaaatgttatcaattgttaataagaaattgctatctgggatgacagaattacctctgcttagtatctcattataactgaaagaaggtttatcattacaaataccttccaatgaaaccaagaatttctcaaaatatttaatgtcacatattataagaagttacctaatcctgcttcttaacatcaatttttaaaaatatcttaaaattactttgttttgtagtaaacagtgaagaaaagattgcctcctaattatttttttcaatgagtgctgaatgggaaaacatttatatcttactataaaaggttctgttttgtttggaatcaatggtagctttattgactgttctgattgtgctgtttctaatttattgaatctgctaggttttattgatgcagccaccacttaagtgacataaatattatagaaaggtactgtgaaatgatcactttgtggcaggggtacttttaaacataaatgtttctacaaaagtaggttgagttcattgtaaataattgtgaaagccactgttcaaataattttaagattacattaatttttctataaattggaagatttataaatgtttgaaattgtacacattgatatttaatgacaaatttacttaaaataaattgaccccttgttcttacttgcatttctcatttacagactagaacttagttgaaagttaaattaagaaagatgtttcagaggccgggcacggtggctgacgcctgtaatcccagcactttgggaggccgaggtgggcagatcacctgaggtcaggagttcgggactagcctaaccgacatggagaaaccctatctctactaaaaaaaaaaaaagatgtttcaggacatgtgaaacttggctgttagcgcttgatagggcacactctgaagagttaaccaacagccaaagaagtaatttctgtaatgatgaacactttaatcattctattagaagaaactacactgtcccatctcagcatttgcaaaaaataatgttggtaaggtcagcagccattatcaacagggccttgcatggctaactttgaccaccatttttctctcaacctgataggcaacacctcaatcctttgttctccaactaatcagtaaaataagtaatgcatctctgcttctgtaatgatatcttagaatttttagtatgtttcttttgaagtgcccaaagcccaattctttgggatatcttttgggtatctggtatcatgtgggagtgaagaaagaaagtttttggagaaaccaacaaatgaaagctgtgatagcacagaagctaatggcattgacagtggagtaggtagtatttaatctgtagtgtttacaacatagtagatagaagtacaaaaatttttttaactataactctttaatagcttgttttatctagtaatatttaaataatgaagtttccttgatcctttgcttttgcaacctaacaactttaataataagttcacacaataaacaaattagtagaaaactgagtgaatttgtaaatcaatctgatttctactttgtgtatactttataggtacatatcttaattctggccttataattaaatataacctgtgccaaatatcgtagacaaaaaaaactctcacaggtatttcctgagatttccctgtcatcaaatttaatgaaaatgacccattaaattaaatttgaggaccataaagataaatattctgagaaggagaagttaggttaaaaacaagtttctcaactaggccaatacctttaattgccagttttcattctatttcaaataactagttctacctgacagcataacagttgagaggatgacaatattttattttaaaaagcagcttcagcctctttcaattttcctgtttagtattaaaatttagtttcttttattccttattattgaacttgataatatctatctcataggtttcttattattgtatgactagtttacaagtggatttcataaatatgaaatcatttaagtaatcaccacaatatccaacaaagagaaacttgttaaataaattctggtacagccatacaatgaaaatgtgtagctttagaaaagaatgaggacactgtctagaaagatatggtatttgggataagtgaaaaagcaaggtgcggagtagcatgtaagtgtgctacccttctattagagagagagacagaaactagaatgtttgcctatgctggaaggacagaaaagctgttaatagtgcttatccactgggacagaaagggttgataattaggcatttgggagaaaggggtgggaaaaaatttcactatacatatgtgtgtgtgtgtgtgtatgtatatgtgtgtgtgtatgtgtgtatatgtgtgtgtgtgtatatatatatatatatatatatatatttttttttttttttttttttgaaatggagtcccattcttgcccaggctggagtgcagtagcgtgatctgggctcactgcaacctccacctcccaggttcaagcaattctcctgcctcagcctcccgagtagctgagactacaggtgtacgccaccacacccagctaatttttgtatttttagtagagacgggggtctcaccatgttggccaggtgggtcttgaactcctgaccttgtgatccgcctcccgtcccccccccttgtccttccaaagtgctgagatgacaggcgtgagctgccgtgcccagtctgtccacttcatttctttgataaaactgcttggaaatgagaatattactcctcttataaaaatgggaaaaagaaagagattagaaagaagaaagtcacccatagtcctaaaatgatccctgtggttattttgatttttccccagactttaagggaatatttcatagaacttgagtgttcataaactatataaaaatttcaacatgcaaactagtcagggctgtcatgtatgtagacacaagtgaactgaaagtataaaataggcatagagatgataaataccaagtttagtggtggttacctctgaaagaggaggatggggtcagggaaagggactttgctgaaacctggaaagttgtgtttctaaaaaaattaagagttaaaacaaatgtagcaataccttaagatttggcactgcttagcggtgggtacacatgtctttattctatcctctacatttctgtatgctccatatatttcataataaaaatataaggtgtgttgctcctgattgtgtgtatctgaattcgttagtcactgtctgtctatcagtgtagttttgttagtactgacagccttcccaattaaaagggttgaaattttattgatcttctggcagaattatttcaagcacctcctacaaagcatcaatatacagaagaaataatgtgtgtattagaaattacatcctggccaggcgcagtggctcacgcctgtaaccccagcactttgggaggctaaggtgggcggatcacttgagatcaggagtttgaaaccagcctggccaacatggtgaaaccccatctctactaaaaatacaaaaattggctgggcatggtggcacacgcctgtaatcccagctacttgggaggctgaggcaggagaatcgcttgaacccgggaggtggaggttgtggtgagccaagatggcgccactgcactccagcctgggtgacagggtgagactccatctctaacaacaacaacaacaacaaaacacacaaacaaaaaagaaattacatccttccttagccattcacttgttatgaacagaatttagaagactcaaaaaagaaatgcccatgtgttttctatatagtaccttccatgaattttaatagataactgcatagctgtaagaccaccatatttgtaattatgtgttaaggctagaaagtttctagacagaaaagtcttgactctacatttaactgtaatgtccaagggaaaataattgtgatcatcaaattagattttaagttacgcagaagacctgttttattgtattccgggttctaattcattacagtccaaagaaagtactaaataataaaatggaatgacatttgtttcctttataatatgtgtttaaaataccacaaaaacgtggttaaaacggtagggtgatgaggtgattaaaacctgctattgaaggaaaacttgactctaaaatggaacaattctctaatttcacctatgctgggtttttcccccattatggtttgatactttaattctccttgcccacactcagggagacgttactgctagttagttgcattatctaatcgattttaaaggaagagacataactaatgaataaaactaagttattaggattcttccgtgacttttcaatgttttctatgtctccatcccacaggttcagttaattctctaactctatatgttaaatagatgtgtatcctgcaaggatatacactcacccccaacacagacacacacacacagagagacagtacattttttttccttttgagacgtagtctcactctgtcgcccaggctggagtgcagtgtcgcgatctcagctcactgcactccacctcccgggttcaaacgattctcctgcctcagcctccggagtagctgggactacaggtgcacgcagccatgcctggtatttttgtagttttagtagagacggggtttcactatcttggccaggcttgtctcgacctcctgacttcgtgatccatccgccccagcctcccaaaatgctgggattacaggtatgagctactgtgtccggccagagtacatatttttgttcaggataatcagaaatgagtataagagagattcttaatgttttctattaagcaggctcatttagaataaacaaaaccagagctattatcttctatggattaagactggaataataaaaattattggaaggagattttttgtcaggtctcccatatatacaggtgttcatcagagacaccatgttccccttctctccctctcagagagagacacccatggatggcaggcgtgggcagggccgtgcctgtcgtacacagggctttgtatatgctgaagcctgcagctgtttattattgactcctaattagctccaacaactgtgtttggctaattgaattgcactccctgctagccacctgagccttcccaaaagaagattgcccttcaaaactaaggaaagaaaatattcacaccattatccagccccagattcttggcttgagccaagcacctatgtagctcaagccaaggatttctgtgcccagctcgaagaactggtgaagctacaagtgttaacataggtgtcttacatttagatcatagtggacaggacttcaatggttgtgtttttttattattattattattaggttgtattttagacaccataatgccaattttaagtgattttaatgtggagagatgctgaaccatttctgctgaaatgtctcagatatccaatcaacatttattaaggaattgtaccatacaagattcccctatttttcaaccagagaatcagaagcttagggaaaaaaaaaattcccttgttttccaactccatcacttgtagtctaaactattttaagttttatttattttcttgagatggggtgttgctctgttgcccagcctagagtgtagtggcacaatcacggttcactgcagtctcgacctcccagactcaagccatcctccaggattagcctcctcagtagctgggaccacaggcacgtgccaccacacccagctaatttttaaaaaaaattttgtggagatcggggagggctcacgatattgccaaggctggccttgtactcctgggctcaagagatcctcccacctcggcctcccaaaatgctgggactacaggtgtgagccaccacactcagcctaaactcttttatcagcttgctaaaggccatgtaaatagaataggctctagtgacccagttatcttttgaaaagctggtctcctgtaagaaacaaattcggccgctaggtgacgctactttccacagtcgggcttctctgtcttagacatttcttcctatcagcagaagttgctactgtactggtttttggtaatcatagtaaagtgaaagcattgtagtgactgtgggagatgtacagaatgctttcatgataagatcgtaaaaaccagaggcttaactgaatccaacaatctgtttacgctcttgcatctttgattttccttagacttttagctcatcataaaagtcaggtttatagacatttctctataatttaacacttaatacttcaaatatctctgctaattacacatatactctgctaaatttattcaatcataaatatattcttagttatagcctattctattaaaaaagcgtttttttaaaaaaaaaacttctgtttatacttgagtcttggaatgacatactagaatcaaccaattccaaggcaaaattcttcctccattattttctcaatatgaaccaaattttttttactcttatttttttgcttttgcctttcaccgaatgattctagaaaggtatacagaaaaaaaatctttttatataacaatctataaacatgaccaaatcaagacaaaatcgtgttaaattgtcccttatgttgatagcatcattatcatgtcaataccaggcaaatctttaactctatt

SEQ ID NO: 94337 - DNA, 37118 bp, Homo sapiens
agggagtggggggagggaagataggaggaaatgggcaggaccggggaggccaggcaaggtggcctggatgggggcggagcttctcgggctcctcgtcaccttcagtctcttcctccttttccagtgacccacaggcccagctcacacctgtacagatccgtgtggacatttttaatttttgtaaaaacaaaacagtaatatattgatcttttttcatggaatgcgctacctgtggccttttaacattcaagagtatgcccacccagccccaaagccaccggcatgtgaagctgccggaaagtggacaggccagaccagggagatgtgtacctgaggggcrcccttgggcctgggctttcccaggaaggagatgaaggtagaagcacctggctcgggcaaggctagaaagatgctacgttgggccttcagtcacctgatcagcagagagactctcagctgtggtactgccctgtaagaacctgcccccgcaaaactctggagtccctgggacacaccctatccaagaagacccaggggtggaacagcggctgctgttgctcctggcctcatcagcctccaaactcaaccacaaccagctgcctctgcagttggacaagacttggcccccggacaagactcgcccagcacttgcggctgggcccggggagcagtgagtggaaatcccccacgagggtctagctctaccacattcaggaggcctcaggaggccagcctgccatgagagcacatgtcctctggccaggagtagtggctgagctctgtgatcgctgtgatgtggacccagctccagggagcagagtgtcgaggatggaggggcccagcctggactgactgctacttcctgtctctgtttccattatcacccagagagggacaagataggacatggcctggaccagggaggcaggcctcccactcagagtctgggtctcactggccccaagtctcccacccagaactcyggccaaaaatggctctctaggtgggctgtgcaggcaaagcaaagctcagggctggttcccagctggcctgagcagggggcctgccaccagacccacccacgctctgacgagaggcttttccacctccagcaagtgttcccagcaaccagctccatcctggctgcttgccttccatttccgtgtagatggagatcactgtgtgtaataaaccacaagtgcgtgtctgggtgtgcctgtccttgtggactgcccctggggcacctctggctgtggtttcatcctggccactgctgggtggggagggaaaaggggaccctccctgagtaagagccatcccagaaaccaaaggaggaagttcagggtcagggcaaagatgggatttggagttcggaagacacagattcactgcctggtcctgccacacatcagctgagtcctctggcaagtcactacctgtcaaattgagcccctgtgtgctcctctattgcggttagcagactgctgcataacaaatctctccaaaacttgttgccttaaaacaatggcgattttggccagacacagtggctcattcttttaatcccaatactttgggagggcaaggtgggaggatcacttgagcccaggagttcgagaccaggctggcagcatggtgaaactccatctctaccaaaagtaaagaattaaaaaacattagtagggtgggttgatgtgtgcctgtggtcctagctgctgggcaggctgaagcgsgaggactgcctgagcccagaagttaaagatcagcctgagcaacatagagaaattcctctctttaaaaaaaaagaaagaaaatcattttgatttctcttgtgcagtctgtggttaatgggctcagtgtgggtgcttctcactccgactctcacatggttgcttatggctatagcagggacctcagatggcaaatacttatttgtggcctctccacgtgacccaggctgcctcccacatggtggctggattccaaaagtgactgtcccaggtcagccagttggaagctgtgtcaccttttagggccaagtctcagaagtcatgtggtgtcactttctgaaagagtggagggaggagagttagaccccacctctccacgggaaagtgtcaacatcatatttcaaagagaaaatgcggaatcgtagatcttgttgcagccctctgaaaaaatgcaaactgccacctcagctgtgaaacgagagggcactacttaccactcagattgtggttccgtgaggatccagtgcagagtatgcgaagagtatagggtgtgtccctcacccagaagcaccctcaattctgattttcatctctcctcctgactccaaggctgctgagcaacagccacagtcctgcaaagtgttcccacttctgtcatcacagctggtccctataacaactaagagagggaccgtcttacagatgacaaaaccaagcacatccagggtggtctaggcaagaagggccatgggccgggcgcggtggctcacgcctataatcccagcacttggggtggctgaggcgggcagattacctgaggttgagagttcgagactagcctgaccaacacggagaaaccccgtctctactaaaaatacaaaattagctgggtggtgcatgcctgtaatcctgtaatcctgtaatgcctgtaaattaggtgggtggtggtgcatgcctgtaatcccagctactcgggaggctgaggcagaagaatcgcttgaaaccaggaggtagaggttgtggtgagctgatgtcgcaccattgccctccagcctgggcaacaagagcgaaactccgtctcaaaaaaaaaaaaaaaaaaaaaaagggcctgcagtgatggtgtctctgatggtggtggtgcattgcactgatggtgtctgagtctccaaggactgaagcctagggcaggccacagtatgggtggtcaccctcagacttctgtgacatggccttgctaagcagaagaggctcggccacacactggctaaggagggagagatatatccagtcccctcctctgtctccctaaggaactggcaataagtggaaggtcacatcgctcagccagttgtctgggtcaacagggaagccagtagtgggaaaaggaagagaaacacagtggggctgtgatgactgatggaggtcactgggtgtccatgccgcctctggagttccagcataacctcaccatctgcatgctacacttcacagttccctccttcctccatccaggaacctcacttgatcccctcaccagccctgcgaagcccagggcttgtgtgataggtgtcgatatgcccattttacataggggaacactgaggctcagagagggtagtcacctggccagggatgcacagccaggacatagtggcaggcttgggactgcacctaggctcttgggtttgtcctctaatacgtccttctgaaacttgtctggcagagcatggaatctgataggcagctccatgatgctgtgtgattggcaggtagatcctcgtggggtagaagccatgtgttccccccacttccccagtcttctgagggggtctctcctgctcctttaggcaggatggggcattcttggcccactgctgcccccttgcggtctcataccttgtatcccgatggctgcaaacgtttcaactgcaagcttaaaaatgtagagtcggctgagtcctcaaagtgcccggggagagcacagaggcggtagagggttcaatgatttgttcaaggtcccagccgagacactggggagcaccctgcttcacagctgagactcaaggactggggggcctcaggcctcctgccaagaaaggcagtacagcctcaaagtacccctttctggaagagagagaagtacatttactgagtcctgctgtgtcccatgacagctaaactaaccacaaggatgacgatccctttttatagatgaatgtgaaggggacttaccaggtctctttcctcctggtccctaggagaccactaggaatacatgggatgcttctggttagcacaatgattgcaggacacctgggcattcaggggacagggccagggatagcaaacacctaaaatgcataggacagtcctacccagtgacaaatcatctcaacaagaatcccggtgccaaccctgttgagaaacaccatgccctgggttcaaatcctgactcagccacttccatcccctaccctcttggactccaacattgcctagagggccaggcatgaaataaaggacagatgagtgcctggcacagggccagagacaaggagtgggcttttctgmgcaggaagaaggtgaggcctcctggtgttctgtgccatgctataagatactcctggcccaggaaatggctcaacctggtctgacctccaactatatcacctcttgacccaggagcaggtgagatgttagccgggcccagctacagccttctcaccctctgccttaaagcaggaaaagcccctgagccaacctgattcctctgagctgcacggggccacagctgtggctggagtttgggctgcaagacagggctgaaaggcggggcccaaataggactcacacacacacaaatacacacacacacacacggtctgtgaggtcttgatcctcagaaacgaagtacaggctgggtatggtggcgtgcacctgtagtagcaggtacttgagaggctgagatgggaggatcacatgatcccagggaggtagagactgcaatgctgcactccagcctgaacaacagaataagaccctttctttaaaaaaaaaaaaaaatacaggccacaagcagttaacctcgcagttaatttgggaagaattttttccaaaaatcatgtaaaatattcaattcagctttacagttaaaaataagaaattccattcttttagggaagatgaaaaagtcctgttgcatggatggtggtgatggytgcacgacgatgtgaatgtacttttgccactgaattgtatccttaaaaatggttaaaatggtaaaattttgttatgtatattttacacaataaagaaaaaagaaactccaaatgttctttaataaatgccttaagcggccgggtgcggtggctcacccggcctgtaatcccagcactctgggaggccgaggcaggcagatcatctgaggtcaagagttcaataaatgccttatgcatcttacaactgtattgggaagagaagaagaaatcagcaatgagggagtgaagcagaggcctgggaatcatgatgtggacagaaagaagggacaatcaggagcctcccctgcacctgctgcagtcccaggcccgtgttccagggttcttcaaggcagaaagccccagtgcctcaccccaggagggggcttttctctcatatcccagccccttgggaggctttttcttctcactccctgggctgggagtcaagaagacctcagtaggagtccagcctctgcagccttgctgcgtgtctgacaacaaaaccctttccctttctgggcttcagggtcaccgacatgtaccacaaggaggattcccaacctctcttcttgcccaaacgctgcatgattctctcagcgacgatacagctcgtccggttcaccctgcctagattctagcaggaactatggtgccctgaaggtcaagcccatggtgatctccttggtcagccccagaagggaccctgggctctccttctgttcttcctgctgccccttcatggggctgggaaaacctaagacctgcttctcccaccctgaggcccctactgtgtaccaggcccgggtaaggtaccagtcacatactcgcacttaggcctcacagttcatcccattttatgcacaaggcgactcaaagactgagtctggcccagagaaggcctgcaggagctccgagccccgcctgggcgccgggagcaggggcggggtcgtccgggaccctttcccggaagggaggccgcaggggcctgcggggcggggcctgcggggcgaggcccggggcgcgtcccggaaccagagacggggcagcgctcgagttcctgygcgggactgccaaggcacgaccacgggccggaaggctgccaggcccagtgggcaagcgaagaaatgaaccaccgcaacgcgggcgcttcggggcggggccgagtgcgaacctgagccccaaatcccgacccaggcaggggcggggcycggagcggggccttggaggcccagcccgcgcggcgacgtctccgcgtggcgtcacggcaccgactgacggccacccaccatggccgcagaccagcgcccgaaggccgacacgctggccctgaggcaacggctcatcaggtacccgggcggggggcgggcggcggggggcgcggggctgcgcggagaggcacgcgcacgcacgacgcacgcacgcacgcactacgcacgcgcctccggctaggaagccgctgctacccatcccgtycggccgctgccccggccccgctggagcttctagggcccgargcgggcggcgccgttgggcagtcccggcgggtggtctccggggccgcctccccgacagcgccgtctccaggccgcccagttcaggagacggccccgccctcaccgctgttcggctgtgtcagcctcgcttggcagcctttactccggagaagaccttcaccctggcgcctgagaggacctcacccagggtggcccgtcagcagcacctgggcctggctcgagagtgacctgggagggggctgaaagggcrgacaagggagagtcgggggagtcggttcacaggcagcacacttgacctgtgagggggccctcggtgggacggtgggtgaggtcgcctcccactggagcttagggctggcacccagcgaggggcagcaggrccacgtggctggcaaggagctgtttagggctgagagccaggcacctaakgttggtgccctgkcccatcccatcgaagacacgcggccttatggagtccccatgggacggggcagccaccttttctcaggatccgggagactgacgcggacacatgcagaaatgagcaaggaggccacagaggctgaaaatgctttcagaaacaatccgaagtttcagcgacttgttaccccatctgcttcctgctttgcaaccacctgtggagtggagagacaaggcagggaagcagcaccttgcccttccagctctcatttcccccccgccaccagaaactgggaaggggtgggcgggggtctgcgatgagtagacttcaccctttcggtcttcagacatggctgtccactccttgcctgtccccacagctcttcctgcagactcttttttcccgaggatcctgttaagattgtccgggcccaagggcagtacatgtacgatgaacagggggcagaatacatcgattgcatcagcaatgtggcgcacggtcagtatcacacctcaggctggcagggcaggagaggaaggcagtgctgtgaacctggtcccaaggtgacctgagattgccgagaggtgtggagaacctgggtggagttgaggcactgtcagtatgcagaggaggctcagccttcgcaatatagctgtggaattctgcaatctggagctgtgctaaaccaggcaggggtcagcaatctaggtctgtgagtctagttccacttgggactgatgatgagctcacaaagtggcagatggcccagctgtgaccagcaacgtagcacagtgctggccaagtgctggggtcatggcagtgcttcagccccattggccatctcaggtgctaggcaagggagctgaagtaggaattcagtcatcttgatgaggctgccagagctgatggaaagaaagggagtctgagactcagcaggcacatggaagatgaataaagttgaggttaaaaaaaaaaaaaaagcagagactctagtcttagactgcttgggctcaaatccctgtcccctacttactaacttgtgatctcgggcaagttacttaattctcagtgcctcagtttgcttatctgtgaaagacataatgatactaggtacccactttaaggtgtttggagaattaagtgtgttaatttatgtagcttgctctgaatgtgcctggcacatggtgagctctcagtacatattcactgttattatccttggcctttgacaatcaagattaccaccagcccccttggctggtgaagtgaaaccagttgacagtcaccccccaccccacctttgtcatacaagcctcaaaaggccttccagcctgggcaacataatgagaccttgtctctaccaaaaaaaaacttaaaaattagccaggcatggtgactggtgtctatagccccacctgctcaggaggctgaggtgggaggaccacttgagcccaggagtgtgaggatgcagtgaatgccatgatcacaccatacactccagcctgggtgacagagtaaggccctgttaaaaaaaaaaaaaaaagtcctccttaaagacatgggctttctagacagsgttcttctgctgaagcggctttccttctgccagaatctcaggaactcctggatctgcctttccagaaccagcttctctctccctgctctgccttcagactgccctctttctacctcwccctctagaactacatctcttctggctgggtttatagcttggggctgggggaggcccagtgggactggctgagtggagccagccgtgtgacggaggcggccctcttccagttgggcactgccaccctctcgtggtccaagcagcacatgagcagaaccaggtgctcaacaccaacagccggtacctgcatgacaacatcgtggactatgcgcagaggctgtcagagaccctgccggagcagctctgtgtgttctatttcctgaattctgggtaagtggactgtggccagcccccgggaagagggtgagacggtaacaaagacagtcactcacatgggcccagtgtagtgtagctgaccgagtgtggactcggagaggcagcccccactgcaccaggctcctgagattcccggctgtaggccctgatgctttctctgttggatccagtttccttgtctcttattgaaggatgttattacctcctttctaggatcattgctggagcttagtkaggtaatatgttcctttatttctgccttamggatacagccaaaatccctgcctgtgggttgctcagtaaggaaggaaaacatcaagtgattcttcaaagaaatacagaattgcaaggagggctctggaggaagtgtacagggtatcatgaggcctagaaaaagtgaggggacctgacctgggggttcagggaaaccttccctgaggaagggctgttaagctcagagctgactaggagataactagaagaggaggaaggaagggtgctgccactgcatcagaagtctcgtcaaggctgggcacgatggctcatgcctgtaatcccagcacttcgggagatcgaggtgggcggatcacctgaggtcgggagtttgagaccagcccggccaacagggcgaaaccccgtctctactaaaaatacacaaaatttagctgggcgtggtggtgggtgcctgtaatcccaactactcaggaggctggggcaggagaatcgcttgaaccgggaggcggaggttgcagtgagccaaaattgcaccactgcactgcagtctgcaggacagagagaggctctatctcaaaaaaaaaaaaaaaaaaaaatagtctcatcaaaactcttgtyaaggttggtcaccacacagaactgcctgtggaaaggccctgtagcaggaaaggatatggtacccagcacacttgaggaaccgaaagaagtccacgaagggaaagcagaggctgtgagctgttgggaggcaagcagggcgcatcacctaggrccttctccgccaagtggggaagctgtctttatcctaagagcattgggaaactatcggaggctttaatcaggaaacgatgtcttaaagggaacggagtgcaagagtggacactgttaggtgccagttcagtggccaggtgaaaggtcatggtagctcacactaggatcggcagtggagacaaacaggcaggcgattacagtgtatctgggagagaacattccaacaaatcgtaggtggtggcgttgaattatagtgatgattactgtggccactcacacagtacagacatctgccccccagataatttctaggaagtggaattcaccatcttcattttacaggtggggtaacagcagttcaaagaaaggaacttgagcccagacatttgccatgtcaagagctggagcctctggaaagagmagggagctggtgcttcctcagtggtggtggaggaggggcattcttatgccaccagctttattctgtgtggattccagggacttccatgttgccaaatccaaagcaatctctttgctgcattgtcttactctgtcccagcagtaattgacagttaccactctccggaagtggtctgtcatcttgcttcccgggcactgtgctctcctgttttctatcagcttctctagccactccttccctgtcttctttgctgattcctcctctgttccttggggctgatcctgggccacttttctctctgagccctctcctcaggtgatctcttccattctcttggtattacatagcatccatgtgttggtgactcacaaatttttttgagcccagacatgtcccatgtgttccaactcgaggttctaactgcccctgtgacatctgacaaacatctccagcttcatgtgttcaaaagggcaagggttgattggaccatggtactgttctccctyacctgcccaagaaggctatccccactcacccccgctcatcttgccttgtaaagggcatcaccacctatatctgctccaggcagaaaccacacgctccccagtcctgcatcaatcctgcctcctccatctccatgatgcctcttaactccctccacctctccatctccatggccaccacctgctctcacctggcgtcctcctccttggtcttctccttctacttttattcttgtcaactccattagacacagccagaggccacctcctaaaataggagctgacttatgtcccttttctcattaaaactcttcagtggcttcacatggcactgagaagaaaactcaggctccttcccagccctgtgcacatgtcccctgcatgtctccccacttcctctcctaccctgccctccttaggccctggcctccctcatcttctcctggttcccggagcacactgagctcttttccttcacaaggccttggagcatgctgctccatctgcctggaaacctctccctcaagactcagtacatgagtcacctccccatagaygcttcccctgaccctctgtgttggtctgctctggctctcataagaaaataccagagactgagtggcttaaacaaaagacatttattttctcacagtcctggaggctggaagtccaagaccaaggtgttcgcagggttggtttcttctaaggcctctctccttggcttggagatggccctggttggtcttctgagtgcaggtgtccctggtgtctctttgtgtgtccagattttctcttataaggacactggtgagattggatgaggggccccctgacggcctcatcttaatgtaatcacctctcttatctccatatccattcacatacgggccattgcgagctaccggggattaggggttcaacacataaattgggggtgggggggtgcagctcagcccataaacatgccccctctggctcgctctcccagggcatccatcgtagcacttagaaaaatgatcacttcttcttttttggctttgtggtggcrtgtgtgtgtgtgtatttgtatatacacacayatatatataaatacacagacacacatatatacaaacacacgcattcattttcgtccacagttcctggctcataactcccacagcccttgttacactcttttgttacaacattgggtgtgtcaggcctcaggagacaatcactctaacctcctgcccttccttttacctgcccaagacaggactctaatcttccctacctttctgatggtgggtcataaaactcattccagagacggtcccaccccatatcctgctagaaggaatgctgctgtcatgaagcttccataaaaaccaaggggactggattcagagagcttccagataactgaacatacagaggttctagaagggtggtgcgcccagggagggcacaggaagctccatgcccttccttcatacctcaccctatgcatctctttatctgtatcttttataatatcctttataataaaccagtaaatgtatttcccttagttttgtgagccactccagcaaattgaacctacagagggaattgtgggaacctcaacttgaagccagtcggtcagaagttccaaaggtcacccgggcgcggtggttcacgcctgtaatcccagcactttgggaggccgaggcgggtggatcaggagtttgagaccagcctagccaacatggtgaaaccctgtctttactgaaaatacraaaaattagctgggcatcrtggtgggcgcctgtaatcccagctacttgggaggctgaagcaggagaattgcttgagcctgagaggcagaggctgcagtgagctgagatcgcgccactgcactccagcccgggcaacagagtgagactgtctcaaaaaaaaaaaaaaaaagaaattccaaaggtggccagcatggtggctcatgcctrtaattccagtactttgaggccgaggtgggaggaatgcttgagcccccagtctgggcaatatagtgagaccccatctctgcaaaaaaagaagttccagaggcccagacttgctactggtgcccagggggctgtggggcagcttgggcattgagccctcrtgctgtgggatctgatgctgtctctaggtagatagtgttggaattgaattggaggacacccaactggtgtccgctgcagaactgattgcttgcctgstggtggggagaaatccttacatattttttggagtcacagaagtcttctgtgttgattgttgtagtgtgaaagcagaggaaaaacaatggtttgggttttttcmaaacaactttcatgacacatacgagaatgtaaattccagaagggccaaggccatgtctgttttacctactctttttcccccagcttctagtacataggaggcatttgatatataccaaacaaacaagcaagtgactgactagttgatgtcctgagaatcttcttgctgctggaagggtcctcctgccctcagcatttctctctgggaagctcttagactactctctcagtcatgcccaccttttcggtcataggtcagaagccaatgacctggccctgaggctggctcgccactacacgggacaccaggacgtggtggtattagatcagtaagtgcaactcacagccctaccgttcccagaagcctggcccacaggcttcttggtgatccgtgagactgactctgggtgccttaggcagggaggataaggggcctgggctactgaagacaagygtggcaggcagaggaccaggcctgagacctcccagaggctctgtcaccctgggccaccattctgggaaggcagctctggggagcagagtgcgctttgtaagagactcaaaggtggtcccacaacattgtacatgttcaaactacyccagcagtagctcccatgaattgagtatgtgatgtgcacaaagccgaggctgacaatatcaacacatttaagattcattataaaccagaaggaggaaatcccaccycatttcacagcagagaaaacaaccgagagagattaaatgatgagctgctgtcacatagccagtcagcagtcttgcaagaattgttgctgactccaaagcttgtgctctttcccagcccaagaacttgggggctctgtcaggaaagttggcctcccttgtgtgtcttcaggggtggggagacgatggtcagactgggccagggagtaggtgctgcccggacccgagcctaccctcccttctcctccccagtgcgtatcacggccacctgagctccctgattgacatcagtccctacaagttccgcaacctggatggccagaaggagtgggtccacgtggtatgcactgcccaactcaacaacaggtcggtgcctgtccccaagcccggataacatggcgctgtcactccccacaggcacctctcccagacacctaccggggcccctaccgggaggaccaccccaacccagctatggcctatgccaacgaggtgaaacgtgtggtcagcagtgcacaggagaagggcaggaaggtaaccgtgtccgcgcctgtccaatccagccaacagtgaatgtcacctccgttgtcaccgccactgtgctagatgctgggaacccagagagaaaaccaaacgaggccctgccctccaggaatctgggataggggcagtttgggctcagcagagagtctgagtgcacggcctakcatgggcgtggtagccagccagagcctgagcaggccttgggaggtaccaagcggggtccttggagggggtgctctctgacacagtaggggtcagccactccaggtggggtggggagtagcagaggaagggcatcccactgggtggctgaggaaccktgtgaatgtgtggccaggagctgatcctggagaggcaggcagggtccacatgccagagggcaccggaactatgctgggcggcagcagttctgccctggaggcccccgggaaccaccagagtcttaagcaggagagcgctaagacctggggccggggctgctctctgactccagggctatgtggaggatggattggaatgcggcggcttgaggtcaggtgaccgtgaagtggccagcaggccccaagtgagctgtggggaggcctgacgggggcagtatggtggagatggagtggaggcgcagacataggagagagaggtgtgttacctacggtgacaacagagggaagactgttggcgacaggtgagggctctctgaaggcttcactgaaggagtgacagagccagacacaggaggtacgacaaagaaaggcagcctgtggggccagaaaggttagcagaacccgaccaggggagccttgcctgtgtgtttcaggtgctctgcgaccacttctataaaacctaaaaaaggagattgctctgattgcaacaggtgtgggggaccagtatcccatcccattggccctgccctcccacctgtaaggcagaatatggttgggaaatcattgccatatgcagaaggggtcactgaggggttttaaacaacagtgacatgctcagttctctgggttgaggcatcatcaccctggtggccatgtggaggatggactggaaaaggcattcagttagaagacctctgcaggagtccaaggaagaaacaggcaaatctgcaggaggcaggcatgtccaggcagagggcaaggagtaggtttagagagggggctgaggtagaatccttgggcagtgctgactgatgggttgagggaggaggcgtggatcaaaaatgggggrcagggaaggaactggcttatggtggaaaaatcagtgcatgtagtttggggcatgccaagtactaggggcctggaggcatccaggtagtaagagttggctggaggcctgagagaaaactgagtcacaaaccttcagatgtaacatggaacccaaagtaggggtgcagcactgatggtgacttgtcttgcttggactaagccagcactagcagggcacgctaagcyggtcactgcacaaccccatggtcgtgttcccaatgtccatctcttcacagattgcagccttcttcgctgagtctctgcccagtgtgggagggcagatcattccccctgctggctacttctcccaagtggcagagtgagtaggtgggcggggtctgctctagggagggcaggggtctaatgaggttttccaacctctggtccaaatcccaacctcagcctgtcctgactgccagaattttgagacaaagcccttaaagaaagaatggcccagagaaggccagccattgcccaaggtccccaccttactgctggcagagccagggtgcaaagccccgagacctcctgggtcctgatcttatccctctcaaccacagcccccgtgtcagtcatctcctctgccacaggcacatccgcaaggccggaggggtctttgttgcagatgagatccaggttggctttggccgggtaggcaagcacttctgggccttccagctccagggaaaagacttcgtccctgacatcgtcaccatgggcaagtccattggcaacggccaccctgttgcctgcgtggccgcaacccagcctgtggcgagggcatttgaagccaccggcgttgagtacttcaacacggtgagtgatggctctaagtcaagggagcaacatgggttctgataggcccccggtgatcagcctgtccttagtcagcaaaggctacagggctagcactgtgcccagcacacgcttccaagacgctgtccttaaggagattatagccaggtcaggtaagaaaacataaaacatcttttaaaattagtgtcaatccaaaagctgtcacaagggaccatgtcttataaaatatatacaaaaataggagtccctgtcttcctttcagcagatgccacccattctgtgccacgccctgtgtcaggtgctggaacttgagctggttaagagttgtgaggagtgtggtgtgcttgggtaacacatgatctcagagcagagttcgcattgcagtggctccctgtctttggggtacagggtcaagagctttccctgagtgaagctgacacatggcatattcagtggccctgaggcagcagttgcagggtaggtgagaggatggcagcasgagccccacaggaaagagccgaggagtctcactgatcttgaagagtgaggaccacaggagggttttaatcctggagagagtactctttggaaagatctctggtgctcagtgtggagaaagaactggaggaaggcagactgatccagggaggagaggaggaggcccagaggaggaagggcagggacagagggttgagaattcactgtaagttcctcaaaaagagccagtttgaattggggactaaaacatgtcaggatttggcaagatagataaggcaagataatgtccttaggggtgagggaagtgacactttggtgcattcagccaaaaaccatcactctgtccatgtgacacatagagcctcagagragctcactgtcggggaaagacaggctcacagacacatggtcatgacagcgtggaggatgagtggaagtagtgtgttcacggtgctgtgagagcacaaaggacatcccaggcaagaggtgggtgaagagctgtgggacaagcagtagaggcttcatagagaaggcaagaccagatctcagtctggaaggctgagcaggaaatcaagtgggttgtgtaaggggaacaacaaaggcccagtggagcagcatcctgacttttgtttatttctttgttttacttgaccctcaagtgtacataattagatagaatccttggttcatggaagactctcaacatctgtctgtgcatagccctcttctagttattcagttaacctttattaatgttctaagcacctgggaagccagcatccctaatgaaagcttagaccttgataatatcatgtatctctccagatgttccccccaattccctcttgttgccttctccacccatcactctgaataaccatggtaaccatcactctcaatcccatattatttagttgttatttgastttatatgaagtctatcatgctgtatatactctggggatttttttttctactaacatatcactaagaatcctccctattgcctgtcactgaagttcatttgctttgactgctttataatctttgtataaatgtaccacagttcagtcatccattactattgctgtgctttgaggtcgttccatgttttttttgttttgttttttttttttgcaattatgaacagtgctgctttgaayagttttcataagtctctgttgtacatgtagcaagagtttttcttaggactgtacctgagggtggaattgctggcccatatggtatgtgtttacccttcattttaaaagataatgacatttgttttctaaagtagttcacaagttaacaccccaccagtagtgtatatagtgtatatccttttttgtttttgtttttttgagacaagagtttcactcttgttgcccaggctggagtgctgtggcgcgatctcggctcactgcaacctctgcctcctgggttcaagcaactctcctgcctcaacctccccagtagctgggattacaggcatgcgccacacctgggtaattttgtatttttagtagagatggggtttctccatgttggtcaggctgctcttgaactcctgacctcaggtaatccgcccgcctcagcctcccaaagcactgggattacaggcatgagccactgcatccggcattctttttttttttttttttttgaaacggggtctcactctgtcacccaggctggagtgcagtgacgcgatctcagctcactgcagcctttacttccagagctcaagtgatccccccacttcagcctgccaagtacctgggaccaccggtgcatgctaccatgcccagctaattttttgtatttttggtacagatggagtttcaccatgttgcccaggctggtctcaaactcctgagctcaagcgatcggcccacctcggcctcccaaaatgctgggattacaaggcatgagccactgcacccggcctatatcttcttcagtgccttttaatttttgccagtcaagtggagcgtaaaacagtagcttgtatggtcttgatatgccattccctgatttcagattacgtgaagtatctcttcatatgtttattgaccatttgtttgctcttcaatgaaatgcccatttgtggtcgggtgcggtggctcacgcctgtaatcccagcactttgggaagccgaggtgggcagatcacgaggtcaggagatcgagaccatcctggctaacacggtgaaaccccatctctactgaaaaatagaaaaaattagccgggcgtggtggcgggcacctgtagtcccagctactcgggaggctgaggcaggagaatggcgtgaacccgggaggcggagcttgcagtgagccgagattgcgccactgcactccagcctgggcgacagagactccatctcaaagaaaaaaaaaaaaaaatgcctatttgtgtcttttgtgtcttttgcccattttttttttattgagttaccagtgcttaattttatttgtgggagttttgtgtctgtttgtatgtgtgtgtgtctgtgtgtgtgtgtatataccaacacatacatatctattatgctaatcccttgtctattgtgtatttgtgaatatgttcatccagtttataacctgtcttcactccctttacatatttataaagttttaaattttaacattgtcaactcttatcattttgttttatagacggtgtttttcatatattgtttaagatatctctccctactccaagttataaaatatattcatttatgtttcctcttaagtcttttaacattttgttttgacatataggtccttaatccatctggagtttatttttgtacacgatgtgaatcaggaatccaattacatcctttgtgcatgtcatactacagtgttttcctttacttttttttgttttttgagacggagtcttgctctgttttcaggagtaaaatgttggctcaaatttttttcttataccttgggttttggtaactgggtcctactaaccttatagaataaattgggaaatatttcttctttttcttttacataaaattgggatgatctgtcctttgaaggtaaaaactcacctataaagccatctgggccttgtgttttgtgggaagatatttaactgctgctttaacttctttaaaagttatgttttagtgagttcaagatgctataactataacaaaataccatagactgggtgggttataaacagatttctcactgttctgaaggctgcaaatctaagatcagggcaccagcatggttggggttctggtgagagtcctcttccgggttgctgacagccagcttctcgctgtacctcatattgtcgaaagggtgagcactccctgggatctcttttagaaaaccatattcgcattcatgaaggctctattcttgtgacctaataacctaaaggccccacctcttaataccatcacattggaggttaggatttcaacacatgaattgggagagacacaaacattcaattcactgcaagttacatagggtttttaacgttttcatatttgttctgcccctttcctctccttctgggacagtcatttgcatgttggtatgcttgtgtccttgggtctatatgactgtttttcttttctttcttttttttttttttttttttttgagacggagtttcgctctgtcacccaggctggagtgcagtggcgcgatctcgactcactgcaagctccgcctcccgggttcatgccattctcctgcctcagcctcccgagtagctgggactacaggcgcccgctaccacgcccggctaatttttgtattttttagtagagacggggtttcaccgtgttagccaggatggtctcgatctcctgacctcgtgatccgcccgtctcggcctcccaaagtgctgggattacaggcgtgagccaccgcgcccagacatgactgtttttctttattcctttttctttctggtcttcagactggacaatctcaattgactttttttttttttttctgagacggagtctcgctctgtcgcccaggctggagtgcagtggtgtgatctcggctcactgcaagctctgcctcccgggttcacgccattctcctgcctcagcctcccgagtagctgtgattacaggcgcccgccatgatgcccagctaatcttttgtatttttagtacagacggggtttcaccatgttagccaggatggtctcgatctcctgacctcatgatccrcccgcctcagcctcccaaagtgcggggattacaggtgtgagtcaccgcggccggctgactttttttttttttttcactgattctttcatctgccggcttaaatctgctgttgccaggtgcagtggctcacgcctgtaatttcctagcacttygggaggctgaggtgggcggatcacttgaggtcccgggtttaagaccagcctggccaacacagtgaaactccgtctctactaaaaatacaaaaattagccagatgtggtggcatgcacctatagtcccagctagttgggaggctgaagcaccagaatcgcctgaacctgggaggcggcagctgcagtttgctgagatcgcaccactgcactccatcctgggtgacagcgagactgtctcaaaaaaaaaaaaaaaatctgttgagcctctctagtaaatgcttcatttcatttattgtgcttatcaacttcaaattttctgattgatttttaataatttatctatcattagactctgttttggtaagacatcattttcatgctttgctttcaattttttaagtatagtttcctttaggtctcttaacatatttggttttggggttgtttctgtttgcttgtttggatacagggtctcactctgttgcccaggctggagtcttggctcactgcagcttcagcctctggagctcaagtgatcctcctgcctcaccccgcaagcagctgggagtacacacatgtgccaccacgcctggctatttttattttttgtagagatggggtttcaccatgctgcccaggctggtctcgaactcctcaccttaggcaacycacccatcttggcctcccaaagtgctgggattacaggcatgggccactgcacccagctaacatgtttgtaacatctgatttaaagtctttatccagtaaggtcagtgtcagcttcctcgggcgcagtttgcattgattgctttttttcctcccgtgtctgggccatgcttctttgcatgtttcagaattttgttaaaagctggacattttaagtaacataatgtggcaactgtggaaatcatattctcctccctccccatggtggttcctttttcttgtttaatgtcttttctgaactaattatgtaaagttgtgttctttgtcatgtgtggccactatagtctctgcttgattagcttagtggtcctctaaccattagatctccttaattgcctggaacccgtaagtcactcagccaagagtttataactgccttagactttacttcctcattctgcagaggctcaaggtagccagtggtgagagcttagggctttctagatcttacctgagcatgcacacagcactgggcataagcacatccctatgcatatgaatggccttctagactcccaggagtacgtcacagcctttcaaagccccctgtagccatctcatagtaacagaaagcagatcagtggatgcctgggtccagtagtagcgggacggttgcacaggaagtgatgaaaatgttctgcaacttcactgcgagggaggttacacaggtacatacatttgtcacctcacgttgaactttatactttaaacacagtttatatataaattatacctcaacaaagctgatgtttttaaagatgtagtttaaaaacgaaacaaaaaacgtggtttgcaggagacaccttgctcgtgatcctctaaaacacaggtctccactcagatacctgcaggatgaggacagggtgggcgagggaaaggagccagagccctccaggggtgtgaagcagcttttcctgggtggggcttggcgtgctgcgctcactctccctggaggaggaagtgcctaatccagtcctctgggtctgggcccaggagatggggccttaaagcctctcttggtaaagactagccctgtgggaacaaacaggacaccctctcctctgattctgtatcttctaggggctcctactgtacttcagggatacctgacctgagttgcagtcacattagctcctggaaagccaggacagcccatgttgaaccccacttactactgctgaggactgtgcgccctaaggggtttggggcctctgctcttgccactggccttggaacacgtgtggcagttcttctgcctcaccctcactctggggcatggcccactctgccagggcatctgacatgttctttgtccctggctcagtttgggggcagcccagtgtcctgcgctgtggggctggccgtcctgaatgtcttggagaaggagcagctccaggatcatgccaccagtgtaggcagcttcctgatgcagctcctcgggcagcaaaaaatcaaacatcccatcgtcggggatgtcaggtgaggctctgggggcagcagtcaccacccacctgccaaggcccagtgtggtaccattttcttcacctcctaacaacctgggatggtggggttatgtccrctctcaagaggaactgagacactgagaggtgctattgcccaaaacggctctcctggggaggagaaagctaggacatgacctgatccctagctacccctgagcctctctcctctgtccacaccaaagatctctcccagcccagttattccctgaaactattctcaccaccttctgaaggtgcctcctgcactcagccccctcaggaggcacaggtaggagcccagaggctgaggccagcaccctggcccctcaggcctggcctcctgagatgtcgtcaccttcccttgcaggggtgttgggctcttcattggtgtggatctgatcaaagatgaggccacaaggacaccagcaactgaagaggctgcctacttggtatcaaggtattttcttcttgaaacaagttgcttcctggagtaggagacaccacaggtacctctttgcagggccagtggaaaggagcctcatctgtacccccagcactctgggccacagacttgattgaaagagggctggggctggcgggtgggggcagttgttgggggacagctgatcctatcagctgaggacagagataagtggtgttagcagttctgtacccagtgcctgactacaaaggctgcagatgagacacaggctattcccagaccagagcagcacctctgcctagaatgcccaagctagcagggcactcagacccaggaacccctaatgccaccttggcctggagaagggaarcaccttctctattcataccagggagctgtggcagcactagactcagggttcccatgccgcacgacaggtggttgggatggacaagactcctgctcctaagctgggtcgggggtgtctcagaactcagactccaccggtcccaatgccctggtttgcttgtcctttcacttggaccccaagtcctcaggacttcttctccttctagttgarttgttattcccttttatctccattccccaggcctaccccttcccccacgcccaccatggaaagctcttctggtatttgacgtgtccttattcaaattgtgagacacgcgtggtattgatgtaaatctctgtgctgtatttgaacttggcctttcctggtcccgccttctctctgctgtcagtcacatccccagcttactcctacccccctcccaggagcctcagggattcggaatggtcaggtggcatggaaggaaacagatcccaagttcagcccgtgtctcacaataccctgggggtgcttttccagttcagtgaggaaatgggtaagtcacctgcagttaccctgctaggtggcaagagctagayctggccccagggccgtctaactccaaagtccaagccctgttctttctggcgtggccatggtcagtgccaggaagactgggacaggaaaatgaaaccagaaggcacactccccacccccaagaaataaaaataacaaggtttacaaaagaaggggaacaatgatcaaagaatataaacacaatcatgcagacccctcatctcagagatgaggttagactgtggactaaaagtgattattagctacaaatgatgttaagataaagccatcttcctaagaataattggacattttaaactggaattgtaagataacccggaagacagggcaggaagatgcctgaagctggtgaggggcacgtggagctcattacaccaactgcaatgttggacattctctatataaggaaacaayatacatcacgtaaaccacacagaaaaccagagaatgcaggtgactcttgcagtctggcgtttccctgtggccattcattcttggcttggactgtggctccagggttaggtgaggcaaggtgcctgttctgtggggcagcaggctcagggccaggtgcagtgcactcmaagcaggctgctgtgggccagatgcacaggactctgggagaggtgaccagtaaaatgacctggcaggaactggcccatggaaggctctgaggacagtgtggctggagcactggacatgaggccaaggccaggctgaggaaggccttgaaggccatgtgaaggggtgtcctgtcctcacaggctgaaggagaactacgttttgctgagcactgatggccctgggaggaacatcctgaagtttaagcccccaatgtgcttcagcctggacaatgcacggcaggtggtggcaaagctggatgccattctgactggtgagcttgaagcctgagcttggccatatctctagaactcagcctgaagccagcaactagagcctcctagcatggaacagggaggggacaagagtccaagagcagaggcacatgtcctctggacagggcagggagcaagagagggtctttcatggcccaatctgctcctattcctgcctgtacctaagagagcttcctgggctgtcaggaggtggaaggtgagccaccacccagcctgcctgagcaggcatcagatgtatgcaggacaaagcagtactgggcctgagaaacaggccataagaactacagtgggagttgagaccccattaccgccagcctaggatgtagagatggcaggagtttcattctgtacatgagacaggtcacacaaggctgctgggtggctgaaagattggtaccactgaggactgacggaactcaaaatgaaaactctaccccacattccccatcacctaggatggtcgtggtcaacccagggttccccctaaatccacttacaaggaaatctcatggctgkgttgccatttacagctcagtgagaccctaaataggcacagttgcatctcacagtagagatcacaactgccagccaagcaacctgtgccctcctacctctgggtgatcactgctacccacaggtatgcttaatcccagggctctggagctgggggaggcccatccctgctagacacaaattggaagtggtagggatatgatgaataggagtgtgtttgtggagagcaaaggctggccacagaacaggcttagggatcctggacagagcctacaaatctcaggagaactgagggctggctttgtttttcaggaaactgctgccacccctttggggaatgggacatgggtgtggatagccagagggcccaatctctaaactgtcctccagtttggacactgaagtcaacagggcatcttcagcagagaaaggtgactgagtcggcattgctttgtggtctttttcagacatggaagagaaggtgagaagttgtgaaacgctgaggctccagccctaagccagccctgctctgcctaagtgtactccaggtgagtgggccttgcttcttactcttgaagatgcacagcgggttccttaccatcagcagcaagcagcctcggcaagctgagcctttttttaagacttttttttgttctgactgatgctccttcccaaaggttagtttcttcaacactggaaattctccaatgcttagcttgcacttgatggcaggaacagctatatcctcccttgaaacctatggggctgtatccacgtggaaccccaacccacccttgcctcttgtaaccacctagtcttatrccctaaataccagacctggagttgggctccaatccagccaataaacatcccctgccagagcaggcttttcttcaccagccaggaggagcactattgtgccccaattcagacggccctggcactgccctagtgtgtaaagaatcccattttttcattcatcagccaagaaggttggtgttccaaggtgtcccaggaggggacatgcctgctggggatgtaagccctcatcactgccccatcctcactccccataggcctctcattcctttctttgaaggggggctcagccctaggcagggcagtccttaaaggatacycccacaactgggcctgcagctggaagagcctgctgcaggaraaagccccaagtccagggcacctggcaccccccccccgcctccctcgaccctgagcaagaggtctcwcacagcatatcccacactcacccaggcttgggggtttttaaattttatttcaaaagcttggatagcttsaatatccaggttgkggcaaaatcaggacacgtgtaaaataccttacaatacattagattcccaaaaggtaccaaaaagtacagtaaaattaacacttccgttacaggaaatgtatgacgcaaataatataaaattaaaaggtgaaaaaaaggtgacactggtttcctaagatacaatttactctttacaaccagggtccacaggtccaggctgmagagcggcagcaggaagcagagcctcycacctgcttctgggggacctggtaataaaaatcagcccatgatggcgctatggcctctcagacaccacacgctgcctaaacacctagagctctggaaatagtcaacaggagagtgatttccatgggggaaattttaaataagatgcacatgggacaggcaatagaaagtttgccaagttaaatttggtacataattgtgttcactccatatccaaacaaagcatgtgtgcgatcagttggtcgctcctgctgccgcctcagtatggcttgtagttattctgatggccaccacgtcgctggctcttgccgtagtttgtactaccctgacctagggacgagaacaaccatagcagctactatttacaagcatttgccctgtgccacgcgcttgatatgcatcttcccaggaccctcaccagccgtgacagcagagaytgccttcctcatgttaytaagaccccgaagtctaaggctcaaaatcaagtagctcccatggctgagccaggcctgtctgactccaaagcccctgctgccagtggctcctacactgtcctgcctcccctggggacgaggggtgagcggatggggcctccctctctcctacttactgtagtcgtagccggggccgtagccgtaatagccatagggcgagtagtcgtagccgccatagccaggcccgtagccctgctggtagccgtagccctggttccagtagttgccgtagccctgattccaactctgactctgacctgtggggggagcagggcacaggggcccgtggaccatttagcatacgcaggagctaggatggaggaaatcctgccctttggggtggcagggttactgtggcaactcaggcagaagccaaggggctgctgttctggtgtataagggccctgggcccaaccctgcatctgagagacccaagcagaggatcagagaccaggatgctaactttacttggggcaaacaaggcagctcactcactcagtcactctctgatcactcccactctccttggcagcttagcctttaaaaagatgcagttcaggctttggagtcagaggggcctgggatggaaggggataaatgcctggcacagctctgccctacccacccttctgcctacctgctcacaggtgtaccagactcaggacatccacaaagccaagacacccatcacatcccctcccccagagtgtaacacaaatgctctctctgccctgggcacccaagccattccaaggggcagcagcaggcaacagcctcaagcatacagccctgacccagagccgttcctattcctgttcrtccccaacctcacacaatctgcccacccctgctgcacagcaccagagggagccccaagacaggcttggaaggctccatgtaggcagggaaacaggacctatcttcatccacgttccactcacctccacctccaccaccacctccgctgcctcggttccctcggttgcggtttccacggcccccagagccatactgctgctgctgatagacttctttgggctgggccaccttgatctcacactaaaagtcaagaggacagtggtcaggccagtaggacaaactcagggcagtgactgcccaaacaccttcactgcgacaaacatcaaatggtggatcaggtccatttgctgagaaacaaaatatgctagtatrggaggccacctttgggctaaagctcatggaatcccaactaaaaccaaaggccttccagcagagaacccttccgacagaatgcacttgagatgggcatctcagccccagagcaactccgtatctaatggaggcaggcaactgggccaactgcagcccaggggagcagaggacaggctgggaccaggcaccacaccttggtcctgctgggctagagggtcagacaagacttctcagatgaggggccttagacaatgaggttttaacatctttttctctttacagaagaaactcatctcatccaaatacacgctattgagaaggcgagcctgacctccctcttacagataaagtcagctttcagaggctcagggtgggggggcctgcccgaggccataatgctacccaccccctcctcctaaccactggtctgttggaataacccagatgtctgcatcccctcaagtcagtcaatttcctttctgtccmctgggggtggaatggggtagggtgggatactttaaagtgctcctgcttaaataaattagaccagaccagtgtatttctaaagaaaatcctgacatgcacacccattaaaaatagtacattttacagtgtcccagtcatacttttaattggcaaattaaaataatgcaatctgatatattctatcctactaaattaaaaatactgaatataaccaactaaatatacttactcctaagactcactaccagtagtttcacttaaactctgccttagaggctcttcccacccatttcccattatggcacatagagaaaaaggcctctatcactgtccactggagtaataaccactgcttcccctaactgcctcaaagactgtcattttatagaaaatttaagactatcctaatccactctttccaaactcccagccaggatagagacttccaggagttccacctgtcccaccttatctggctgccaactcctgctcagaaacagaacctgccacaccctgccactgcaggccgcamcctcaactcccaactgccaacttgaagcctgaactaccctttccctgaccagagttcaggaggggaagagctacacctccctgcacatgaatccackcatttgaaagcacaactgaccctggatttaagctggccaggaccctgggagatctttggaaggatttttgcctgggtttagggttaacttaaagaggtgcccagaagaccaagtgaggcagttcatgcctgtaatcccaacactttacaaggccaaggcagaggatggcttgagcccaggcaacatggtgagaccaggctttaaaaaaacatatgagccaggcatggtggtacatgcctgtggtcccagctactcgagaggctgagatgggaggatccggtccgcccatgaggtcaaggttgcagtgagccatgattgtgttaccgcaccccagcctggacaacaaagcaagactctgtctcaaagcaaaaaaaaaaaaaaaaaaaaaagtgctcaaagtggatggaagtggacaaagacttggttgtagaaggaggtagaaaggctctggaataagaaaaacttcaccacagaggagaatcagtgagttgcagaagttctaggatcttctgagaccttaaactgcaggcttcatacccctggactcaagaatctagaactgtcacctctagctttaagtgaggagctaaagaggctactcaacctgctctattcacagaggccaccttctcctacctccctcacatcctgtgttgtttattggcagtcctcccagcctgggaagtctttcaaggattggaacactgccccaatcagggcagcatacgcttcagagaaatagtaaagtctgaccaacctggagagctcctgcatgaggcccaacccctaacccatccctctaagggccagctctccagcagcacaggaggccaagcagagctgggaacaccttaccttgcttccactgacagtatggaactttttctccagaaccttcttcacgggttcttcttctttaaaggtgataaacacaaaacctcgtcttttgttcaactttggatccattggcaattcaatggcctcaatctgcaaaaagcataggcaaactcaggcccaatacctccctaccccagagcatataggggactcacaggagaaaagaccccattgaagacagagggtgaaaaataagccctgcctgggagggtctagccagccaaggataccaaggaccagaaagaaggcagccttaggggcagctgatgggctattcccagagccacactcacctccccaaactcgccaaagtactccctgatcttttcctcagtggcttcaggattcagacccccaacgaagattttcttsaccgggtccttcttcatagccatggcctttttagggtcaatgacacggccatccagcctgtgctccttctggtctaggacctgttccaacagaaaggggtcaggctgactcagcagcacgagccagacaaggcccttctctctaagccataaagacaccagtacagatacaaacatgtgtttcaccccctccaaattctaccccagcttaacctcccaacccaattttcatcaaacctcaagtacagctggtttacctcgacacctagaaaacagtcctcacacttaagcctttgatcatgctcttcctgcccaagcagtcccagcgtgaggcccatctccagaagcgaagcagcagggactcggagcataggctgaagatgggccacaggggaaggaatcctccctccactccctactagctgtgacctcttctacttacatttctgagccttagggttttggtttttgtcctgtaaaatggggctaaaagcctatcataccaatcatggactctcttgtaatcctcccagatgtttagcgccgtacccagaataggcacataaaaggtaatgaatgtcaactgtcatcttcccgaaccactccagcacattctctcactcccagcttaatctgtattttcatcccctcaaaaaccggaacataacctccggctttgggttttgcccaaagcactyaaatcacatgcagaccacacaaactagtcatgctttaagaaaggtgtcctcttagaattcaaatcgtttccactgagactgctgaaatccagtacccagcttaccttctccacactggctgcatctttgaacaggataaacccaaaccctcttgaccgtccagtgttgggatccatttttattgtacagtcaacgacctctccaaatttagtaaaatagtcttttaaatcttttttgctagtatcccagctcaggccaccaacgaacatttttctgaaatggtagggtgagacacacggcaacaagtcttgtaagcaagctgtgattttggaaaggactggccctggcaaagttctcacgaagtctacagctacccttagagtctgcaaggagcaccttagaaagatgttaaatctccactaccctccaaattgaactcaaccaggaccctaacgaggcttaacaaggctctgcagccccagcctgtgagaagcaaagaagggaccacctcaccaggggtatgggacctaaccactcataactggaaattcatgtgttctacaaccatgtagcaaagggccagcgtctccaccaactcctgagaactcgtttcaaggaactcgatgtttccggggaccaagcccgcccagggttcagaccgtgactccgcccccgggagaggcggaggagggaggtccgggccccggctcgcgccaactccgcccacgcagcccccggcgcggcccaagacgccgccgggccccgggtccgagcgctttccctcttccgggccatccgcccgcccctgcgccggctccggccctggccctggccctggcagcgcgcgagcggccccggggcggcgccaaagtcgacccaacaaactcccgcaaactccagcgcgagtggcagcgccaggcccggcccgcgaacgcagcggcgacagtccgcgggccgcaccagccccgacccgggccaggccgccgcccctccccccgccgcgtggcgccaacaaaaggcggccccggaacaaaggcggcgcccccgtccgcccgcggccgcacctaccccgcgtcctcctcgttcttgctggcgttgatctggtcgccctcggcgccgttctgattcccgctcgggggcgccgcggtcgcgcctccagcccccgccgcggcgcccgtgccagccccggccggcgactcgccttcggggacggcctcatgtccgttctcggtggcgcccgtcgtctccatgggctgctcctcgcccgcttccgacatgctaggccgaggcgcggcggctcctgcaaccagcggcgacagcgcgtcaggccggcgcggctcccgccagagctcccgcccgccggccgccgctcacctcgccgccgatgacgccgcggggcccgctcgtccccacccgcaggggaaggcgccgcaggctcggccgcactcaagctcgcgctgctgaggcctcgccccagtcagcccacggagctgctccaactgtgtctcctcctccttggccgccgccgcacgggaacccaccgaccaacagccaagctccgtcccgcgcggtgccgccgcctgacaatgccgactcgtggcgccctttataatgccggagccgggtgccacatcgcaacaaactgcacactcattggctgctcaagtccgtcactcaacctagcttcagcgtcccattggccgcsacggcgcgcgcgctctagacctgggcgggctttgtcctcattttagaacgcgcgcgagtccggccgctacggagggctcccgaagccgggcgggacggcgccgggtccagggcggcgggcagctacagcacatcggtgggagggcctaatcggattgtaagctcgtcgaggccgctggtctcttgctctcgaggactccatcccagcattggcagcctccgcctccccatgtcccaaaagaggaaactgggctggagaaagtttcgcagcccaaggacgcgtggctggaagtggcagaacccgggcttccgaggttgggcgagtggggtcctccaaggccctcagcacgggtcggagggattgggactgaacccgccatccccctggaccttggtgccctccaagccccgcgctcgcgccctgtccgtcgcctcccccagagatgctctgcagggacgatgagaccttggtgttccccggttctctgtcccctggcaccacctgaacgattgacatcgcatttgtacttttgtttacttaaattttttcctgtaaatcatttgtctttctttttcttcctttttattatttttttttttttgatggagtcttgctcttgtcgcccagactggagtgcaatggcgcgatctcggctcaccgcaacctccgcctcccgggttcaagcgattctcctgtctcagcctcccgagtagctgggattacaggcatgcgccaccacgcccggctaatttttttgtttttttagtagagacggggtttcaccatgttggccaggatggtctcgatctcctgacctcgtgatccgcccgcctggcctcccaaagtactgggattacaggcgtgcaacacgcgcccggcctttttttttttttttttttttaaacaaatacggaggccgggcgcggtgactcccgcctgtactcccagcactttgggaggtccaggcgggcggatcacgaggtcaggagatcgagaccatcctggcgaacatggtgaaaccccgtctctactaaaaatacaaaaaaattagccgggcgtggtggtgggcgcctgtagtcccagttaccgggaggctgaggcaggagaatggcgtgaacccgggaggcggagcttgcagtgagccgagatctcgccactgcactccagcctgggcgacagagcgagacatcgtctcaaaaacaaaacaaaacaaatacaccactcgtgaactcacgaggtaaaggacagggtgggggcgttgttctcttcctaatacacaaaactcctttatattatctccttgaccacaaaattttaaaggcctcggtaatcccgttattccttttaatcatatgggtggtgggccccaaggcaagcaggattacaacctctggagcctgcaggttaccaaatagcaacccagaacacaaggaactagcgtttccagtggattcctgcagccaggaccagtgtggtgggctgggcattccattttctcttctgtatcttaacaaccaaagtaaggtggtatggtcaccaattttatttattttattttttgacacaaggttttgttctgtaacccaggctggagtccagtggcacgatcacggcttactgcagcttcaacctcccgggctcaaatgagcctcctgcctcagcctcccaagtagctggaaccagaaacgtggccaccacgccaagcgaattttttgtaaacacagggtctccctatgttgcccagctagatcaccaggtttttttttctttgagacgggggtctcgctctgtcgcccaggctggagtacagtggagccatctcagctcacagcaacctccacctcccgggttctagcgattctcctgcctcagcctcctgagtagctgggattgcaggtgtgttccaccatgccgggctaatttttgtatttttagtagagatggggttttaccatgttgaccaggctggtcttgaactcctgatctcaggtggatcaccaattttaaatgagaaaactgaagtcaagagcagcggcccaaagctacacaaccaactcaggcactaactccacccaggcactggagttgccctgagaatgaaaaatgaagatacgtggatttcaggcttctctaggaaagtccgaagatttagctcacactgtactgccttcccccaaagtaacaatcaagtgcagctgggatacccatacccaggtgggcaagtgccctctggttcaccccaaggccactcttcactgtcccaggctaattccataacaggaagtcacatatttccacacgaccttactcatgtcactgagatctggcagcaaggctttcagggcggtctctaacaaactgctcaccccacctccaccccagcccttgccaacccacagaaatgagggccagggctgtggcctgcaggagatgatgggcacagctccccaagcagtgaaggtaattcaggaaattaagttcaaagtcaaatagtgtaggtgcagcccaaagacattactgcaggcataaattcccttaatcttccacgtggatttctttagcacgactcagaaacactttcagtgacgtgtaaagtctgaggatacaacatttggacagcgcttagcagtttgcaaaatgctttcaccaaccttgctttactggagcttcaaaatagctttgtgcagttacccatattttatac

SEQ ID NO: 94338 - DNA, 12899 bp, Homo sapiens
aattattgggatgaatgaatgagtgggcagggcaaaacagcaaaggtgggaccctcaggacaataacatagtgagggggccaaggatgctctggtgaaggtgagtggtccaaggaggaggagagggcccagcagagaacatggtcgaagggagagaggagagtcaaggtagagtatgacagtgccaagtagggaatgaaaatgcctgttggatttggtgatgagggagtggcctgggacccagggaagagcccatttagtgctgagagaaatacgctgtgggcagaaaagtgaagaggaagcaagcaagtgaagacttttaagtacagactgtcgtttcaacaaggccagcttctaaggaaaaggaagaaagagtaagaactcagaagaagcctgtggtttgttttttaacaaggaaaagacttgagtgtatctgaaagagcagagaggtgtccattgcagtgggagaaactaaagataggcgaaagttgaatggaaaggagcccatagaacatgatgatttgcaaactccagatcttgttctttccagattttcttggatattgctgtcagattaatctgacatttagtcctctcattatcctgtcccagtcaaggggagaaagtattgactgagtgctgtgctcagctcttccacagccagcatctcacttacttgacacaaaacatctataggtaagtactggtactcctcttacggtggaagacattggctctgaaaggtgaaataacatgtcagaatctgaacacatatcttttgttttgttggttttttactttgagtttaatggtaattctcgctttcttcccttgccctgctgtgttgttatttcctagtatatttagtaaaactagaaacttctgtatcctggcctaattttcttttcagcatcatttcttttctctgtactaaagctttgtacagttgaaagcattgttagatttttgctcctgttttacaaaagatgaatagaaactgcaaatccagaagtgctgtccctggtgccagtattttcattgtaaactgactaattttgagaaaagatagaaatttttagtaatgtggaaagcagtgtcttttagcctctcatcaatagcaattagatttaaatcatttaatcatattcagttatgaaggagataaaaattaagaacatgaataaagtactatcaaagattatgtgtaaaaatacagttggggattctataatctttttagctctccaggaagccaccctaaccatccctaaacataggagcctgctgtctgtgtttcacacatgatttttaaaaatgtggccgggcgtcgtggctcacacctgtaatcccagcattttgggaggctgaggcgggcagatctcttgaggtcaagagttcgagaccagtctggccaacatggtgaaaccccgtctctactaaaaatacaaaaattagccaggtatggtggcacgtacctataattccagctactcaggaggctgaagcgtgagaatcacttgaacccgggaggtggaagttgcagtaagccgagatcatgccactgcactccagcctgggcaacagagcaagactccatctcaaaaaaaaaaaaaattttcagagatgtactggataactacttctgcatatatgtatgtctgtccatgtaaatatatgtgtacatatatagagaaacatacacagagaatttatatagttaagagtctctatctgcctgcatgctcacatgagcctcactgatgtttaatacgtacacatatctttgctttcgttactaggaaaactgatctaaaatactataatgaatgtagaagtattcaaaaagttcattcttccttaaataagacaggcccactgctgcctcagggccttagcactggctgttaccctgtctgggaagctttcccttagatagtcctatgacttcctctcttagtcccttaaagtcttggtttaaatgtcaccttttcagtgaggccttttcttatgacccactttaaaattgcagacgttttctctcacccatcatgttccctatatccatttaaatgcttttattgtttttctgtaaggtataccacttacttattgtctccctttctcttgctaaaatatgtttcataagggcagacattttttctgtttattgctatatcctgagcacccagaacagtacctggcttgataagtatttattgaatgaatgatttatcgtgttcataaaaccagtttgactgctatatggagagaatgcattgtagggtagcaagagtttaaatagaaaatccagacaggtgggtatagaaatagtctagttgggtgttaggagtagctaactgttacccagaggatggaagaaatataaaaggagaaaataaataaatcaacttgcccttttcaagaagcatgggacctgcttgctgcccagtcccatcccacacacccatactgtgcaagctcccagcctctgctatggcttgtgccagccgtgtgtactaaggggtctgtgacagaccagacaccttggtctggagactctagttcatgtcctggtgagtatcagagttatataaatcctataagttaacgagtgaaggcagaaaaagcattccaagccgttaagggagtattgagtatttccagtattattactcaaaagtcttgtttaggaaaaaaggaaaggcagagagaactgtatgttgcttaatgtaaaatagtaatgatggtaatgataacagctaataatcactggatccttattacatccaagcataatgctttgtgctttataaagtccttatttaatgagatagtaaaatgtcaaggatctgaaacattgtttaatcctggaagagctacagtttctgacctatactgctcaggctccaagcccacaatactccatcaattctgagtaaagcccccctaaccgtttttcattttgtaggtagacagttatataatctgggaaaaattaaaaatttccccccatctcagtggccatattggtcacacttctggaataacattaaatagtagtagtaatagtaagcaccttttccttggttctgttattagagagaattcttctagggctttatttgtattcttggtgcaatgctaatatttttgtttttgaacacgaatggatgaaggataccagttgaatacttctgaagcatctatcaggttgatcatatgacctatgacctattaatatgatagtaatagattcttaatagtgaaccattctttatttcctggataaatccttcttcgtgctagttatactcttgatgtctaagtaaccagcattgtttaaaaacattaagagttctggctctgatattacaatgacttaacagggtgggtctgctggtgacaaattctcttagttttctttcatatgagaatgtctttatttcaccttcattcctgaaagatttttgctaatatagaactctaggtttatggttatttctttcagcactttgaaataattaatccacttccttctggcatccatggtttctgatgagaaattcagttattcacatttttgccctgccaccaagtagtgtatcaattttccctggttgctttcaagattgttttttacttccatttttagaatttaattatggctgggcatagtggttcacacctgtaatctcagcactttgggaggtgaaggcaggtggatcacttgaggccaggagtttgagactggcctgggcaaaacatggcgaaaccctttctctgcaaaaaatacaaaactacctgggtgtggtagtgcatgcctgtagtcccagctacttgggaggctgaggaggcacgggaatcgcttgaacccaggaggtgaaggttgcagtgagccaaggttgtaccactgcacttcagcctgggcgacagagtggactctgtctcaaaagaaaaaaaaaaaaatttgattatgatgcatctgggcgtggatttctttgggtttaccctgttcctataggttgaaatcttctgtcaaatataagcttttaaccatgatttcttcaaatactttttcagcaccaaacattttctccttctctgggactccagtgagacatatatgagatcttttgttgttgtcccatacatccctgaggtgctcttcatctttattttttctcaatcttttctctctgtgttgttcagattgaataatttcttttaatctgtcttcaagttaattctttccttttttcacccttctgctgttggacctatttagcaagatttctattttctatatcaataaataagtgtttatatattaaaaatactgtagggctaggtgtggtggctcacacctgtaatcccagcactttgagaggccaaggctggtgggtcacgaggttaggatttcaagaccagcctggccaacatagtgaaaccccgtctttcctaaaaatacaaaaattagccgggcatggtggcgtgtacctgtagtcccagctactcaggaggctgaggcaggagaatcgcttgaacccgggaggtggaggttgcagtgagtcgagatcgcgccactgcactccagcttgggcaacagagtgagacttcgtctcaaaaaaaaaaaaaaaattgtatatttttcacttccagaatttccacttagttctttttatatgctcattttctttgctgagattttatttccatttctttagagtgtgttcactctgacttgttggaacaagtaaggcagatgctttaaagtccttgtaagataattgtatcatctcacttgatgtctgttggttatcttttcccatgtaagttgaaatgttcctgggtctttatattctcagtgacttcaaaaggtatcatgggcatttagaatattatgttataaaactctatgtcttcttgaaatccaacagaaaatgttgatatttctgtgttagcaggcagtcaacctggttgagctcagactacaaagtccaaccagctttctgtgggttgtggtttctgtgtcagtttggttgtcagagacttcacattgttgcttgaatcttgctcacatgtgtgtcactctgtggccagtatggaatttaagcagcggtccctcttattctcaaagtccacgtgtgctgcttagggggtcagattcatgcatatgtatctcgcaggtgagcccaggagttcttaaataacttccaaggtcatgttcccgaattctcccctgtctatgtccgcagtagtttcagcttccctgtggctgtccttttgactcttctggctacaaggcaggggcctgtagttgccccgctctgctgtgacttccagtgaccatccctatgtagagccaagcagcaggaggacaaagaaaagatgatgaagtggggcttcttgctacccttcttgggaccacagatcccttgcttggggaagaaggaccctctcctcatgtttttgagctcctgtcagcttgcagtggcactgctgttgcagcagccaccagaggattgcttaagtgctggggtgcaatagaacagagaaaggggaaaaaataggcaattccccctgctctctctaagcattagaagtccttttcctgctccatgaaccggccctagagcttttcctggagaacctcctctgccttctcctgcctcagtgcctgttttcagatggctgtataagtttagtacagaagacagctgaggaaaaaaaggaagctcaccactggttcagtggtactttggattttggttctcttccccaattcacctgctactgtttacttctcagggccttcaaataattgcttcatgctttctgttcgggtttatcagtggaagagacatggtggaataggcctactccaccttatcaggaagaggatcctctactttggttttaatttgatctttgtctaacttcttaaggtggaaacataggtcacagattatgggccattcttatttactgtaaaaacatttaaagctccttccgcaggcaggagagtcagctagccacccaagaaaacatcatgaaagataccgatatcaagagactactgtatacccatcttttatgcatattttcaattatcctaagtgtcttcattccatcactcttcttggagaactcctcaatattggaaacacacttgacatggttgtgcgtctgttctggttttgtaactgctgtcagtctagtactatatttagtagtgaaaccaaatacatcctctaaaataagttcattatcatacaaggtaaccagatttttgaaatgctgtatctactttcttatgtcttgtttctcctttcatgtaatttttgttctatatggagcaccactaatagagttggcrttggaaacatttttatttgcagttattttgtctacttttactattgggccttacttatgtttgttaggaccaaacctcaaagcatggctaagagttttcagtagaaatggagttacatccatatgggagaatagtctccagatcactgcaatgtctagttttgtaggagcatggcttggagcacgtcctattccttgacagggcaagagcatggcaggtatggcccatctcctgtacgcttggagcgacctttgtccacgtggctggccttgttatttcaccactctggatatactggaatagaaagcaacttacatacaagaacaattaactggagcaaagggagatatttctttgtgcagattctgtaagggctgtgcagaaatgtgtgtggtcaaagccaagcagttccatttacagcactgttttttatgtagttacaacatgatgtgattgtagctttttaaactatgaaacccctgagagattgtaccttctagttgaaataaagtatttataatagaaaaaaaaatattgaaagctatataatttcctctaagcattgctttggttgtaacacataaaatattatctcattccattgtgatttcctctttgacctctcagaatttacaaattcactgcttaattttcaaacatgaggatttcccagatagttgaaatgtaattctttaggtgtctttttttaattgtaatgttttgtgtttgtgtgtatatgtgtacaatatacgtaacataaaatttgccattttagccatttttagtgtataatttggaggcatttaaatacattcacattgttgtggaaccagcaccgccatccgtctccagaactttttcatctttcctaatgaaaactctatatcctttaagcaatagcatcccattccccgcttccgccagcccctggtaacctccgctttctgcctctatgaatttgactactctagatacctcatatgagttgaatcatgcaatatttgtcttttcgtgactggcttatttcacttagcataatatcttcgaggttcatccttgaagtggattcagcatgtcactgccagtctttttatacccaaactaacttccccattcatgtttattttttattcaaattgaatatttaaataatagcagaaatggtttaggagtactgttattactgaatcttcatatttaagactgtgttttgcctttctctgcacatgtgtggagtgctgaccatgtggagttcttgagtcacatcagttcttgcaggcatggccccattgtctttcggcatcctgtgttcctgagaaaatctcttctgccagttttttaaaaatttgtaggtaatctttttttttttttctttcgtaagcatcaactcctcagaactaacttttaagtctaaattccatgaaggtatactgaatcctactattaagttttctgtagtacaaaaatatgtttgaacttaaaatgattaatattttccagaatagcaaatactttgttctttttgtaatttgatttttgaaatacatacacagaagaatgtgtaaaatctgactgttcaacaaaaacctacatactcttctaagccctttattaactaacttttgttcttatatcagcactataagataggtaccatttaacaaatttggacaatagagcacagagaggttaagaaacctacgcaaggtgtggtggctcatgcctgtaatcccagcactttttgaggccgaggcgggcggatcacgaggtcaggagatcgagaccatcttggctaacacggtgaaaccccgtctgtactaaaaccacaaaaaattagccgggcatggtggcgggcacctatagtcccagctactcgggaggctgaggcaggagaatggcgtgaacccaggaggtggagcttgcagtgagccgagatcgctccactgcactccagcctgcatgacagagagagactctgtctcaaaaaaaaaaaaaaaagaaacctgcccaaggtcacacagctaatagtggtggagctccagagttcattttgagttcattaactcaaaagtccgaagtttcatcttagtgttatcgtaaccactgtgcccttctgcttctctttttagttaataatgataaagacaaatgaagaaaaaagaaagcaggccaggcacaggggctcccaccagtaatcccagcactttgggaggccaaggtgggtggatcacctgaggtcaggagttcaagatcagcctggccaacatggtgaaaccccatctctactaaaaagacaaaattagccaggcatggtggtacatgcctgtagtccctgtagtcccagctacttgggagactgaggcaggagaatcacctgaacccaggaggcggaggtagcagtaagccgagattgcgccattgcactacaccctgggcgacaagagcaaaactccatctcaaaataataataataataataaggcagatatccagttaccagagcccagatcaagaaacagaacattgctagtgccatggaaatgctttgtgtgcatctcctcattcacatcctcttacctctctctacccaagatataaccagtattctgacttctgtgatacctcctttccctctctttatactattgccatttatcattgaatctctaaacaatatatctggttttggtctgttttaaaactttaaattgaatctttatatatatatatatatatacacacacacacacacacacacatatatatatacatatatacatatacatatatattatgtgcctttgcttattcattcatattgatatgtgtagctttagtttattaatgctcactgttgtcagttactccattgtatgaacacttgacgatcttgttatccattttttgatgatgggcatttgtgatgtttccagtttttgctgttgtacacagtgctgtgtgaagaatcatgaattctcacactgttgcaaggtggagttactagtggagttactaagtgcatgcacctagtggtagacttgctgtatcagcccatgtgcttgctctaggctgtactaaactatttttccaatgcttgaatcagattggatttccaccaggagtatgtggaagttcccactattgcatctttccaaaatctgaagctgtcagtttgaatttttacattttgttacttgggcggatgtggtaatggcatcttgttgcggctttaatcggctttcccttggttactgttgagattgggcatctttgcttacgtttgcagaccattcaggcttcctttccttaagtgcttattcaagtcttttgcccatttttctagtgggcttggtgtttcataagcattattttccaagtctccattctagttttttgtgggtcatgtgttgcaaatatcttctcccagtaggtagtttctatttttttagcttttatttttatttttatattttgagacaggatcttgctctgtctcccaggctggagtgcagtagcatgatcacggctcactgcagacttgaactcccgggctcaggcgatcctcccacctcagcctccgagtagctgagaccacatgtgtgcgccaccatgatctggtagtttttgaattatttgtagagatgggctctcactatgttgccctaggtgatttaaaattcctggtctcaagaaatcctcccacatcaacctcctaaagtgctgggattacaggcgcgagccactgcactcagctttttatctttttttatgatgtcttttgatgactagaagcacttaattttctcccaacatttttctttcttcttttggtctttatacttcttttttcttctcattctctgttttaattatttttaaaatttatttcctgaacttcttcatagtttccaaacttaatattttctgtgtataatttatctttggatagaagcagttctgtctggactttgtatttgtctaatagtgtaaatggattctcctttgcttgttatgttgtttaatacatagccccttaaatgttcccaaagaacttgagttggctggctgacccctgtacagaggtgaggcaacagggagctgccaattcacatgtcacctgctggtattttctttttttttttgagatggagtctcgctgtgtcgcccaggctggagtgcagtggcacgatctcgactcactgcaagctccgcctcccaggttcacgccattctcctgcctcagcctcctgagtagctgggactacaggtgtgtgccaccatgcccggctaatttttttgtattttttagtagagacagggtttcaccgtgttagccaggatggtctagatctcctgacctggtgatccgtccacctcggcctcccagagttctgggattacaggtgtcagccaccacgcccggccacctgctggtattttcatactcagtttgacagttcctctgtttggggttacttggttgtatgtgttttggaagtggagcctggttgtctttccactttttctctcttttcacttaagcagatcaggttggaagaaagaggcctggttaatgcttatttcttgcttcacaggaaagcctgtgcccataggccttggtttgtttgttcagtgttgatctctctctgttgacttcgatcagcaatcggaaagctgattctcaggttgcagtgccagtcctctaccccttattttgtctgggataagaaataggatctaagaaaattcaagtctgagtagctacaaggtccttttccagcctcctctcaaacagtttagcagatcccctggcctgtccctaccaccagttctcatctttaaggaatgcgtatttaggaaatggtagtatcccttaggactgtcttacccctgtgaataaattacagcctgcttaaagtttaaggggaagaaacctctagattgtgtcatcctcctttaagagtttaagtttcatgtatgttctggtactttatgttccagaggagtatattctcaaagggtagtttacatactgtgttagtctgttctcacattgctataaagaaacacctgagactaggtaatttattcatttatttatttttggggttttttttttttgagacggagtttcgctcttgtcgcccaggctggagtgtgatggcacaatctcagctcactgcaacctccacctcccgggttcaagtgattctcctgcctcagcctcctcagtagctgggattacaggtgcacaccatcatacctggccaatgtgtgtgtgtgtgtgtgtgtgtgtgtgtgtgtgtgtgtgtgtgtgtgtgtttagtagagatggggttttgctatgttggccaggctagtctcgaactcctgacctcgggtgattctgcccacctcagcctcccaaagcactgggattacagccgtgagccaccaagcctggctgagtctgggtaatttataagaaaagtttaattggcttatggttctacaggctgtacgggaagcattagtgccagcatctgcttgtagggaagcctcaggaggcttacagtcatagtggagggcaaaaggggagcaggcatatcaaatgataaaaccaggagcaagagagagtggcagggggaggtgctacacacttttaagtggccagatctcatgagaactcactcatgatagggaggacagtaccaagagggagggtgctaaaccattcataagaaaccactcccatgatccagtcacctcccataaggcccaacctccaacactggggattacatttcaatatgagatttgggtggggacacacatccaaatgaaatcatatcattctgcccctggcccctcccaatcttatgtctttctcacatttcaaaatacaatcttgcctttccactaatccctaaagtcttaactcgttccaacattaactcaaaagtccacagtctcatcttagacaaggcaagtcccttctacctatgagcctataaaataaaagacaagttagttacctccaagatatactgggggtataggcattgggtcaacactcctgttccaaaagggagaactctctgccaaaagaaaggggctataggccccatgaaagtccagaaaccatcagggcagtcattaaatcttaaagcttcaaaattattttctttgactctgtatctcatatccagggcactctgctgcgaggggtggagtccctaggccttgggcagatctgcccacatggctttgcagtgttcagtccctgcagtgctctcatgggttgtagttgaatgtctctggcttttccacatgcagggtgcaaactgccagtgcatcttacattctggagtctggagggcagtggccctcttctcacaggcagtgccccagtggggattctacatggcggctccaatgccacatttctcctctgcactgccctagtataggttctctgtgtggcctctgcccctgcagcaggcttctacctggacacctaggcttttctatacatcctctgaaat

SEQ ID NO: 94339 - DNA, 12884 bp, Homo sapiens
gagaccatcctggctaacatggtgaaaccccgtctctactaaaaatacaaaaaaattagccaggtgtggtggcgggcgcctgtagtcccagctacccggcaggctgaggcaggagaatggcgtgaacccaggaagctgagcttgtagtgagccgagatcgcaccactgtactccccgcctgggcgacagagtcagactccgcctcaaaaaaacaacaaaaaaaaaaacaacacagaaacccaacagagacctgaagacgtgcctgcctcccccatctccgggacctctcccacctgggtgaagggggcacgtgagcctcacctgatcttgaccatctcagctaaaacactgaaccacccttggcacccaccagcagcagacggagaagaactgtatagggtgcaaaagcgccccgccaccatcaggtccagatgaaaacctacaagttgaatcagcaaggtgctgacggatacgcaagcagaaaccctcttataggaggttcaaggctgggcgcagtggctcactcctgtaatcccagcactttgggaggccaaggcgagcagatcacttgaggtcaggagcctcagaccagcctggccgatatggcaaaaccctgtctgtactaaaaatacaaaaattagccaggcatggtggggggtgcctgtaatcccagctactcggaagcctgaggcaggagaatcgcttgaacctgggatgtggaggttgcagtgagctgggacagcaccatttccctccagctcgggtgacagcaagaccctgtctcaaaaaaaaaaaaaaagtttgagaatgtcagacaaggcagcaccctgtgtaggtgctcaggttgggcggagtctctctcgggggaggggggtaacaggacagcgcctcccggggcctccttgcatgtctgtgtcctgatgcacagcaggcgggggctgcggggaccagagaaggaagaagcgccccagctgggcacttcccgaggaggaagtggtgccggaatttcccccaggtgtggcctcaggtataagagcggctgctgccaggtgcatggccaggtgcacctgtgggattgccgccaggtgtgcaggccgctccaagcccagcctgccccgctgccgccaccatgacggtgagcctctccacatgccgctcggatggatgctgcttggatgtgcagcctggcatggaagggctggggttctctgagcctgggaggagggtgttgggatggggtctgggaaacccctcagtctgggggtaggggaggcagctgcagatcctcggagcgctggcatgctgggtgtcttgggctgaagggctagcctctctgggcttcagtttccccatctatagagggagggctgtactccatctttccgctgggaacaaggaaagctgaggtggaagtgaggtgccccctgccctgggcacctcctaaccacccacctgcctgtttcaccagctcctccccggcctcctgtttctgacctggctgcacacatgcctggcccaccatgacccctccctcagggggcacccccacagtcacggtaccccacactgctactcggctgaggaactgcccctcggccaggcccccccacacctgctggctcgaggtgccaagtgggggcaggctttgcctgtagccctggtgtccagcctggaggcagcaagccacagggggaggcacgagaggccctcagctacgacccagtgcccggtgctgcggccggaggaggtgttggaggcagacacccaccagcgctccatctcaccctggagataccggtgaggacctggggattccgctgtggcgtggggctgcccctcccctggcggggccctgactgcccggagagctctctgggccttggcggttctcacctgtcaagtgggcgtggccacctgagctccctccctccggccctcctgacctggacggctgagctgctgcttgcggctggccgtgccctgcctcccactgtcctaggtggccagggtcccctggggaaattctgggcccgtcacctgagctcctgcagaagtggggctgggtgatgaagtggaagggaggctcctagaggcctccggaccctgctctgtgctcttggagggccctggggagacgtggattaccaccacatgtgagcccgactgcaccccaagcccgtgtggctcagccctcgctgcctcaggtcctatcctgagtacacggagaggggccctgaggggagaggggcctccaggaggacagggtagggccagagactcactgtgcaccccgtcccgcagtgtggacacggatgaggaccgctatccacagaagctggccttcgccgagtgcctgtgcagaggctgtatcgatgcacggacgggccgcgagacagctgcgctcaactccgtgcggctgctccagagcctgctggtgctgcgccgccggccctgctcccgcgacggctcggggctccccacacctggggcctttgccttccacaccgagttcatccacgtccccgtcggctgcacctgcgtgctgccccgttcagtgtgaccgccgaggccgtggggcccctagactggacacgtgtgctccccagagggcaccccctatttatgtgtatttattgttatttatatgcctcccccaacactacccttggggtctgggcattccccgtgtctggaggacagccccccactgttctcctcatctccagcctcagtagttgggggtagaaggagctcagcacctcttccagcccttaaagctgcagaaaaggtgtcacacggctgcctgtaccttggctccctgtcctgctcccggcttcccttaccctatcactggcctcaggcccccgcaggctgcctcttcccaacctccttggaagtacccctgtttcttaaacaattatttaagtgtacgtgtattattaaactgatgaacacatccccagaggccaacattcaatgcgacattctcccgttcagccctggtccaggccagccatggacccaattctggggtgtccttccagaaaggtctacgcagccgcgagcagtgcatgcaggtgggactgagctgtagcacgggggggtcacaggtgtccctgctctgcccacacagtgtctcccctgaggacacccctgggaacaggaaccagcctccttcctcaagcagtgccttgagccctatgctttgtaatgatgtgagcgcctaggggcaccctctcggcccccaaggcaagtctctgaggatgaactgcagggctgtcggctcaaggcagggcccccagccttcgtggttcggatcaacatccaaggccaagcgccctccctgatggtgaactagccacgcttcgggacccaggctctgttggagattttagttaaggggccccggggggagcagccccagtcgtggaaagggggcccaggcctgtgacagtctcagggtctcagtctctaggcccccggccccaagggctgacattgccatggggctgctgggcagttgttagcccctcccctgcctggccccctggctcacccacctactgcgtccaggtgcctggagatgggggtgggggtgctgcacagaagaacaaggactccactcagactcccaaagcaagaggcctcagggaagacttcctggaggtggtggcccttgtccaggagatggaattttcattcaacacatttattgagtttcttttctttcttgaaaaagggtctcgctctgttgcccaggctggagtgcagtgtggtatgacttcagctcactgccacccccaccttctgagttcaagcgatcctcccagctcagcttcccagtacaggcgtgcaccaccacacccaactcatatttgtatttttagtggaggcggggtttcgccatgttggccaggttggtctcgaactcctgagctcaagtgatcctcccacctcggcctcccagagtgctgggattacaggcgtgagccaccgcacccagccatatgagtttctactaagcacctggcactgggaacaggccgagaacaaaatggtgaaaacccttcctgcctccacggtgactaatgaaacaagtggtgtgtagtctgtgagtgagtccaggacagaggctctgggggaggggctgcagttcttttttttttttttgaggagtctcgctctggcccaggctggagtgcaatggtgcgatctcggctcactgcaagctccgcctcccgggttcacgccattctcctgcctcagcctcctgagtagctgggactacaggcgcccgccaccacgcccggctaattttttgtatttttagtagagacggggtttcaccgtgttagccaggatggtctcgatctcctgacctcatgatctgcccgcctcggcctcccaaagtgctgggattacaggcgtgagccaccgcgcccggccaaggggctgcagttctaagcagagggtcagggaggcctcgaagacctgaaggggaggaggaaggagccaggcagccatgcagggaacagctccaggcagcaggaagagcccatgcaaaggccctgagaagacacatgctgcgtgtgtccaagggtcagagagtggcctgcgtggctgatgccaggtgagagggggaccgcaggggcagggcagggcgctgggggtgcagatcatgtctgccctggggccatcagaagcttgtggctgtcactggaggtagctgagcctgtgggttctgagcctgcggattctgagccggaggcactggggtgaggctttgggtttcaatggcagcatcaggatggtttcaggggatgagggcagagcgggaggcggcaggtggcctgggtggggatggcccatgtagctggggtctggatttgggccaggattggatgtggggtgtgggggtttcaagggtgacctgaagcttggtgacctggggggacggctgagatgaggctggattgagacgtctgtatggtgccgagtgttggctggtggggggtggattctgaaggcccccaggaacagaggaccctggctctgaagtgtgagttgctgggagagcaggtggacaagcagcaggcaagggcttctccggcctcaggggagtgggtgccttggcgagagcccaaaggtgggggacgtggctgacgccgggcaaagctttgggggcaccgggctggggtggtggtgaggacctgtgggcaggtgtgtgtgcagccagccacagcctccgcacaagtgaggggaaggggtggccagaagcccctgcaacttggcctgagcgtcctgggcagctggggggccccccagcatcagtgtgggggcaaacaaggccacatccgccaccagcttcaccccagcttctacggaaaagaggcgcagggtagaggctcaccacgtggctccgaccctgttcccttttcacttaacgccagcggcctcctctggaatccaagccccttagggaggcgttaggtgtggagggcctgcagggcctgcaggagctgtcaagggaggactctgctgcctcctccaggcccgggaggacctttctagggaggcacacacctggaatccaggtactatatttcgtggaatatacggtacccgggatttcgtgtgctgctgagaaggaaggcgatgctgatgttaatgaaactggaatgcggcccggctggcaggaaacggggtgcctgcccaggcctcgggaaccatcgctaccccagccccgcccaccggccccaggcagaggctcacgcgctcccggcttcgctgcatttattgcaggtgggtgcacctggcgggagggcaggtccggggcgaggtcacacgacctcgtcggtcaccgggatggggttgacctggggacctcccgggggtccccccgccgccgccgcagcctcctcctcgctgggcttcttgcgggcctcggccgggggccgcggcggggggttgctgggcggctgcttgatggtgcctccgatctgcggccgctcccggggcttgggctcgatgggcgtccactgctcgccacgcacagccrcctgcggggcactgaagggttgagccgcgccccagcgcccgccctccctccctccctccctccccggaggcccaccccgctaggggccctgggacaggctcaagtctgaatcccacgcaggatggtgtgactgccactcagagaggttaagtgacgcgcccgaggccacacagccaggacctgggtcggcctgacaccagcccaagctatttcttcatgccaggagtggggcccgaacccctgggcttctggaagatcccgtggtggacactcccagatgcaaattctagtactcaaattctcctctcaaggtgccaagggcagggaaggcagggaggcaggcccgaggtccagcaggaggggtggcccaggagagtagcaggccctgctccgtctggtgggcgccattcacccacgctggccggcagccccccaagggtgcccaggcatttctgcacatgggggtggtggggggagagcttgaagaccacgggattccactggcttttactaaaaatacagactcctgggcccatgcccggaggttccactgcaacaggtcaagtggacctgggagtgtgtgcttttcatcttctatcccataatatctggtggaaaaatatgtcacatcatatacgtcatgaacagaaagagaaactggacatgtgtgatcctacctgactccaaaacggaaacattccattctgaaaagcaaaactagaaggctgatagaagaaaaggcaggaacgtgaaggcaggacccagggccagggaaaggtgttttcacaaagcacagaccatagagcaggtgaacagggaaacctctgctcttccgtgcagtgaaggactccacgcgccaagttaacagaccctcaccagaaagcatgaaggcatccccagtgtttaaaggttacaaaggctaaatagctaaaatatatgtggacttcctgcaacttaagaaaaagacaatcaggccgggcgcggtggctcacgcctgtaatcccagcactttgggaggccgaggcgggcggatcacaaggtcaaggagatccagaccatcctggctaacgcggtgaaaccccgtctctactaaaaataccaaaaattagccaggcatggtggcacgtgcctgtagtcccagctactcgggaggctgaggcaggagaattgcttgaacccaggaggcgaaggttgcagtgagccgagatcacgccactgcactccagcctgggcgatggcgcgagactccatctcaaaaaaaaaagaagaaaaagaaaaatacaaaaaccacaatagaaaaatgggcaaaggatttgaacaggcaactcaagggagaagaaactccaacagctcaaatccacagtcagagaagggcgagtccaagctccacacggccagctcgtgctgtgaaactggcaagcgtgggagaaagcctagtgcatggtgggagagatggggccacatggctggtggtgggttgtctgctggggagcagctgagcccggcagggtgaacggtgcagaggctgatgcctgacccagcaattcctctctgggtttagcacaaggaattcctcccgaggtctccaggagccactagctgtgcgtggcagcagggagacgggggggatgcgggtggcccccggaaaacaaagcaacagcccagatgagcacttggcaacaggaaggggttctaaaggagagttctgccggtggcaggtcagtgaggcttgaaacagaactccacttccatacgcggaaggcgtacacagaaagtgctgcacctttcccacgcacacacactagaagacgcacagcaaggggagggcagttgcctctgcgggcaggagggacttggctctatggacaaaaggatttaaataagcaaagtctgagggctctgtccacccagagacccccgcagtgagaggtggcctgcagccgtctgttccggagcccagggcaggcagagggcatttcacccaaggcctggccaggctgcgccctgtcctcccacccatccctggcctctcagagagatcactgtatcccatgggatgggcagccttctaacagggtgcagcagtcataaaccaaacgcaggtgtcggcagtttaagaaaatgtctgcgtcctggcaccgcccatgaatcagcgcgaatagggtttaggtgagaaaagcctgataatgggacccaagcgcaggcacggtcttcggccggctgcgtgaccccaggccagtcacagcacctccctgagcctccgcatctttgtctgtaaagtggggaccccagtacccctcccagggctgtggtgcgggttaatgaggaaatgcaaggaaatgacccgacacactagacacgccaaaaatggcagcagcaaccgctgcgtccccgccgtgctgtgagcacacgcccaggctcacacttgctcccagccttggctcagcctacagagccggcttcaagggccatgcgtgtccgagggtgtcagggcaggggctggggatgggggtggccggggccgacctcagagggcgccactcaccagtaggtagatgccgctcgcaatggccaggcaggcggtcccaaggatggtggccagcaggaagccggcgggcaccgagagcctgggggacagcgggtgagaggcagggacacagaagggcactcagaaaggggaacggagccccaggtctgggggccaaggccacaaagtctcaggacaaggcagactgcagacccaggggacgtgcgcggaccggggcttgtttcggtcctgggtgttctcagccttgatgtggacactagcggctctggtgcacttgctcggaggaagcagccacgtgtgggtgtcctggcctcagccggcagtaaccagcagacacacagcacggaaccctccaccctaccaggaagcccaggcaagaccccccagcagtgcatgctgaccccagaccctggcgacggatcggagctcctcggatttggagtggatccttacaaatcctgcacactagacagcagacacaggccctgccagagccagggacccgaatttttgtttggaaaaacactgaggtaagtgggggtggctcctgtccaggcagcccggccggtgggacagtggggagggtcggctccaagccctcctgagccctagagggggtgcgggacggggactcacaggagatgcaggacggcccgaacatagtaattcctggtaaagggcccgaacagcttcaccacggcggtcatgtacttctgtcccctgggggagggaggaaggcgagacggcgcggctgggcctctcccactcgggactcctttgctgccctgctgaccaccccagggcacccaggcctctttcctcccacaaaacacaccgggcaggcaccggccttggtttacccacaagcaccaaagggttggttccggagcctccaagtgagaaaccaagctccacccaaccctgtgagccctgcctgggccccgcaacccccggagagaccccagagcaggaggagactcaccagcgctccatggtggagcccttcttcctcttcccccgggggtactccagcaggcacacaaacacgcccgccacactgaagccatgtggttaaggaacagcccagctcagcctgaggggccacagggaactccctttactgaagacaacacagagaggggcccgagcacggtggctcatgcctggaatcccagcattttgggaggctgaggcgggaggatcactggagcccaggagtttgagaccagcctgggcaacatagtgagaccctcatctctacaaaaaatttaaaagccaggtgcagtggtgtgtgcctgtggtcccagctactccagaggctgaggtaagagggtggcctgagcccaggtggaggctgccatgagtcacagctgcaccactgcactgcagcctgggggacagagcgagaccctgtctcaaaaaaggtcgggggcagccactgcctgaggtcacagagccaggaggcagccacgggaggttccaacaggtctggcactcggggctgcccacgccctccctcccaccaccctgcccagtgctccttgtcgcaaggtccggctgggcggcagggctgagatggggcagaggaggtagaggggccggtcaagggggatgactgacaggagcgggcagaggggatcccagcagtccaacagggaggcctcagtgctggccctggccctctggtgacaccccctgcccaccactcaccaggacttagactggcgggtctgccgctgatcgccacatggtcctggcgaggggcctggctgctggggcctgggctgcccaacccgtgcacagcccaccctgtgtcccagcctggctgcggtggtggggagcggaggcaaacagctcactgtgaagtggctccccagctctgccctgggcgttccccgcccaccccagcctcaggtggaaggatacatggagtaggcaccaaagtaccactgggtgaagcgcccagctgtggccacgatgcccccggtgatgaggactgcggggagaagtgggtcaggcactgtggggctcctgtcccgggggcctgggccaccccccttctctacctactgtgggccaccaggccacccagagctgccccctacccatccccacagcacagtgacagggtcggggacacccccaggaggcacccctctgcactggtgaagagcagagcctgtggcgcacgggctggcggagggggtgctggacatgcccgggctctgggtcccaggagtggccaaggacagcccgacctgcaggccccagtgggctctgggacccccaaatggacccccttgtcaccatgagtctttgtttgatgcactgaaagctaacaggccgagtgtggtttctgcatcttcttgggggagtgtctttttccccccgatacggagttcctcttaacccgtcagcggttttgccttaatttcggtttcgtctgatatggctatttctgcacatttttgggggggtattgtccaatattcccccttactgttttttttttttttcgagacggagtcttgctctgtcacccaggctggagtgcagtggcgcgatctcgactcactgctacctccgcctccagggttcaagcaattctcctgcctcagcctcctgagtagctgggactacaggcgcccgccaccatgcccagctaatttttacatttttattagagacagggttttcaccacattggccaggctggtctcgaactcctgacctcagggaatccgcccgccttggcctcccagagtgttgggattacaggcatgagccacggcgcctggtccttcctactattttatttctttttttttttttttttggagacagagtcttgccctgtcacccaggctggagttccgtggcgtgatctcagctcactacaacctccacctcccaggttgaagcgattctcctgcctcagcctcccgagtagctgggactatgcgcgcctgccaccatacccggctaattttttgtatttttagtagagacggggtttcactgtgttagccaggatggtctcgatctcctgacctcgtgatccgcccgccttggcctcccaaagtgctaggattacaggtgtagccaccttgccctgccagccattctgtttttgtctccacatggtcttgttggaagatttcctatccttggtttgagcccagctacacattaactctctgggtttgtctgtctgcgtcggaggaggggagggcagtgtccttgagtctactcagccaattgtccatgcatctttggggaccgtcctggtcccgagcctgccatccgaaagagggtgcaaagctgccgctggtgccaccagggaggtctgaggacgtattctggcacccagccacatttacagagcacctgctgtgtacaggggggactctttgtcaaggccctgctgtctccgggccagctgcctcctggggctgcacggtctggaaggacctccccaggcaggtggcatttgaattgagaaataaatgagacagccatgaggctctgcagaagcagcagcttgtgccgaggccctggggcacgctcaggagatctaggaacagaaaggaagcacggcagctggaggagggggccggagagccgggaggccagggcgggcagtgcagggcgtccagtctggctctaactcttcgggccaggagcccctggagggtttcagcaggaggccagactagagcccaggtctcctggctcccagctgggtgccctcagtccgtctacttcctgtagggagtgcggggcaggcagggtgagtctcacggggcagctctggggagagctgtctgaactgacccaccgacttcttggccgctgactcgaagcaggcggtcactttcctgggcacaggacaggctgcagggccccgtcctccagccctcccaccctgaggtctctgctcccactccagctgccacgcaccctccagacaacagggagggcgctcagagccccaggggagtggtggcggcgggcccctcctcctcaccctcagcccccaggcccttcccaggcactcctcccccggtgcaggtccttcctggagctgctgcagtggtgcctctgccctcagacctcgcctgagcccagcctcacccgtgctgggccagacactccctggccctggtcccgagagggtccatttccaaatggagtccgctgccctcaccagaacctctgagcaaatgcacaggagggtgactgggggctgtgccatcccaccccaagagcaaagtgcct

SEQ ID NO: 94340 - DNA, 10513 bp, Homo sapiens
  misc_feature (1)...(10513): n = A,T,C or G
gattctgggaaagttctgcaatgtacaagggatcactgtatatctgtcccttcaactatacaatgggtgcagtggcaggattactatgatgcaattactatagaattccgagtctacctgaaggtttacagcttccaaaaaaagatttgtaaagtaaataaaaattaaattttatcaattttgtagcacagatcaacagcagctacttattctttaataaccaccactgtgggatgctgccttgcaaatatttctggagcagcttacaagagccatggcaaacaaaaaggaccctgtcctccaaatctcaggaggactcatttgccgattgctgcttctgcttatggaggtcccgacagaggtgaatagtcattattatattccccaaatattatgcaggctctttgtccctctgtgcaaccaactttcaatagatttaaaaagtgaaaatattttttcctgattgttcttctttttctcttaagacatttgtagactaaaacattcaaaattaatcatacacacacacacacacacacacacacacacacacatatatatgtaatgaattgtggttttaacgatatgtgcctcaaaacaatgtgcctcaaaagagacccaagacgaagctcagtacagctgatttacaggagagaaagagcctatataatgagtaaacaaaactctaccaaaccatagaagtagaaaatcttattttcaaagtcacagcactttaaaatttaaatgctctttttcagcaccagcaaaatcacaaaccacagagtgaaatagacaagtatggctcattttaataacaactacaaaataattatgaaaaaataagctttttttgacagcccaaatggcagccttactaaaatataatatttaaaattagctacataataagctaatagaatgaacaaaagaagcacaaacacttacggacaaaaattattaatcaaaagagtaaaattattttaaaacctaaaaaagtctagagataaaccacacagcgaagcagagaagtatggctcattttaagaagtaaaaaaaaattatggtctgaaactttttttagacagcccaaatggtggtcttacagaaacataatatttaaaattaagtttcagaataagctaatagaagaaacaaaagaactacaaaaaaaatatgaacaaaaattaataaaaaagtaaaattattttgaaacctaaaaaaatctagggataaaaagaaaaaaatattcactacagatatttaaaagcagacttgagctgggggaagaacaaactatcagcaaaccaaagaaagggtgttgacataattaagttaggacatgatagaaaaagtataaagcaatgggaataaagcctaaaatgccatggaacactatcaagcagccatattacgcatactggaagttcaaaggatgagaaaaagaatcaggaagactatttagaaacaataatgttaaagaatgtcaaaggcaacaaactccaagtaagagaaactcaaataaacaaactyaaattatatgataattaaactcttcaaaagaaagacagagaaaatcctgaaagcaacaaaagaagtggctagttatgttactggctagtaaccctcaaaaataatcagcagataycttatctgaaaactcagaggacagaaagcaatagattaacatattccaaatgatgtgagaaaaaacttttgaacagatatcttatgttcaaaacattgtcccttataagtgagggagaaattatgacatttccagataaaagctgggacattttaccagtagactatctttttaaaaaatgccttatgggatacttcatggtaaaatgaacagataataaggagcagtatgaatggatatatattaaggtaaagataaatatataagctattataaaacataaagaataacagtgtacacctccacaatgtgtttcccatgcaatttaaaacacaaatatatttaataaaaatactatcactaagttgcgtttttgacatacagtgcataaaggtatgattttgagaactcaataaggaaatcatgggggtgcagttatacagggttaagggatttgtgtgttattgaaagtcagctagtataactttaaaagtggaatacctttagaatattcaatgtaatcacagtatcaatgacaattaaaaaagaaaaagagtaacagacaggtagaaagctttctgtactacaccagagagtaagagatgtggatttagctactctcacttgaggctactaagccagctatcatgcaccatgagacaaagcccaagctgtcccaccagggcataattgtggagagcctaaagcccatagcatagctgctatttcaaacaattttcactacgtcagtggtgatgaaatagaataggctcatccatacgcagaacctggtaaagaactggaggcagaaagaagtggctatgtggagatgcaaatgaaacaaatttggcacagcaactacttcaatcctgtgtctttcttcctggctttccaggagtttgaggttgaaactattgttgacaaaagacgagacaaaaatggaaagacagaggccaggcacagtggctcatgcctgtaatcccagcactttgcaaggctgaggcgggcagattacgagttcaggagatggagaccattctggctaatacagtgaaaacctctttctactaaaaatcataaagttagccaggcgtggtggcaggcccctctaatctcagctacccgggaggctgaggcaggagaatcgcatgaacccaggaggtggaggttgcagtgagccgagattgtgcaattgtgccactgtactcctgcctgggtgatagctcaagactttgtctaaaaaaaaaaacaaaacaaaacaacaacaacaacaacaaaaatttttggtgttgcaaaggttaagaagaaacggtatgacacttgggaaccagagcagcaccggtcaaaaatatatatattactttaacagatgacagactgaaaaacagaaaaagtaaaaaagtggcatggaccagaacaactagaactttttcaaacaataccagaagatgaacttctacatctaccaagcccaacttttctaagaatactcctaaaacgctagtgtctggccaacaccacaaattcaaaagcagccagttatgttctgccagccagaatgttagcagtaatccagggtcacctctgtccgacccaaagaatatggagctactgtgttcaactatcaagaaagacacttgccccttacaacccttttaacaacaagaacacagtgagtggcattcaggaactctagaatctggaccctattgcagcagatcagcaggatacagtggtcttcaaggaggaggaagggaagatcatcagggctttatcagatcccagggcaggacattgtggaatagagagcaagacccagattcacccactattttctcagaggtctggctcagttacggcttccatggctgcagactcagctaccaaaaaaggtatagtggtattaatgggccaatcggcagccaatggaaaaacagatgtgcatacattagttgcaagagtgaaagttgggcaaagaaatgttactgacggtggcagagaccagctttttatccagaagatgtacctcatcataggcctagcagaaagtgccagcacatacagagatattgcagtgaagaaagaggacagattcacccagatgtgcctataaactagatcaacataaaaaatgtactgaatatagaagtaattaaagcaatggttaatgctctgaatagggctgctgtgggtggcagcaagcttgtgctgttcagtgcagctggaagtgtcttttgctgtggtctcgatttggggtactttctgaagtatttaaggaaggacagaaacagaacaagccttgagatggtgaacaccatcaagaactttgtgaatactttcaatcaattttaaaagcctgtttttgtatcagtcagtggcccatccttcggaataggtgcatccacactgcctctttgtgatttcttctgagctaatgaaaagccttggtttcaaaccccttatatgacatctggacagagtccagatggctgttgtgttactttagttcctacttgaactttgcatcatccagcctccttaattattgtggccatgagacattacttcatcccttgattgatcccaggccaaggtctcaggccaagctgtcacttcagctccttcttggtccagggccaagttccaaggctgagccttgtagcttctacaaatcatcacttcagctccagatgaatccaaggccaagtttcagggccaagccaaatgacacctactccaagaacactaaccacatttctttacttctctgtccttagaaactgtaaagcacagcctcatagtaggtaaaccactcacattccacccccactgtgaagagttttttactttcacttataaaagttttgattcaacctttttgcatccatcctccttaattttcttggccatgagacaaagaactctgtgtgatatctcacaattagagatttctagatcgtagtgcactaatgagactgcaatgattgaagtctgggaattgagctctgggatgcatcagccttgcgagaccaactgacacactgtccccacactgtgatacacacccttcgggtcagtcaaccatatagtggtcaccaatggagtctgaaaaggggcaaggcagatttatacagcctagaaacctgagggacaccatcaagcagccatacatatgcattttggaagttccaaggaagagacaaaaactcatggatactatttaacaacatagtcataaagaatgcaacaatttaagacaataagtaagcacccaaggagctcaacagactccaagtaacaaaaactcaaagaaacaaactcaaacttacctgataattaaactgtctaaaataaatacaaagagaatcttgaggattttcaagggaagcaggggaagtagctagtcatgtaaaagggaccctaaaaataaccagtggatcgcttatctgaataaccaccgaaaagcagtagatttcttatctgaaaactgagatagaaagcagtagcctcatatattccaagtgatgtcagaaaaaactgtcaagcctaaacattatgatccaccaaactgtccatcaaaggtgagggacaaattatgacattcccatatacaaactggcaccttttacaagtagactaccctttaagaaatgtcttatggagtacttcagggtagaatggacagacactcaaaagcagtatgaacaagcaaagattaaggtaaagataaatacatgaacaaatatgtaagataaaaaatttggccgggcgcagtggctcacgcctgtaatcccagcattttgggaggctgaggtgcgtggatcacgaggtcaggagatcgagacaatcctggctaacacggtgaaaccccgtctctactaaaaatacaacaaaaaattcgccgggccaggtggcaggtgcctgtagtctcagctactcgggaggctgagacaggagaatggcgtgaatccgggaggcggagcttgtagtgagccaagatctcactactgcactccagcctcattgacagggcgagactccatctcaaaacaaaacaaaacaaaacaaaacaaaacgaacaattaacaatgtgcacctccacaatttgttctccacataacttaaaacacaaatatatttaataaaaaaactaccactaatttgtgtttttgacataaaatcaataaaggtataattttgagaactcagtaagtgaaataatggaggtacattatacaggagtaaaggctttgtatgttactgaaggtaagctagtgtaactttaaaaatgttataacattagaatgttccatataatcgtcatagcaaccacaattaaacaaagaaacacaaaagagtaacaggcaggaagaaagctttctgtactacaccagagggttggggctgtggatttagctactctcacctgaggctactgagcaagttgtcatgcaccaygagacaaagcccaagctgtcccaccaggcagtaagtatggagaggttcaggcacatggcatagctgctatttcgcacaattttcactacaccagtggtgacaaaatagaagaggttcatccatacacagaacctggtgaagagctggaggcagaaagaagtgtctatgtggagacgcaactgaaacaaaggtggcacagcaactgttccaatcccgtgtctttcctcatggcttcccaggagtttgaggttgaagctattgttgacaaaagacaggataaaaatgggaatacacagtatttggttcggtggaaaggttatgacaaacaggatgacacttgggaaccagagcagcacctcatgaactgtgaaaaatgtgtacatgattttaatagacgacagactgaaaaacagaaaaaactgacatggactacaaccagtagaattttttcaaacaatgccagaagaagaacttccagatctacaaaagcaaactattctaagaactctcctaaaacgccagtgactgataaacaccacaggtccaaaaaccgcaagttatttgctgccagcaagaacgttaggagaaaggcagcttcaaytctctccgacacaaagaatatggagataataaattcaactattgagacccttgcacctgacagcccctttgaccacaaaactgtgagtggctttcagaaacttgagaaactggaccctattgcagcagatcagcaggacacggtggtcttcaaggtgacagaagggaaactcctccgggaccctttgtcacrtcctggtgcagaacagactggaatacagaacaagactcagatrcacccactaatgtcgcagatgtctggctcagttactgcttctatggccacaggttcagctacccgaaagggtatagtggtattaatagacccattagcagccaatgggacaacagacatgcatacctcagttccaagagtgaaaggtgggcaaagaaatattactgatgacagnnnnnnnnnnnnnnnnnnnnnnnnnnnnnnnnnnnnnnnnnnnnnnnnnnnnnnnnnnnnnnnnnnnnnnnnnnnnnnnnnnnnnnnnnnnnnnnnnnnnnnnnnnnnnnnnnnnnnnnnnnnnnnnnnnnnnnnnnnnnnnnnnnnnnnnnnnnnnnnnnnnnnnnnnnnnnnnnnnnnnnnnnnnnnnnnnnnnnnnnnnnnnnnnnnnnnnnnnnnnnnnnnnnnnnnnnnnnnnnnnnnnnnnnnnnnnnnnnnnnnnnnnnnnnnnnnnnnnnnnnnnnnnnnnnnnnnnnnnnnnnnnnnnnngcgccaaaggcctggtctctcaggtatttttgactggaactttcacccaagaggttatgattcaaattaaggagcttgcctcatacaatgcaattgtactggaagaatgtaaggccctcgttcgctgtaatattaagttggagttggaacaggccaatgagagagagtgtgaggtgctgaggaagatctggagctcagcccaagggatagaatccatgttaaagtatgttgaaaataaaattgatgagttttaattgtcagtctgtctgctcaggacacaagaactaaggggcaacaaatgcatcatgagttgcaagatgccctaatccatcttcatagcccaaaacaatttcacccatagctaaggcttggaaacagaactgcaaatgtccaagctatgtatttaaattatcacatcatttttaagcactgtagctttacaaggagtaacaaaacagcctctttgcccaaatgtgattattttaggcacacctaagcccaaatataaaaacagactgttgggtactagactcttcttgcaagctctaatatgtatctatggctactactatatataagaccagagttgtgttttattagatgtttatgacagagaatcctgtaataatgttgattttttcttayttttatatcctagaatacctctrttgggatataaagcagccttagcttccctcccagaaagacacagaaygatcagagatggtgcccttgactttatagtggcacaaacacttcagagacacacaattataagagacttatcttttagcataaatacttatggcwcaaaatccactgacgatcattctcctaaactgaacacatgactagaattggtggtgagatatcgcttgattttcttttcctttataaatgtctagttcttacccagttaacaaaagaaaactttatcgctctaaagtaaaacttgttacaccacattagtgaattatggaatsattttggtggaaatatccaggttctaatgtgtggaatgtgcagatttaggttactttagtgtatgttctagttaataagttaaaattctggacacattattaaaggcagaaacttctttcaaarcaaacaccsctacactctgtatgacctttacaattatcagtgtctctttttatgagcacacaattttctagaacactgtatgtgctcagttatgcaaaagctctatgaatcctgtcttgttggtttttatcgaggctccattacataggcataattgaataatccactggccactggtgatgaatgtcatctttgtcacaagatctctagggtgtcacttcaccagccaagaacctctgtggatgatggcacctttgtgcaaggttcccttgagcctgcttttctaattttacaaacccatcttacaggctgcactcagctcaaactatgggcttaggtttcattttgctatggatgcaccaggcacagactggaggcagatgcatgagtgagtgttggttcagtccagccactgcacacagctttgcctgttatctgtgatgaggtaagcaggtcaggtgctggtacaggtgacagctccctgaaaacctttaggtgaatcaggcataccacaagctttctcttctgcaggcactgaagaatgcagtggcatccacaaaagaagaaatgccagagaatgcaaagacccaaggacgtcatcctagccctggcatgggaaaggtttagagctggggtatctaaagggccaatgtcctgctttctttttccttttttcttttttttttttcttatctatgggatcactatgacttaaattagggttttcaaagggctctgtctctctttctactggaaattagcatcttgtcttttcttcactctttctctctttgactgctttttatttactatgacatgctatagaagaaatgcatcttggcccagcatctttctgttgactgtagggctatttgtcagaagcagtaagattttggctcagcaataaggtaacatcttcccatttaagaccaaaaaaagggctagatattagaaaggctctatatatttattgatgtatcagaaaacttccccaggtcttactttatttgtttaaggtactgtaatgaaaaagaaacttgcactttactggcacctcattcattgggcatttcctataggggtagtaaggaacgtggagggttggatgtaaaaactggaaaagctgatgatgatgtgactaaaagattctctgcatcaagaagatgagaaaacctgtggtaacaaatgtggttttgagtgtttccagggagaatgtttctctgacgtttgggagttgtttcttgtgggcttttctgatatgactgctaagaaagcaggaacaattttacagtatttacaaagatgtgggtggtttcacagggcaaaaagccttgcacataggaaacttcaaacaatgtgcctttgactctcagaaactatctaggttttcaatagtattgacaaagaaaagctacatagttgtggtggattattggtaaaatttctgcaagcagagaaacagcctgaaatatcaggctgcagacacaaatttaagaatcctgcacaatcctgtggcacaagcaaataatttttttaaaaaagcccaactttttgtgtgtgtgtgcttaagacatgcccacagctactcagataaaaaaaaaaaaaaaaaaaaacaagaccccgcattaaaatgttgtgtcttttgtgtaaccagagtgcttccaggaaatagtctctctcttttttagaacttgtacatattggactccaatgtgttacaaagggtaccttatattactaaacatacttcagactccgagccaaatttctgtaaattatcatttaagactctggtcccaggccaaggtcctgggccatgctttccctttagctcttgtgtggctcagggccaagttcctgagccaagctgagtcattacatccgccattaatagttccaggcacaaggacccagaaaagatgagaagtgctttcttcaaaactagttagtaccttttcttccttctgagtccataaaaatatgag

SEQ ID NO: 94341 - DNA, 64548 bp, Homo sapiens
  misc_feature (1)...(64548): n = A,T,C or G
atacatttgtgtagagataaggtcttgttatgttgcccaggctggtctcaaactcctggtttcaagcgatcctctggcctcaacctcccaaagcgttgggattacaggcgtgagccactgcacctggcctatgtactattttgcaataacataataattcccaaactccgtgggtcacccccaaagaagcagctcaaaaatcaggactcctaaatgtttacccgagcccatcaatttcccaaacttgaaaatgtcaaaatagaaactgcaggtacagccgagcccagcaactctccccctagccagcccgtcccagcgtggagagaacactcttacctggtaggtccctttggccccctagggcyagcccactcttagtccactgaactagcccccagtaggcgcccagagcacacggcagccgggcttcctcccccagcagcaccaccaggtcctctggctgttgcaggaaatggggcgacgggcctaggagagttcggggcagcagggctgagcttagcaccttcaggggcctcctcattcaggacccaggagtcccagcccccagctcccttctcgctagtgaagaggcagcccgcaagcaactccccacccccaccccatattcctccgctcccctcgtgcggtacctgctctccctctgaagcagaagaggaggacgaggagggcggggacccgcatcctgagcattcgtcccccaaggttcacgagatttgccgtcgcactggccttcccgtcaacttcttcctctcaagcacgcctcctgtcaccctggcccggagcccccttcacgctcgactcttcgcccagcctagtctctggcctggagtcctccaagtctgctcatccgcagcctctgacgctctgaaacgcctgccagttccgcggcctgggtctctgggagaccccaagagggcccgatcccgctcgccccgcccgggtccgccccccgggagctccgccctcttcccgttgagaaactcccgcggctgagacgcggatgaatgggggacgcagggcgggatcccccggcgggtgggcgcccccagctcaattggggtctgggagccggaacacctgggttcgaggagggagggggtcccggctgggttggacacctgcgccctgccggggttgaggggcaggcaaggggtgaggaggagggaagggagagagtggaagaaacttgctcagcccaggtcctagagggactgcgctcagtggaaactgagctataaatgggagctcctggggcctcgccagtttccgcgccctgggggatgcggggtccggggctcccccgggcctgcgygtcgggaagagggcacrccgatacctgggggacagttgggacccctacctcgactcccccagcctcaaaacccctcctcaaaatatccctctgttcccttgttattgctgcaaactacagcacgtcctaagacccaggaatccaggccctcggcccctcctttcccaggaccccgcagtcccagcccaacccctctccccactcggccggccgggcccctcggcctggttgcccggcgacggctgggaggcggcggtgccgggccggggcaggcagggaggctgggaaccgcgcagcttgtcctgacggctccatgcagcccagctggggcgttcccacgctgcgcagctggccgagcaggtgggagggaccccgagcagcctgaaggagggctggggggctgggaccctgatctgacattcctggacctgtaagaactggagggtccacattcagattctccactgttcttaggctcagactccgtgtccctaaatgggggagtggggttgggagtgggggttggacttacagggttataagggactggtggttcaggcctttgctggctgagacgctgatggcctgatctcccggttccttgagaggctggagactcaaggtgcactcaagtgcatggtgcacttggaagagggtgacaggggtcagaatatctggtcttaagtcttaagagtcggtggatctatctgccaatctctccccacccccacacaggcccaggaggatttggaaatcagaccgtgaacatctgtcctaagtcctgtgtgtatgtgtgtgtgtgtgtgtgtgtgtgtgtgtgtgtgtgtgtgtgtgtgtgtgtgtgtgtatggggaggtgcaggggtgggtagtgtggccaggaggatcagaggcccaaattcccgagtccttggagagaagggactgagaccccagggtctgagaggggagggatctgggggcctacactcccggcttctgtgtggcttatctagtgcctggattttgaaataggatggacatggggctggaactcctragtcttagggaggaactcaagtcatggggctgtttttccaggcacttgaygccgcttccccttcctggctctctggggctacggacatggaaagatggagagcccaaggtcccaggagcatgcagaraaggaaaacarycaaggtggagggtggaaggtttgtgcttattaaaggccccagcaagggacagctccacgctctggcacctagggacaccatctggcgagggcccccaggacagagccactcccccagctcggcatccagcccatttcccagggggtgtagagagcagttgggagaggggaggtgggaggagggcaaggagtcaagcatgtgagggaagatggaagtccagcatcgaggatgaagctgggggctgaggccagatgcctcatcttgttcctgggaacgakattggcgggggtcttggggaggtagggagaaaactagcatttccaattcccgcaggagataagcaggcagaagaagcttatcccaggcaagtgtatgtgcacgcggggagggcaggcccaccagcatatggttataaaatccagggatgtgatgagcagagccactcggagatggagagacacataagagaaagaggcgtggtcagagtgtggctgagaacaaatatttatggagctcctggtgtgtgtgagacagactgtggggtgaggggagcgacagaggtgagaacagagacagagaaacagaataacagagacatatagagatggagagacacagtgaaataaagattgactgagatttaacaacttaatatagagagcgagagagtctcaaacagatggagaaagatagaaagataaatcagctgggcacaatgactcacgcctgcaatcccagcactttgggaggccgagtcaggctgatcacctgaggtcaggagttcgagaccagcctgatcaacatggagaaaccccgtctttactaaaaatacaaaaaattagccaggcgtggtggcgcatgcctgtaatcccagctactagggaggctgaggcaggagaatcgcctgaacccgggaggcagaggttgcagtgagccgagatcacactattacactccagtctgggcaacaagagtgaaactccatctcaaaaaaagaaaaaagagaaaaaagaaaaaaaagaaagataaatcaagggccaggtgcggtggctcatgcctgtaatcctagtactttgggaggccgagatgggaggattgcttgagcccaggagttccagacaagcctgggcaatatagcaagactctgtctctgcaaaaacatttaaaaaaaattagccaagtggcggggtgcagcggctcccacctgtaatcccagcactttggggggccaaggcaggtgggttacctgaggtcaggagttcgagacctgcctggccaacatggcgaaaccccgtctctactaaaaatacaaaaattagctgggtgtggtggtcaatgcctgtattcccagctactcaggaggctgaggcaggagaatcgcttggacctgggaggcggaggttacagtgagccaacatcgcaccattgcactccagcctgggtgacagagcaagactccctctcaaaaaaaaaaaaaaaaaaaaaaaaatagccagagtggtgatgcgggcctgtagtcccagctactcaggaggctgaggcagaaagaacacttgagcctaggaggtttgaggcttcaatgagccatgatcacaccactgcactccagcctgggcaatagagaaagaccctgtctctacaaacaaattttaaaaaattagctggagtggtggtgtgcacctgtagtcccagctattcaggaggctgaggcaggaggatcacytgagcccaggaagttgaggctgcaatgaaccaagatcatgccactgccctccagcctgggcaacagagcaagattccatctcaaaagaaagaaagataaatcaagatagatagagggagggagagagagagacatggagaaggaaagaagagatgggagagagggcaagaaaaagagggagaagaaagctcatgcagtccttgccaaagggcgcccactttgggctcacactgcacccacactgggggccggtggaattggactctgccttttactcccgcccacaccctgtgcactcccacgtaagacactgtcacacacacgctctccacatgcttattacagatcgcagttcactctaaccttccccactctcacacccacgtacacacatgcatatcttccctctctcccacactctcccagcctgtcacactcactcttgcatcctccccagcagagatccctgacatcatttaggcactgatgtctactaaaaaaggaagggaggccaggtgcggtggctcatgtctgtaatcccagcattttgggaggctgaggcagatggatcacctgaggtcaggagttcgagaccagcgtggccaacatgatgaaaccccgtctctagtaaaaatacaaaaattagccaggcatggtgctatatacctgtagcaccagctacttgggagacagaggtgggagaattacttgaacctgggaggttcaagccatgggaggtggaagttgcagtgagccgagatgccactgcactccagcctgagcaacagagcaagactatctcaagaaaagaaagaaagaaagaaagagacttgccaaggtcatgtatcagggcaaggaagagctgggggcccagctggctgctcccctgctgagctgggagaccaccttgatctgacttctcccatcttcccagcctaagccaggccctggggtcacggaggctggggaggcaccgaggaacgcgcctggcatgtgctgacaggggattttatgctccagctgggccagctgggaggagcctgctgggcagaggccagagctgggggctctggaaggtacctgggggaggttgcactgtgagaatgagctcaagctgggtcagagagcagggctgactctgccagtgcctgcatcagcctcatcgctctcctaggctcctggcctgctggactctgggctgcaggtccttcttgaaaggctgtgagtagtgagacaaggagcaggagtgaggggtggcaggagagaagatagagattgagagagagagagagagagagacagagagagaggaagagacagagacaaaaggagagagaacggcttagacaaggagagaaagatggaaagataaagagactgggcgcagtggctcacgcctgtaatcccaacacttggggaggccaaggtgggaggatggcttgaaggaaagagtctgagatcaacctggccaacatagtgagaccccgtctctaaaaaaaaaaaaaagaaaaaaaaaagaaaaaagaaaaaaaagtttttttaaagagacagagaaagagactcagagattgagactgagagcaagacagagagagatactcacagggaagaggggaagaggaaaacgagaaagggaggagagtaacggaaagagataaaaaagaaaagcaggtggcagagacacacagagagggacccagagaaagccagacagacgcaggtggctggcagcgggcgctgtgggggtcacagtagggggacctgtgatggccctggggacgacgctcagggcttctctcctgctcctggggctgctgactgaaggtgagtgggatcccagccttgtacccagcgccaagtggcccccatttcccacttaccttccctagacaaaccctctgccctttccttgcaccgcgctgtgtcstcaggcctggcgcagttggcgattcctgcctccgttccccggggcttctgggccctgcctgaaaacctgacggtggtggagggggcctcagtggagctgcgttgtggggtcagcacccctggcagtgcggtgcaatsggccaaagatgggctgctcctgggccccgaccccaggatcccaggcttcccgaggtaccgcctggaaggggaccctgctagaggtaagggatcagagcctgagaccctcagccaccagcggaagctgcggccctgacttccggctccccctgcaggtgaattccacctgcacatygaggcctgtgacctcagcgatgacgcggagtatgagtgccaggtcggccgctctragatggggcccgagctcgtgtctcccagagtgatcctctccatcctgggtatgggtgagagacgcccaggacccatgagtctgggcttcaagccctcccctaccccgcracccggaagtccaagcccccagcctctcctctcccagactctgggyaccraactccaatcttcaagtccttctcagtgctggaagcttaccccagacccttctctcaccagttcctcccaagctgctcctgctgaccccagaggcaggcaccatggtcacctgggtagctgggcaggagtasgtggtcaactgtgtgtctggggacgcgaagccagcacctgacawcaccawtctcctgagtgagtgtgggtgaactgggtggcagggggcagcatgaagcctctggagtgggaagggtgtgtgttcctgaccagtacccttctaagggccccagaaaagatgtcatccctgggatggggacccaggagaaggtgtggggagatgctgaggccagtgtgggacccagtggatgcgagggcacatcgagggcggcagcaaccagcacaaggctgaggcccagatagaaatatgggcagtagcgctggtgcagacatgagaagctgagggatagggtgcatggtacaacccagcaaggagttgagaagagcggggaggcccaggacccagcactgaagactgcggcattcaggcagtccagaaagtcgggaggggatgcagctctgccccaggcccttttcctctagaacgaggagggagggggcatcgcacccaccctgaggacttccaggccatgctccccagaatctatcttgcggggagcctggaacccctctagccctcttgctgccccaaggtggayagacaatatctgacatctctgcaaacgtgaacgagggctcccagcagaaactcttcactgtggargccacagccaggtgtggaaactgaaacaaccccccaaccttgacccctaattttccccatgggaaccccagaccccagggatgcaagcatgaagcttgggctaggtatgaacatctgggacccaattcttcatcctgactctcaaagcttcttcatggggaacagaggtggtggctcatgcctgtaatcccagcactttgggaggctgaggtgggcggatcacctgaggtcaggagttcaagatcagctgggtcaacatggtgaaaccctgttttcactaaaaatacaaaaattagccgggtgtggtggcgcatgcctgtactcccagctcctcagggggctgaggcaggagaatcacttgaacccaagaagtggaggttgcagtgagctgagattgtaccactgcactccagcctgggygatagagccagattctgtctcaaaagacaaacaaacaaataaacaaacaaaaaaacttcatgggaacctcagttctagagtcccaagcactaaagttttggtcagatgtggggctctctaggctccaattctcactgttcacccccaaaatctctcccatggaaccctggatcccagaggagatcagcatggggacttagaccaggtgtggggaccagaggtgacatccccacctcttctbcctgactccccaaatttcagatgatgactctgactctataaccctgacttctcatcccagggtgacaccccggagctcagataataggcagttgctgstctgtgaggcgtctagcccagcactggaggcccccatcaaggcctmattcrccgtgaatgttctgtgtaagtggagaactgggccaactagggcgctgaggatggggagcaggcactggggggtgtggggggatcacagggattatggaaattcaggcactcagagaaacatgggggttcaaaggcaggttgtggggcctggaaagagtggatgggctactccaggcccactgagtgactgatatcccccagtccctccaggaccccctgtcatcgagtggccaggcctggatgaggggcacgtgcgggcaggacagagcttggagctgcsgtgcgtggcccgagggggtaatcccttagccacactgcagtggctgaaggtgagggcaaacgcgggcatggggawtggggggacagtggggtctgggagccagtcctgagctggcccaggcctgtccctgtctccagaatggccagccggtgtccacagcgtggggcacagagcacacccaggcggtggcccgcagtgtgctggtgatgaccgtgaggccagaagaccatggagcgcagctcagctgcgaggcccacaacagcgtgtctgcagggacccaggagcacggcatcacactgcaggtcacctgtgagtcctggtgccagctgcccccctgtcrgtctgtgcctcagagaaccatctgtgtgtgcccccarattatgcctactggatgccaaagatctcagcatctgtctccagtcctgttctgtctgggctggtctgtgagaaatccagcccagcttagtgtcttccttctctgtccctgcagttccccctagtgccattattatcttgggatctgcatcccagactgagaacaagaacgtgacactctcctgtgtcagcaagtccmgtygcyygcgggttctgctacgatggtggstgggctggcggcagctgctgcccatggaggagacagtcatggatgtgaggcgggggccaggctcctgggtctgagcatggagggggctgagggcatgactcgtggatagggaaggggtgggtccagcagcctggggggctttctccttgaggaccatgggtccaacagagggggaggtagagatgtctcctgtgtccytgctggggactgggatggactcaggcctctagcacgatggataggggtgctgcagtccccacgtctgaagctcactccctgccagggacygcatggcggtcacatctccatgtccaacctgacattcctggcgcggcrggaggacaacggtctgaccctcacatktgaggccttcagtgaagccttcaccaaggagaccttcaagaagtcgctcatcctgaacgtaaaatgtgagcccctgccctggcccagcaatgcccccaagcctcaggacccagcacagagaaaaagtcattcttccttcctctccccgccagatccygcccagaaactgtggattgagggtcccccagagggccagaagctccgggctgggacccrggtgaggctggtgtrtttggctatcgggggcaacccagagccctccctcatgtggtacaaggttggtgccacgccagggytatgggggtggccaggaatgtgggggaaggaccaggccccttctctccttcagaatcttgggcaatcttggaaaaagattaaatttcttgaaaagtactaaagattctgaggtttggcagggaatcaggaaagacacaaatgctatgagaattaaatggaatcctaggaaaattctggggaaacagtgagaattttaggataaaaattggaattctgaatcaagattaggcattctagagaaaaggtaatttcattaaaattaaagaaaattctagtgaaaaccctcagaattcaggtgaaatgtcaggaattttagggaaagacttgaatcccagaaaaaaaaaaaaaacaatgctgtaaaatttggctgggcacagtggctcacgcctgtaatccaagcactttaggaggccgaggtagacggatcacctgaagtcgggagttagagaccagcctgaccaacatggagaaaccctgtctctactaaaaatacaaaaaattagctgggcatggtggcgggggcctgtaatcccagctactggagaggctgaggctggagaattgcttgaatccgggaggcccaggttgtggtgagccgaggttgtgccactgcactccagtctgggcaacgagaccgaaactccgtctcaaaaaaaaaaaaaaaaaaaaaaaaaaaaggctgggcacagtggctcacgcctgtaatcccagcactttgggaggctgaggcgggcggatcacgaggtsaggagatcgagaccatcctggctaacacggtgaaactccgtctctactaaaaatacaaaaaattagccaggcgtggtggcaggtgcctgtagtcccagctactcgggaggctgaggcaggagaatggcgtgaacccgggaggcggagcttgcagtgagccgagatcgtgccactgcactccagcctgggtgacagagggagactccgtctcaaaaaaaaagaaaagaaaagaaaagaaaatttggagaaaagctagtaattccacagactatcggaaattcattagtattaaactgaactcttgggatttggaggcaagaaaatgaaatttcattaaaatgaaagagaagcctaatagaattctaggagaatcctgggaattagggagctagttgaaaactttggggggaagactagaaattatagaaatgacaatggaattttattttaattggatggaattctggggaagtgctgagaatctgggcaatacaaaggaatctgttaaaagactgggatcataagatattataatatcgggaaagattcagaaatctatggaaagtttaatttgtgcagcagcaataataaaaaaaggaagtaatctatggaaagacactggaattaaggaaaatttcaaaggaaatctttggggacagcaggaattttaagaaaaggaactgaggaactctgggaaaggcctgggaatttcaagggagtttcctgcaggtggtgttgggtaaacacagcagaaatagattttgaggagtgcgctgagagcctgcaggtggctgcagaggcagagcaggagttgggtgtgggacagaaggcggattcagatccccaaaactgccatgcacagggactcggggaggcgggagagactccagggagggggtcactcagttccactccccactgctttgccctaggggggtggtgctgatgagagtgcttctccttatcagaaaaaggctttgtttgggctggcggcaccaacccagtgggcagggtaggggggttgggggttggtggaagcggcagggctgcctgcgaaccccagtcactcccggcccgtaggactcgcgcaccgtgaccgagtcgcggctgccgcaggagtcgcggcgcgtgcatctcggcagcgtggagaaatctgggagcaccttctcccgagagctggtgctggtcacagggccgtcggacaaccaggccaagttcacgtkcaaggctggacagctcagcgcgtccacgcagctggcggtgcagtgtgagggctcgcactgctgaggcccgggggcggggcgggagggacagagccaggtggggcagggacccagcgaaccctggacccggggaaagcgggcggaggcggggtgggggacccgagactgggcggagcctggggtgcaggcggggtggacgcagaccaggccgcccctaacctctgagtctcgctcctccaaccccgtctcccagttcccccaactaacgtgacgatcctggccaacgcatccgcactgygcccgggagacgccttaaacttgacatgmgtcagcgtcagcagcaatccgccggtcaacttgtcctgggacaaggaaggggagaggtgggagtgcgagggatccctcccctctctggtctggcctcgccccctccacgcatgtcccgcccccgcctagtgcctctccagcctctggctccgctcgcagccctggcttgaccccggttccacaggctggagggcgtggccgccccaccccggagagccccattcaaaggctccgccgccgccaggagcgtccttcwgcaagtgtcatcccgcgatcatggccagcgcgtgacctkccgcgcccacagcgccgagctccgcgaaaccgtgagctcyttctatcgcctcaacgtacygtgtatgtgccycrgcctgaaagcccctctcgatgccttcttgaccctaaactactccttgggtcttacctttttttccttctttttctcttctctctctctctctctttcattttttgtcgctcaggctgcaatgcagtgacgcaatcataggtcactgcagtctccaactcctgagctcaagtgatactcccacctcagcctcccgagtagctgagactacaggtgtgcgctaccacgcttcgctagtttatttttactttttgtagcaacggggtctcactatgttgcccaggctggtcttgaacccctgggctcaagcagttctcctgcgttggcctctcaaagtgctgggattacaggcgcgtgccactatgctaggctgattttttgtacttttaattttaaatagagatggcattactctatgttgcccgggccgatcttgaacaccttgactcaagtgatcctcctgccttggcctcccaaagtgctgggattataggcgtgagccactgcacctggcctgggtctttgctttgacactatcactctatcattaaccccatcctgaaacttgaaactcccgaccttcatcctgacccgtggtcctgggccaactcctatcctgcctcctcccatcttgcatttgtcctctctcctaacccccctcatgactcctgtttccatccttcaaactgaccctggcttctgctcttttcctaaactgtattctaacttctatcccgaaccttacccctgagcttagctctgaacttgttaccttgtccacaaccttaaaccccgtcgtgaccccaactttaacccttgaacctgtgcctgatctccaatctgtccttgaccctaaccttaacaacaatcttgactccctgcggcgccccctctgaagaccgtccagagttcctgggggagcaggtgctggtggtgaccgcggtggagcagggcgaggcgttgctgcccgtgtccgtgtccgctaaccccgcccccgaggccttcaactggaccttccgcggctatcgcctcagtccaggtgagggaagtggtcatggggaggggtcccggggatgggaggtcctgccaggtcccttattctggccttccccagcgggcggcccccggcatcgcatcctgtccagcggggctctgcatctgtggaatgtgacccgcgcggacgacggcctctatcagctgcactgccagaactstgagggcaccgcggaagcgcggctgcggctggacgtgcactgtgagccccgcccaccatggaaaccacacccacccaaggaaccttgcccattgtggagtctcctcattgtgggagctccgcccacccagggatagccacccatcctggaaccctcccgttctggaagtcccagccgcggtgtaaccacgcccactgcggaacccctcccactagagagacccagtgtggaatctctgcccagagagggtgcccgcctagacacggaagctgctcccgtcaggaatgagagcccactgtataagccctgctacacacacaattctggaagcccactcaactcactctaattatcacagaggcatagtggagggtggagacaacctcaccaaccttgagaactctcctccaaccctttggtattaagggcagattgtgtccacayccataacyttcctggaacccctaagacatccctcccacctggggccctctcacacccagacctgtctgggcccaagtgtcttccccaagcctctgccttccaccagatgytcccacyatcygtgccctccaggaccccactgaggtgaacgtcgggggttctgtggacatagtctgcactgtygatgccaatcccatcctcccgggcatgttcaactgggagagactggtgaggatccagcctttggtgaatagaggtggggtcaaggggttgtggtttcttgactgtgagttccttgggagtggggaccacatacatctgtatgacccttataactatatactcgccagggcatgctcccagaatgaataactgttggtggcaaaatgaatgcatggataaatggctagacagccaggcgagtgggtaggtagatggatagataggtcaaaaggtaggtaagtggatgaacaggtggatgaatgagtgagtggatggaggaacagatggacaagtgaaaggatggataaatgggtgagtggatgggtgggaagatgattgaaggagaaaaatcagtggatagagggtagatgatggacggatacaccatcagaggaaagatatctatggaaggatgatggatgaattgatgaatggatgggtgggtagatcaatggaaagatgaataaataggtagctgggtaaatgtctgaacagatgcatgtatttatgggtgtgcaagcgtgagtgaatagttgagtgaatgggtggagagctacaggggtggatacatgggtgcagagaaggaagacaaatgggtggaggaatgagtgagtgaaccgatgagtggatggaaagataaatggatgaatggagagataagcagatggataaatgaatggatggacggatagatggttccaagcataagtggttgggtgaatggatgggtaggtggttgcctggattggtggatgaaaagatggattgagtaaatggatagatggatgacaggagaatttttttttcttcaatacctctgtggagggtgattgtggctaggagaatgaggctacagaagggacaatttgggcagtgatggatctggggctagactgggaggccaattctggactcttgggcctccagggagaagatgaggaggaccagagcctggatgacatggagaagatatccaggggaccaacggggcgcctgysgattcaccatgmcaaactggcccaggctggcgcttaccagtgcattgtggwcaatggggtggcgcctccagcacgacggctgctcygtcttgttktcagatgtgggtattacccaaacacctgacttcaagacctgccactgaacccacagccctcatgtctcccacatagctcatgttgactgcccatcccctcccagttgccccccaggtggagcaccccactcccctaactaaggtggctgcagctggagacagcaccagttctgccaccctccactgccgtgcccgaggtgtccccaacatcgttttcacttggacaaaaaacggggtccctctggatctccaagatcccaggtgagcccaagcccagccaggcagcactccagccccaggtctggacctccagccccacttcccctccctgagtccctgcagagaaggaagacgaatgggtggaggaatgagtgagtgaatggttgagtggatgaaaagataaatggatgaatggatagataggcagacggttacattaatggatggatgcatagatgattccaagcataagtggttgggtgaatggaagggtgagtggtgccctaccttctctctaggtacacggagcacacataccaccagggtggtgtccacagcagcctcctgaccattgccaacgtgtctgccgcccaggattacgccctcttcacatgtacagccaccaacgcccttggctcggaccaaaccaacattcaacttgtcagcatcagtatggaggggctgtgagggtgttggggagggggtgctccctggatccattcccacatccctgattggccctgggctgcccatgtttctgaaaccggaagttctgtgtatgtgtgaggatggagtttttgcctgccctgaaaatcctaatggagactggatcttcaggaagacccacaacaaaggcaaaagaaaaagaaaagaacagaaaaaagatggagagggggtacttgttagctcaagtaactgaaaaatagattttcaggggtttctggatctaggttcagctgccatcagcaactctccattctttttgttgttgttgttgttgttgttgttgttgaaatggagattcactcttgtcacccaggctggagtgcgatggcgcgatcttggctcactgcaacctctgcctcctggattcaagcaattctctcatctcagcctcccgagtagctgagattacaggcgcccgccaccacacccagctaatttttgtatttctagtagagacggggtttcaccatgttggccaggctggtctcctgacctcaggtgatctgcccgcctcagcctcccaaagtggtgggattacaggtgtgatgaccagccctcttcattcttacgtctgcatgtctctgtgttggctttattctaagggccctcacagtggtctgttagaattcccagaggaaacagaattctttctcttcctaacagtagtatgaaaataccaggattagtcaggcgtggtggctcatgcctgtaatcccagcactttgggaggctgaggcgggcagatcacaaggtcagcctgaccaatatggtgaaaccccatctctacttaaaaaaaaaaaaaaaaagccgggcgtgatggcatgcgcttgtaatcccagttactcgggaggctgaggcagaagaattgtttgaacccaggaggtggaggttgcagtgagctgagttcgcgccaccgcactccagcctgggcgacagagcaagactctgtctcaaaaaaaaaaaaaaaaatcatgtattgattgcttgacgcaaatgctatgatgagacgtttaaagaaacctaactgccgggtgcagtggctcacacctgtaatcccagcactttgggaggccgaggcgggtggatcacgaggtcaggagatcgagaccatcctggctaacatagtgaaaacccgtctgtactaaaaatacagaaaattagccgggcatggtggcgggcacctgtagtcccagctactcgggaggctgaggcaggagaatggcgtgaacccaggaggcagagcttgcaatgagtcaagatcgcaccactgcactccagcctgggtgacacagcgagactccatctcaaaaaagaaaaaaaggaaaagaaaaaaaaaagaaaagaaacctaaccatgccaggcgcggtggctcatgcctgtaatcccagcattttgggaggccaaggcgggtggatcacctgaggtcaggagttcgagacaagcctggccaacatagtgaaaccccatctctactaaaaatatgaaaaattagctgggcatggtggcgggcacctgtaatccagctactcgggaggctgaggcaggagaattgcttgaacccaggaggtggaggttgcagtgagccaagattgcaccactacactccagcctgggcaataagagtgaaactccatctaaaaaaaaagaaaaaaaaaaaaagaaagaaacttaacccttcattttccatagaagtaaccatttggtcttgaatttttttgctgtttcttttggttttgttttcacttacttctttttaaaattattttttattttaatgtttaatttgagacagggtcttgctatgttgcccaggctggtctcgaactcctgggctcaagcatctttcagacttggtctcacaaagtactgggattacagggacagtttggtgtttgccagagcagtgttcaccatgaccttacagaacatgagtatgctatgaacaatgagaagcgattgtatatttaaaatcattcctagggaaaacctggacagaatcttctggaattcttttgtatcctctgactgctttcccatctttctccccataggccgccctgaccctccatcaggattaaaggttgtgagtctgaccccacactccgtggggctggagtggaagcctggctttgatgggggcctgccacagaggttctgcatcaggtgggtccttgtcgaggcaggagsgaagggaatgggctagggcacttccctgaatttactatccccctgtcctgcaggtatgaggccctggggactccagggttccactatgtggatgtcstaccaccccaggccaccaccttcacgctgactggtctacagccttctacaagatacagggtctggctgctggccagtaatgccttgggggacagtggactggctgacaaagggacccagcttcccatcactaccccaggtgggaagggaggcttgggcaggttggagtattcctcagaggatgtgtagggtagtatggtgaagtcaatactattccccttttatgatgagttactgaggcctatagctgttaagcaaattgtccaaggtcacacaactagtaaaagataaagatgagattgaaactcaggcagatgaacttgagaccaaccgttaaccacaacccatactatctgaatgtgattaatgaccaagggaaattagaaaatagtttgaattaaatgaaaatgaaaacatataaaaatttgaggttgcagttaaagcagtacttagagggaaatttatagcattaagtgcttattttagttttttattttatttaattatttaatttttttttatttttttgagatggagtttcactcttgttgcccaggctggagtgcaatggtgtgatcttggctcactgcaaccttcatctcctgggttcaagcaattctcttgactcagtcttctgagtaactgggattacaggcatgtgccaccacccccagctaattttgtattcttaatagagacggggtttcaccatgttggtcaggctggtctcgaacacctgaccttgtgatccactcaccttggcctcccaaagtgctagaatcataggcctgagccaccatgcgcggccttattttttatttttgagatggagtctcactctgccacccaggctggagtgcagtggcatgatcttggctcactacaacctccgcctcccgggttcaagcgattctcctgcctcagcctcctaagtagctgggattacaggcaagtgccaccatgcccagctaattttagtatttttagtagagacggggtttcgccatgttggccaggctggtcttgaactcctgacctcaggtgatccacctgccttggcctcccaaaatgctgagattacaggtgtgagccaccacgcttggccactttttgtttgtttgtttttgttctgagacgcagttttgttcttgttgcccagggtggagtgcaatggtgccgtctcggctcactgcaacccccgcctcctgggtttgagcaattttcctgcctcagcctcccaagtagctgggattacaggcatgcacctgtaattttttgtattttttagtagagacagggtttcaccatgttgtccaggctgatctcgaactcctgacctcaggtgatccaccagcttcggtctcccaaagtgttgggattacaggtgtgagccaccacgactggactagttttcgttttttttttttttttttttttaagagaataacctcaaatgcatattctaagttttcatcttaagaaactgtggctcatgcctgtaatcccagcactttgagaggccaaggcgggtgtattacttgaggtcgggagtttgagaccagcctgaccaacatggaaaaaccctgtctctactgaaaatacaaaattagccgggtgtggtggcacatgcctgtaatcccagttacttgggaggctgaggcaagagaatcacttgaacctgggaggcagaggttgcagtgagcagagatggtgccattgtactccagcctgggcaacaagagcaaaactccatctaaagaaagaaagagagagagagagagagagagaaagaaagaagctaataaaagacgaacaaattaaacccaaagtaaacagaaagaagaaaataataatggtaagagcagaaatgaatgaattagaaaacagaaaaacaattgagaaaatcaatgaaaccagaagctggttatttgaaaaaaatcaataacatttataaatctgattaagacaaataaaagggagaaaatacaagttaccaataacaggaatggaagaagggatgttaccacagactccacagacattaagaggataattagggaatattatggataactttattccaataaattcagcaagttggatgagaaggacaaattccttgaatatgatgaatatgttacaattctgataggcacagtattgtagtggtaaatccttcagagcctggtccagagaagcttgggttcaaatcccctctctgctacctcttagttgtgtgaccataggcaagtgtctcagtttctaaaaatatatagcacagatctttgtggctcagtttatttttctttctttctttctttctttctttctttctttctttctttcttttcttttcttttctttctttttttttttttttgcaatggaatcttgctctgtcactcaggctggagtacagtggcatgatctcggctcactgcaacctctgcctcccaggttcaagcaattctcctgccttagccttccaagtagctgggattacaggtgcataccaccacgcctggctaatttttgtattttttagtagagacagggtttcaccatgttggccaggctggtctcaaagtcctaacctcaggtgatccacctgcctcagtctctcaaagtgctgggattacagacgtgtgccaccactcctggccgcaagcttctcctttctgttttcctcttcctgacagagcaggctttttctcaatggaagtaaggacactttttcacccctacaatcttctctgctcttccccccaccccactccagtcttccctttgaacactaaaacataaagtatgacacttgcctcctttgctttagaacttgtacctttattaagggatcgagagcccaaagtcttttttggttaactcaacaaattgataattcgggtgaaaaggaccttgcacaccgaaagtgctcatcaacagttaatttttgggccaggcatggtgatgcatgcctgtagtcccagctaatcaggagtctgaggcgggaggatagcttgaacccaggaggtcgaggctgcagtgagctatgatcataccactgcactccagcctgagcgacagagtgagaccctgtctctttaaaaaaaaaaaaatggccaggcgcagtggctcacgcctgtaatcccagcactctggaaggccgaggtgggcgaatcacgaggtcaggagttcgagactagcctggccaacatggtgaaaccccatctctactaaaaatacaaaaaattagccaggcatagtggcaggtgcctgtagtcccagctacttgggaggctgaggcatgagaattgcttgaacccgggaggcagaggtttcagtgagctgagattgcgccactgcactccagcctgggcaatagagagaggttcagtctcaaaaaacaaattattcttagcattagcgttaccattagaattgctattaatagtattgtcattattatcagcaatttctagctctctttgaaatattcttaagcagtcatataccagttcccatgaatctaataggcttaagaagaggctgagaaatatttaaagcttatctcagattcttagtgttaagtcacaatctgtatatccaccccccaggtctccaccagccttctggagaacctgaagaccagctgcccacagagccaccttcaggcaagtcctcagtcccctgatccctcccggctcccctgagaatggaacctcctggtctctgnnnnnnnnnnnnnnnnnnnngctggagtacagtggtacaatctcagctcaccgcaacctccgcctcccaggttcaagcaattctcctgccttagccttccaaatagctgggattacaggtgtgagcctcaagtaaaaaagtgtccttacttgaggtcaggagtttgacaccagcctggtgaacatggtgaaacctcgtctctactaaaaatacaaaaattagacgggtgtggtggctcacgtctgtaatcccagctactcaggaggctgaagcatgagaattgcttgaacccgggaggcagaggtttcagtgagctgagattgcgccactgcactccagcctgggcaatagagagaggttcagtctcaaaaaacaaattattcttagcattagcgttaccattagaattgctattaatagtattgtcattattatcagcaatttctagctctctttgaaatattcttaagcagtcatataccagttcccatgaatctaataggcttaagaagaggctgagaaatatttaaagcttatctcagattcttagtgttaagtcacaatctgtatatccaccccccaggtctccaccagccttytggagaacctgaagaccagctgcccacagagccaccttcaggcaagtcctcagtcccctgatccctcccggctcccctgagaatggaacctcctggtctctgaccctacctcctctgcttgtagtcacagctgcttaacgacttagttctggccaagctcagtcgctcacgcctgtaatcccaacactttgggaggccaaggcatgtgatcacttgagcccaggagtttgagaccagcttgggcaacatagcaagactccatctttgcaaaaataaaaaatagctgggtgtagtggcatgtgcctgtagtcccaactactcagaaggctgaggtgggaggattgcataagcccaggagttggaggatgcagtgagctatgactgagccactgcactccagccttggcaacagagggagaccctatctcaaaaaaaaaaaaaaaaaaaaaaaagacttagttctgtccctgcagaattgcagacttgcagactccttagagcttcctcttttttctttctttctttcttttttttttttttttttttgagacagagtctcattctgttgcccaggctggagtgaagtggcaaaatcttggctcactgcaacctccacctcccaggttcaagcgattcttttgccttagcctcccgagttgctgggattacaggcacctgccaccacacctggctaattgttgtacttttttagtagggacggggtttcaccatgttggccaggctggtctcgaactcccgacctcaagtgatctgcctgcctcagcttcccaaagtgctgggataacaggcatgagctacggcactcggcattttttttttttatttttttattttttgagatggattcttgctctgtttgttgcccaggctggagtgcagtggtgcgatctcggctgactgctatctccacctcccggcttcctctcctgcctcagcctcccgagtagctgggactacaggcacgtgccaacacgcccagctaattttttgtatttttagtagagatgaggtttcaccgcgttagccaggatggtctttaactcctgacctcatgattcacccacctcagcctcccaaagtgctgggattacaggcgtgagccactgcatctggccaattttttttttcttagatcttcctcttgcctggagtgataaattttcttctcttccaaatttagtttaattccgtaagaattagctcactccatgtcctgtaagaagcctgcatcagttagcttttgctgtataatgaaccaccccaaacatgggtgcttatagcaacattcttcctcatgattctgagtctggcggaacagtgctggtctgggctggcttaaatcatctctgcagtcagctggcagctccactggactgggtggtctagggttgcccccttcccacacttctgatagtcatctggctcttggttggaacaatggagataactgggcgcgtgtctcttcttgactttttcacatggaggtggtcacgggggtcaaaagcagcaatttactagctgattccgtcatagttgtgtctcattggccaaagcaagtcacatggctcaacacagagtcagtgtggaaaggccccgcactcaaggatgtgactactgggagatgattgcaaccatttggcaaaaaaatccccttcagagcccgagaaaaaggttgcaagtgacagaaatgcagctgttttgtcaacacgaaaaagaatggcttggctgggcacagtggctcatgcctataatcccggaactttgggaggctgaggcaggtagatcacttgagcccagacgttggagacaaacctgggcaacatggtgaaaccccatctctataaaacaaaaacaaaaaaaattagccaggcatggcagtgcatgcctgcagtcccagctactcaggaggctgatgcgggaggattgattgagcccaggaggttgagccttcaatgagccgagctcacgccactgcactgcagcctgggcaacagagtygagaccctgtctcaagaaaaaaaaraaaaagtcttggtrtatgaaataaaaaattccaagtgtggccactttcaggtgctcaaaaatctcaccagcgatctgtttctcaccctctctcaactttgccttcatctgtggtggcttctttctgagtttcttcaatcagaggggcagagaagccctcctccacctccatcttcttgacagctagtagaattgtcctaaatgttttgttaaaaacacacgttgggtcaaatgcctgtgtctaaacaatcactgtggagagaggaatggagactcttatyttccaggccgggccatgtgcccactgtggagtcctgcctgaacccaagactgagattggggagtggctgttctccccaggggaaaaaagtgctattagtagaagacaggggagattgcccgcccaacagatgcctacttagaggggttcagccttgtcctcagggatatagcagccaagtcagcctgatattggctgggatggaagttggtggaaagaagtcatttgaggctgggcacggtggctcgcrcctataatgccagcactttgggacgccaaggtgggcagaccacttgaagccaggagttcaagaacagcctgtccaacatggcgaaactccgtctctattaaaaatacaaaaaaaaaaaaattagccgggtgtggtggcatgcgcctgtaatcccagctacttgggaggctgagggagaagaatcgcttgaaccctgcaggtggaggttgcagtgagccaagatcatgccactgcactccagcctgggtgaaagagtgagactcttttttttttttttttttttttgagacagggtctcattctgtcacccaggctggagtgcagtagcrtgatctcggctcactgcaacctctgcctccccagttcaagtgattcccctgcctcagcctcccaagtaactgggactacaggtgcctgccaccacacccagctaattttttgtattttagtagagacagggttttaccatatcggccaggctggttttgaactcctgaccttgtgatccaacccctcagcctcccagagtgctgggattataggcgtgagccaccgtgcccagccaactccgtcttaattaaaaaacaaaataaaataaagaagtccttgagatgggatttttttttcagaggcagggtcttgctctgctgcccaggctggagtgcagtggtgctatcatagctcactggagccttgacttaccaggttcaagcaatcctcttgcttcagtgtcccgagtagctgggactatagacatgcaccaccatgctgctaaatttttaawtttttttgtaaagaatcagcctcactatgttgcctaggctggtcttgagctcctaggctcaagcgattctcccaccttgacctcccaacatgctgggattacaggcatgtgctgcagcgcctgaccttgagatagaatttgaaaggcaaacagaagtttgcttgagaagaaaggacatttgaggacagacacttaactattccaaagctctgaggtgtgaatttgcttcagtgattctggaaacagctggtggttgatttgtgtggctggacagtccagtaccagggtctaagtttggtgggcatggctggaggcgtgggaagaggctggaccacagaaagtcttcagtgcccagctaacgagctgaagctccctcctgagtccagagttccgttctgagtttgcagagttcaagcaaacggaggaagttttgctaatggcttgacttaagaaagaagccacctgcccttgggtgggcagaaagggtgggcacagagacctctgcccatctgtttctctgaccctgggggagggacttggtcagggctacactttctcggggagacccacccctggcctacagcctgttgtctgggattcactgaggggtatcttccacccctaggaccctcggggctgcccctgctgcctgtgctgttcgctcttggggggcttctgctcctctccartgcctcctgtgtcgggggggtcctctggcagcggagactcaggcgtcttgctgagggtgaggagagacccttccctgccagggtggagaccysagggtgatagggaaccctgtggttgctgcatactgaagrtcttcctggggcyggggtggggggcttgcatagggtcactgagccctttattcctgtttccttcaggcatctcagagaagacagaggcagggtaagtggggatatttttctgtaaagaaggctctgagggaggtttggrggagactggtggcggggggcagcactcaacttccccccacaccttcatcctggaaggtcvgaagaggaccgagtcaggaacgaatatgaggagagccagtggacaggagagcgggacactcagagctccacggtaagtgggggtggccctggtgaccccacaatcagggcaccgacggcgactgaagccctgccgttagcatcaggttgatcattgcccttccgggcacagtggggtcagaggatggaaagggctttgtttgttttgcgtgtggggaacaggtcagcacaacagaggcagagccgtattaccgctccctgagggacttcagccccyagctgcccccgacgcaggaggaggtgtcttattccygaggtgagttaggaccatgtcaggwttccctcactcagaggtaccccygacgcctggactgggtgccttgatcgtgtctcccttccactccaactccaggtttcacaggtgaagatgaggatatggccttccctgggcacttgtatgatgaggtagaaagaacgtaccccccgtctggagcctggggacccctctacgatgaagtgcagatggtgagaagctttgcatcagcaaccatccttcctggctagtgctgggagcctacctcctattgcttgtattagttagggccagctagctgctgtaacaaagaggcctgaccatgatccagtggcttaaagacagtcggctgggcatgatggtccatgcctgtaatcccaacactttgggaggccaaggcaggaggatcgcttgagcccataagtttgagacragcctgggcaatatagtgacttgtctctacaaaacattttttaaaatgagccaggcatggaggtgtgcacctgtagtctcagctactcaggaggctgagccaggaggatcccttgagctcaggagttggaggctgcggtgagccatgatggtgccactgcactccagcttgggcaacagagcaagaccctgtctctgaaaaaaagaaggcagtctatttctttttcagtcagacgtgagtggccctgctcaagtcaaccgagtctacatgaatgagccagttcactgggggttcaacccatgggaaaaggtgaaagaatgtggaggaggcacaaccctgccttgtggcccaggcccagaaatggtgcacaccactctgctctcactcccctggtgggaagagagtcacatggtcacatctgacggcaaaggaggctgtgaaatgtggtctagcttagcagtgatgtgccttgctgcaattctgctactgtggaaggaagtagacatgaatttttaaagataattagccatatctactccactggttaaagagagagaaagagagaatttgggggcccattcaactgaaaaatcaaggcatacaattgtcatcaggcccagctgggcccagaatttcttccctaaaaatgtttttatggctaggcatggtcacggctcatatctctaatctcagcaggctgaggtaggtggattgcttgagcccaggtattggagaccagcctgggcaacacaataataccccatctttaaaaaaaaaaaagttaagccgagcatggtggctcacacctgtaatcccagcactctgagaggctgaggtgggtggattacctgaggtcaagagttcgagaccagcctggccaacatggtgaaaccccatttctacaaaaaatgcaaaaattatctggatgtggtggcacacacttgtaatcccggctacttgggaggctgatgcaggagaatcgcttgaacccaggaggcagaggttgcagtgagccgagatcatgccactgcactccagcctgggcaacagagcaagactctgtctcaaaaaaaaaaaaagtttaaaaaattaactgggcatggtggtgcatgcctgtggtctcagctactcaggaggctgaggtaggaggaatgcctgagccagggaagttgaggctgccatgagccctgattgtgccactgcattccagcctgagagactgtttcaaaaaagaaagggaaaaaatattcccagaaaatctagatttgtatcctacgagattagaaatcttcaaagaaagagtatacctgttttccagtggccccaaatgcccaatgctgacacttaattggtcyagcttgggtcacatcctcatcactgaacacatccctgagtcaggggatggaatatgctaacaggagaggcctgggccagttcaccatgggatcagggagtaggggccagccccactcaggtcactgggctgagagtaggagagggacagagagctcacagggaaatgaggatggtggctgtacaggcaaaaacaacagacaggcactttgaccaccagccaatccccacccattgctgcacagttagggagatgggacagaacccctgatttcctgtgtggccttggctgatgctctggcacctcctgggccaaggatttccttctgtctctgtgaacgacctccgataccgggactgttgtcagatcctagctcctcaccagcatggcgcaaagcgctgtccatggtgctggaccatatgcactctctaaagcgtagatggaggctgcacgctttttccgaamagggccggatagtagtaaatgctttgggctgtgtgggacatacggtcttcctcaaactctacacaaactctgccaccgtaaagtaaaagcagccatagacgatgcataaatgaatgagtgtggctatgttcctacaaaacttaatttttggacactgtaatttgaacttcatgtaatttttctatgtcacaaatgttatcttttttcattttttcccaacaattaaaaaatgaaaaaccaggccgggcacggtggctcatgcctataatcccagcattttgggaggccaaggcgggcggatcacaaggtcagaagtttgagaccagcctgaccaacatggtgaaaccccgtctctactaaaaatacaaaaagttagccgggtgtggtggctggcgcctgtagtcccacctactcgggaggctaggcaggagaatcgcttaaacccgggaggcggaggttgcagtgagccaagattgcgccactgcactccagcctgggcaacaaaccaagactccgtctcaaaaaaaaagaaaaagaaaaagaaaaaaataaaaaccattcttagctcttgggcagtataaaaaagcaggtggcaggccatatttggagcatgggccaatctgctctaaagtttgctgaactaaaataatcattttctcccagccctagaacaaaatacatccccagttagggctaccattcatgttctttttgttgttgttgtttgtttggttttgctttgttttgtttttstattatgattagggaactgttttggaaattcataggacaatataatcataacttacattccacagttgccatacctgataacatggacttttaaagttttcatttttaaaaattttatttatttatttatttttgagatggaggcttgctctgtaacccaggctggagtgcagtagcacaatctcagctcactgcaacctccacctcccaggttcaagcgattctcctgcctcagcctcccaagtagctgggattacaggcatgcaccatcatgcccggctaatttttgtatttttagtagagacagggttttgcccattgcccaggctggtctcgaatcctgatctcaagtgatccacctgccttggcctcccaaaatgctaggattacaggcatgagtcaccatgcttggcctaaaggttttatatttctgacatttacattatttttctaacatgaaatcattgggtatcttgggcttgcttcaaaataatccagttagtcggggaggggaacaagatagaaatacagagaaatcaattgaccaagggttgctactggttttttcttttttctttttttctttttttgagatagtctcagtctgtcacccaggcgggagtgcagtggcatgatcatggcttactgcagccttgacctccggggctcaagcgatcctcttacctcagcctcctgagtatctaggactataggcgctcaccaccacacctagctaatttctttaaaaatattttttataggctcggtgcagtggctcataatcccagtgacttataatcccagcactttgggaggctgagacgggtggatcgattgaactcaggagttcaagaccagcctgggccacartggaaacctcgtctttaaaaaaaaaaaaaattcaaaagttagctgggtgtggtgatgcatgcctgtagtcccagctacttgggaggctgaagtgggaggatggattgagcccagaaggtggaggttgcagggagctaagatcgtgccattgcactccagcctgggtgacagagccagaccctgtctaagaaaaataaaattattttttgtagatacaggatctcactatgttgcccaggctggtctcgaactcctggtctcaagcaatcctcctgctttggcatcccaaagtgctggaattataggcatgagctaccgtgcccagcctgatattgttgaagttaggtgataagcacatggggttcatcataagcattcattataatcacactccttttttgtatatgttgggattttagtaaaagctaaaacacttttttctgggaagttaagcaggggcatgtatcccccagatcttcaatgaagacctacagggcatstctccatggttstaactccactttttkcctgtcagggaycctgggacctccactggcctgaagacacatatcaggatccaagaggaatctatgaccaggtggccggagacttggacactctggaacccgattctctgcccttcgagctgaggggacatctggtgtaagagccctctcaaccccattgtcctgcacctgcaggaatttacactccactggtctctctcattacagcctgggccgagctggttaggtgagctccataaaacccaaagggacttggtgtcaggagaggacatggagggggctgagtgacagagatggttcagctggtaccagagtagaaacaaggtgcatcctggggttggctttagaaactaaacttctccaaaaggacagggcagattgtaaacgtcgtctcaaaaatgaaatgctgccgggtgcggtgactcacgcctataatcccagcactttgggaggctgaggcgggtggatcacctgaggtcaggagttcgagaccagcctggccaacatggtaaaactccatttctactaaaaatataaaaaattagccaggagtagtggcgcatgcctgtagtcccagctacttgggaggctgatgcatgagaattgcttgaacccaggaggcggaggttgcagtgagctgagatcacgccactgcactccagcctgggcgacagagcgagattctgtctcaaaaaataaaaataaaataaaaataaaaaataaaatgctattctgagggtccctaagtgcttcatgaagtaaagttttcagaagtggggaaagacatatgaaaaactctgttcattttgcattccatgacgtctgaaatagctaataataagtggaatttatgaatccatgttgcatcctacctattattttattatttccgacagttatctaacacaggaggcataaactatgacacatgtaaacataagtatgctccataagcattaaaataaacagacaatcaaaagaagctagaggaaaagaatatgtactgtgtgtgtgctttcgtttatagaaattctaaaataggcaaaactaatctacggtggcagagagcacagcagaggtttcctggggccatgagaggagggttgactgcaaaaaggcatgggagaactttctgaggtgttggaaatattctatataacgattgtggtggtggttgcacgggtgcacagatttgtcaaaactcattgaactttacacttaagatgggtgcatttttattgtacataaatgatatctcaataaaagtgattttaaaaacaggcttcataataacagcccagtaagaggatccctccctccctccctcccttccttccttcttttctttcctgtctttctctctctctctgtctctgtctctctctctctctttccccttccctcccctcccctcccctgcccttcccttcccttctctcccctccgctgcccttcccttctctcccctcccctccccttccctcctctcccctcccctccccttccctcccctcccctccccttccctcccctccccttacctcccctcccctcccctcccgttcccttctcttcccttcctttcttgtctcgctttgtcacccaggagtgcaatggcacgatctcagctcactgcaacctccacctcccaggttcaagtaattctcttgcctcagcctccctagtagctgggattgcaggcggccgccaccaggctcggctaattttttgtatttttagtagagatggggtttcaaccatgttagccaggctggtctcaaactcctggcctcaagtgatccacccgcctcagcctcccaaagtgctgagattacaggtgtgcgtgagccaccacgcctggctccatctttctattgaatagcaggatagctgagaagcccacctgtttccatgaagaacagactttcttcagaccacacttctacttgattaaccatattatcaaaactttctagttcacgtgtttgtcaatatatttatttttcttttgttttcttttttacaaatacaccccaattgttgtatgacaatgttattttttatcagcacagactaaaataagtttttacaccacagcactggaatacataaacacattaagatctaaatgatttccctgtaattaaaaggtgacttcatttctaacagtagaatttttctaattgtatattttttctttttgtttcaaataaatccacagccaacaacatgtaattgtatatttttccttttcaaagaaaaaacctacaacattcttttttaatttttattttttatttttgtttttatttwttattattattattattattattattattattattattttgagagaagtcttgctcttatcccccaggtttgagtgcaatggctcgaactctgctcactgcaacgtctgcctcccaggttgaaacggttctcttgcctctgcctcccaagtagctgggattaagtcgcctgccatcacgcctggctaatttttgtatattttagtagagacggggtttcaccatgttggccaggctggtttcgaactcctgacctcaagtggtccgcccgcctcggcctcccaaagtgctgggattacaggcatgagccactgcgcctggcctatttttatttttttgagacagagtctcactttgtcacccaggctgcgaatacagtggcacgatctcggcttattgcatcctctgcctccttgtttcaagtgattctcctgccccagcctccygagtagctgggactacaggcgcccaccaccacgcctagctaactttttgtatttttagtagagacggggtttcaccatgttggtcaggctggtctcgaactcctgaccttgtgatccgcccgcctcggcctcccaaagtgctgggattacaggtgtgagccactgtgcccagcctttttttttttttttttttttttgagacacagtttatctctgtcacctaggctggagttcagtggcacgatcttggctcactgcaacccctgcctcctgggttcaagcaatttttgaacctcagcctcccaagtagatgggactacaggtgtatgccaccacacccagataatttttgtatttttattcttttttattttatttttttgagacagagtctcactctgtagtccaggttggagtgcagtggcgttatttcggctcactgcatcctctgcctcctggttcaagagattctcttgcctcagcctcccgcatagctgggattacaggtgtgcgccaccacgcccaattaatttttgtatttttagtagagatggggttttgccatgttggccaggctggtcttgaacccctgacctcaagtgatctgcccgcctcagtctcacaaagtgctgggattacaggcgtgagccaccattccctgcaaaacctagaacattctattctacattggcttaagcaggaaaggaaatttgttggctcttgcagctgacaattgcagggggtagcgttggcttcagacactgccagacctagtattgaaacatagccatgcaaggtctagcttcattctcgggtagaccctttatttgggaaacagagaagaccacttgtagttctaggctggtatcccatgagctcagcagccagagtgcctctttatgccaatagttctggaaagctctggggctgtctttcatcagcccaggctgggtcttatgcctgtcctggaaccaaccactgtggccaaggaatatgctgctaagccaggtcctgggttgctcagcaccatgaaccacttggaagaagctctccaaagtaaccgcaggctgtggctgggtctcttcatgcagttcctacttcctcctctcctttttctgattcagtgtagcggacatctattgcttctgccttccccggatctagtcccccttaatctatacagatattgatgaacaagacaaatgcctagttgtaccaagccactggatccagccacacctgaagtcagggctacttstagactaccagtttccctccccacttaggtcagtctgaatgtcattttcagttagttgcaaccataaatgtccttcactcttttttttttttttttttttttgagacggagtctcgctgtcactcaggctggagtgcagtggcgcgatctcggctcactgcaggctccgcgccccagggttcatgccattctcctgcctcagcctcccacgtagctgggactacaggcacctgycacctcgcccggctaattttttgtatttttagtagagacggggtttcaccgtgttagccaggatggtctcgatmtcctgaccttgtgatccgccctccttggcctcccaaagtgctgggattacaggcgtgagccaccgcgcccggcctaaatgtccttcactcttaaaccagtttgaatgaggtctttagttaactgaggaggaaataaataatttgcaaggggtggaaactcaaattagtagagcctaaaaagcatgtattgcattagttacttggggaaaaatagtaatttcacagtggataaacctgacagatgtcaccttcaccagatgatcaaagttgatgctaccagtcatgggacaaactgacacaaggagccccctgatataaaatactgagaaggggccaggcgtggtggctcatacctgtaatcccagcaccttgggaggcagaggtgagcagatcacctcaggtcaggagttcaagaccagcctgaccaacatgtgaaaccctgtgtctactaaaaatataaaaattagctgagagtggtggcacgtgcctgtaatcccagctactcaggaggcttgaacccaggaggcggaggctgcagtgagccgacaccgtgccactgcactccagcctgggcgacggagcgagactctgtctcaaaaaaaaaaaaaaattactgagaaggatacaaccacatgttactaatactactgactataaaagtgcataacctgagccggggctcatgcctgtaatcccagcactttgggaggccaagatgtgtagattgcttgagaccaggagtttgagaccagcctgggtaaaatggtgaaaccctgtttctacaaaataatacaaaaattagctggacatggtggtgtgcaacggtagcctcaagtactcaggaggctgaggtgggaggattgcttgagcccaggaattcaaggctgcagtgagccatcatcacaccactgcactccagcttgggcaacagagccagaccctgtctcaacaaacaaacaaagagtctggttacctttgggagagagggggatggtgattgaaactggcaccaggaaggcttggggtgagaatcctcataatgttgttttcttttctttctttctttttttttttttttttttttttgatatggtgtcttgctctgtctcccaggctggagtgcagtggtgtgatgatggctcactgcagcctccaactcttgggctcaagcgatcctcccacctcagcctcctgtgtagctgggactacaagtgtgcaccaccacacatggctaattttttatctttgtagagacagagtttcactatgttgtccaggttgggcccaagcgatcctcctgccttggcctcccgaagtgctgagattacgaagttgttttcttgacttgggtgttagttattcaagtgtcacttgcgtcaaatttactttctggtcacttcctgaaaattcatactgaacacatgatatgggcacatttctttatgtgtgctatacttcattcagaattttacattacatctcataggtggcattgttggaattgtgattcttctgatatgatgtataaccattggtgccattctgaacaaaaaagtacacaattttcactttctttacatcagaagccgggcacagtggctcacgcctgtaatcccagtactttgggaggccaaggcaggaggatcacttgaggtcaggaatttgagaccagcctggccaacatggtgaaactccctctctattaaaaatacaaaaaattagctgggcgtggtggcacaggcctgtaaacccagctacttgggaggctgaggcagaagaatcactggaacccgggaggcagaggttctagtgagttgagatggcaccactgcactccagcctgagcaacagagcgagattctgtctccaaaaaaaatagataaataaaaataaatttacatcatagtttcatttcagaaaatgtcaatatattttaaaccataccaaaattttgtgtgtatggtatatgtgttatattaataatttcagataactgtaaacttattttacgcacagaagcgcctgcaaagacatttacaaactgttctggatgcagatttcagcgtccagcattcctggtcctgcctctagatgcctgtaatgccctccaatcaatgctgcagccaaaaacaattatgcaaatttcccaagctcccaccagggtgcggtcgtgtcccgtttgagaagaaccaatccatgaggggattctgaatgagcatgtgtgtgtgtgtgtgtgtgtgtgtgtgtgtgtgtgtgtgtgtgtgtgtgtgtacattgggttccagagctcaggagagaggtctgtgctggagattaaaactggctggactgtcctctgctcctaagctgtcaccaaactccagtattaagggataagtagctgtgcaggggctggagacaaagaagactccaggagcacagtgtgggaagggatttccctaaaattgttgctggagaataacccccaagtcagggagtggtaggaattaaggctagtgagatggccaaagataaaccacaaagctcatcttatgggtttgtgctttatcctgtgggtgacaggaagccaatgagtcgctgcagcagcagtgacagacagcatttatgagctcctaacacatgccagctcacattctatgttctgtatatgtatcacctcctggaaccatcagagtcacgcatgagtccagttttttgtttcattttgtttttaattatttgtttatttagagagagagtgcacctgtgttgctgctggagtgcagttatgcgatcttggctcactgcaacctccacctcccgggttcaagcgattcttatgcctcagcctcccggtagctgggattacaggcgcctgccaccacccccagctagtttttgtatttttagtagagaagaggtttcgccatgttggccaggctggtctcaaactcctgacctcaggtgatccacccgccacggcctcccaaagtgctggtactgcaggcatgagccaccacgccccaggtaggttttgtgcattggttgagcactcttgaagctccagaaacaggcacagcactggagctggctggaataccttattcttcaatcccagtgattggtatggggtcacctggtgacccaaccagagagaataagagggactctcccacctatggctctgcctctctgctggtgttagagcccctttgcctcttaccacaaaatggacaatcacccacagaaggaccggctgggaactttattccagaaccttccatggctactgttgagcagcccattgtgttctgttttgcagggcactcaggattccccagtgaccaggtgtgggtggctcatgtctrtaatccaagcactttgggaggctgagacaggaggaccacctgagaccaggagttcyagaccagcccaggcagcacagagagaccccatctctacaaaaaacacaaaaattacccagctgtggtgccacactcctgtagtcccagcaactcgggagactgaggcaggaggatcccttgagcccagtagttcaaagctgcagtgagctatgagagctatgatcgatcacaccactgtactacagcctgggtgacagaacaggaccctgtctctaaaacaaaacgaaacaaaaattctctccacctagtctctccctctcccacactctcattttcaacttcactttcccccaatccaggttgtgtgcctcagataggtgagaaaaatgcttttccttcttatagccatatttgtttctacctccttgcctttaatttgtctgtggtctcaacctgggatacccaccctcttgatgtaattgaattggtggagcatctagtccaggctacactctggaggatgcaaagataaataatagacctcggtagcttcaatgctctgccakttcagtatgatgtgtttaggcatggatttctttagtgtttgtttgtttgtttgcttgtttgtttgttttgagatggagtctcactctgtcaccaaggctggagtgcaatgggcgatctcagctcactgcaacctctgcctcccaggttcgagggattcttctgcctcagcctcccgagtagctgggattaccagcacgtgccaccacgcccaactaatttttgtatttttagtagaggcaggttttcaccatttggccgggctggtctcgaactcctgacctcgtgatctgcccgcctcagcctcccaaagtgttgggattacaggtacgagccaccacacccggcctcttttgttttatctagcttaagatatctttgcttctttgtgaatatgtatttttcatcagttctggaaaattctcagccattatttcttccaagattgcctctcttctatactctctaatttctacctttttttttttttttttttcttgagacggagtctcactctgttgcccaggctggagtgcaatagcgccatctcggctcactgtaacttccacctccccggttcaagcgattatcctgcctcagcctcctgagtagttgggattacaggcacgcgccatcacgcccggctaatttttgtatttttagtagaggcggagtttcaccatgttggccaggctggtctcaaactgctgacctcaggtgatccgcccgcctcagcctcccaaagtgctgggattacaggcgtggcctggaggtttttgtttttaaagcagctcttagaaccaggccggcaacctttaatatgcaaatgcaggccacccaactgggtccacccaaacatggcgattcccaaggccatgtttgggaggtcgaggcaggcggattgcctgagctcaggagttcgagaccagcctggccaacatggtgaaaccccatctctactaaaagaatacaaaaaattagctgggcgtggcggtgtgcgcctgtagtcccagctacttgggaggcagaggtggagaatcgcttgaacccaggaggcagaggttgcagtgagccgagatcgcgccgtgcattccagctggtgacagagcaagactatgtctcattaaaaaaaaaaaaacaaaaaaacttcgaggccgggcgcggtggctcacacctgtaatcccagaactttgggaggccgaggcgggcggatcacaaggtcaggagtttgagaccaacctggccaacaatgtgaaatacctgtctctacttaaaaaaaaaaaaaacacacacacacacacaaattagccgggcatggtggcgtgtgcctcatggcctgcaactgtaatcacagctactcgggagcctgaggcaggagcatgcttgaatgcgggaggtggaggtttcagtgagccgacattgtgcactccagcctgggcgacagagtgagaccctgtctcaaaaaaaaaaaaaaaaaaaaaggtgggtcttatccagaatctgcttgaattgatgtgatgcaatctataagtcccttgtccagcaaataccaaagaaatctattaaattagttacccattcaacaaaaataagtccattcaacaaaaataagtcctgtgttaagcagtagggataaattaatgacaaaaccaaatgtgaccccccgacctcatggtgttcacagtctagcaggggcgtggggagagaaactgagtcttcactcacagacgaataaacatgacaagagctacaaggctggtgttaaaatgtgaaagggtaaaactccccctcatctgggaggggctgctcaaggcagacctccttgagggggtgtcttaaaccctgacacctgagggcaggtgggagttaattagggaaagaaggaagggtggagttttcagggaaaaggaacagcggaaatgcaacagcaggaagctgggtgtgttccagggacagtgaaaagacaaagagggagggaggaccccatttagagaggctaaggtgtccgattgtaggggccgtgcctcttcacctgggtgaacatttgaaccaccaggggagctttcaacaccccaatgcctacccagtaatcacatttctggggatgaggccctaggctgggcgtggtggctcacgtctgtaatcccagcacgttgggaggccaaggtaggcggatcatctgaggccaggagttcaagaccagcctggttaatatggtgaaaccccgcctctcctaaaagtacaaaaattagccgggcatggtagcagacacctgtaatcccagctacttgggaggctgaggcaggagaatcacttgaacctgggaggcggaggttgcagtgagcagacatctgcagcctaggcaacrgagcaagatggagccaaaaaaaaaaagaaaagaaaaaaaaggcaggccaagtacagaggctcatgcctataagcttagcgtttgggaggccaaggtaggaggattgtttgagcctaggagtttgaggctgtagtgagccatgatcatgctggagcattccagcctgggtgacagagtgagatcccccatcacaaaaaagaaaggaaaaaaaaatttttttaaatttagctgggcatagtggcatgtgcctatagtcccagctacttgggaggcagaggtgggaggatcacctgagcctgggaggttgaggctgcagtgagccgaaattgtgccactgcactccagcctgggcaacagagtgagaccctgtctcaaaaatgaataaataaataaatacacacatacatacatacatacatacataaataagaaaataaataaaaatttcaaggccgggcgcagtgtggctcacgcctgtaatcccagcagtttgggaagccgaggcgggtggatcacgaggtcaggagattgagaccatcctggctaacatggtaaaaccccgtctctactaaaaatacaaaaaattagccgggcgtggtggtgggtgcctgtagtcccagctactcgggaggctgaggcaggagaatggcatgaactcaggaggcggagcttgcagtgagccaagattgcgccactgcactccagcctgggggacagagcaagactccgtctcaaaaaaaaaaaacttacaatgtgagggccaggtgccgtggctcatgcctgaaatcccaacactttgggaggcccaaggtgagaggactgcttgagtccaggggttcaagaccagcctaggcagcatagtaagactctgtctctaccaaaaaaacaattaaaaattaccctcggtgtgatcacatgcacctgtaatcccagctacttgggaggtggaggtggtgggtggggggattgcttgagcccagaagtttgaggctgcagtgagcagtgatcaccccactgcactccagcctggaagacagagcaagactctgtctcaaaaacaaaacaaaaaaaaccttacaatgtgaacaactatgaatcatcatccatgttaagacctaggactcctaggacctagaagccactgccaggcacagtggctcacacctgtaatcccagcactttgggaggccaaggcaggtggatcatgaggtcaggagttcaagaccagcctggccaagatggtgaaaccgtgactctactaaaaacacaaaagttagccaggcgcggtggcagacgcctgtaatcctagctactcgggaggctgaggcaggataattgcttgaacccgggggcagaggctgtagtgagccgagatcgtgccactgcactccagcctgggcaacagagtaagactctgtctcaaaaaaaaaaaaaaaaaaaaaaaaagacctaggacttcacgcctgtaatcccagcatgttgggaggacaagtagggtggatcacttgaggtcaggagctcaagaccagcctgrccaacatggtgaaaccccatatctacaaaaatacaaaaattagccaggtgtggtggtgggtgcctgtagtcccagctactcagggggctaaagcagaagaatcacttgaacccgggagatgggggttgcagtgagccgagatcgcaccactgcactccagcctgggtgacagagcaaggatacgtctaacaaaacaaaacaaaaaaattaagacatatggtttccattttaaaaaaagaaaataggatatagaagtccccatatccctctaccccattacaattcctcccatcccccacaatcaaccacctctctgacttctgtgataatcatgtccttacttttcttgtcctcatagtttgaccacccacgcatgtattcccaacattttactgcagtttcactttccttgcttttatatttattgaaaagtatagaccagccacagtggctcatgcctgtaatcccagcactttggaaggctgaggcgggcagatcacctgaggtcgggagttcaagaccagtctgaccaacatggagaaaccctgtctctactaaaaatacaaaattagtggggcgtggtggcacatgcctgtaatcccagctactctggaagctgaggcaagagaatcgcttgaacccggggggtgaaggttgcagtgagctgagattgtgccattgcactctagcctgggcaacaagagtgaaactgtgtctcaaaaaaaaaaaaaaaaaaaaaaaaaaaagaataatacagcttgccctgtttggtgtctggcttctttcacttgacattgtgagattcagccacacagttgtgtgtatcagtatccattctttttcattactgtatagtattccattgcataactacaccaccatatatgtatccattctccttttgatggacatttgggtagttcagacactgctcctctgaacattctttcctgtacatgtttcctgctgtccatgtttaaggtctctaggatatgtacttagcatggaacagctgggttatataggttatttgtcttttcttttttctttttttggcgacagagtctcactttgtcacccagggtggagtgcagtggcacaatcacagctcactgcacccttgacctcccaggctcaagagatccaccttcctcggcctcctgagtagctaggaccacaggtgtgtgccaccacacacagttaatttttgtattttttgtagagatggggtctcactatgtcgcccagggtagtctcaaactcctcggtcttggcctcccaaagtgttgggattacaaacgtgagaaccgtattttcaaatgtattcaataacactacagygtttccaattttaagaggaagcaattgccacaaaagtgattaagtagcctgtcctggatcacaaagcccggtgtcctgagcccagggatccttgctccggagcccctgctttccccagcacatggtggttacctaataagtgcaggctgttgtgctgagcattcttgggggctgttactggggttcacctcccgtttccgttactctgaactctgtccccatttgttaataattaattgcccccaaggagcctgtgatcctgaggctttgcccagttaatcagtcactgcccctggtctgggcaaggggcagttggtgaacttgctgcctccagagaaccttccctggtgtggaggcagccagggacccaggatgctccggacctgttacgtgctctgttcccaagctggtccccsctccaggggctggcagtccctgagctttgatggcggggccttccaccttaagggcacaggagagctgacacgggccttgctggttctccggctgtgtgcctggcccccactcgtcactcacrggctgttggtgagcagtgatcctgaggaccagcctggaggctcctcatagcctggcgctgagccctcgctccctgtcacccagctccaggcctggtctcggcgactcctgggctcccggctctcaggcgcatttctccgagcatccgtctatgggcagtttgtggctggtgagacagcagaggaggtgaagggctgcgtgcagcagctgcrgaccctcagcctccgaccactgctggcagtgcccactgaggaggagccggactctgctgccaagagtgggtgagtagggagccagggcccagggaggctgggaggacgcaggaaggggctttgctgttcgggccctgacacctgctggctgggcagtgaggcgtggtatgaggggaacctcggtgmtatgctgcggtgtgtggacctgtcacggggcctcctggagccccccagcctggctgaggccagcctcatgcagctgaaggtgacggcgctgaccagtactcggctctgtgtaaggagtgcaaagacgggggtgcggggagggcgcggctgcccatcgggctcccctcaccaccccgcctaccaccccatttcagaaggagctagcctcrtgggtcagaaggccrggagcctccttggagctgagccccgagaggctggctgaagctatggactctgggcaggtaaggatctcaagcgggactgtcggggacagagtgccttggacttagatgcggccacaccgcacgccagatgttcaaaatgctacggccacctccaggcttggaacagccagcagaagtgcagctgtagctcccaggcatggttgaaatggatggaatcagggtcatctgggttctcagggaggagcctggaggctggaggctctcagaggagggattgggatagaagctgtttatcaattagaaggaggtacatcagtgtgttctcagtcaacacagctgcatgggtgtgagctggctgggtgtaagttctgattaggccaatggggtcttagtttgttcattcaatcattaattcctttttatctccacattctctttcaaccctactccatctttttttctttctttctctctctctccttccttcctcttcctcttttgctctctctccttccttccttcttttctttttccttctctcccctccctccctccctcccttccttccttccttcctttattccttccttccttccttctctctcctccctcctctctctctctctctctctttctctttgtcttactgtattgcacagggtggtctctaactcatggcctcaagcaatcccccagcctcagccccccaaagttctgggattataggtgtgagccaccacacccagcctgccgtcttgtataatgcatatctttttgtttctatgattttgttttgccaggtgtataccattcgtggggggcatattttccccaatattctattataaaaattttcaaatatacagaaaagtaaaaagaattgtacatgaacatccatgcccccgccacctttaactatactcactttaaatcatatctatccctctattcctctatccatccatcaatccatcttattttttggtgcatttcaaagtaaattgcagacatgttttccccctaaatgcttcaggatatgaataatgggctcattaattagagcccaataattattcgcagtactttttttctttcaaggtaaaacaatgaactacacacattgtaaatgtgccctttgatgaaccttaaccaatacacacacttgagcaatccaaatccctatcaagatttagaacatggccgggggcagtggctcacgcctgtaatcccagcactttgggaggctgaggcggatggattactggaggtcaggagttcaagaccagcctggccaacatggtaaaactccgtctctactagaaatacaaaaattatctggacgtggtggcacacacctgtagtcccagttacttgggaggctgaggcaggagaatcgcttgaaccgggaggcggaggttgcagtaagccgagatcgtgccactgcactccagcctggtgacagagtaagactccgtctcaaaaaaaaaaaaaaaaattcttcttgcctcaccctcccaaattgttgggattatgggctgagccaccatgcccggcccccactgtttccaatagttgattctagctgctgcatggtttacctctcctggggtgaacccctgggtggcctctgtgtctccaccctcccaaacaatgctatagtggacatgctgatgtttctttttctaacctttttttatttgtaatttttatttgtttatctatttatttattattattattattattattattattattttaagacagagtcttgctctgttgcccaggctggagtgcagtggcgcaatctctgctcactgcgacctccgcctcccgggttctcctgcttcagcctcccgagtagctgggattacaagcgcctgccattacacctggctaatttttgtatttttagtagggatgaggcttcaccatgttggccaggctggtcttgaactcctgaccccaggtgaaacgcccgcctcagcctcccaaagtgctgggattacaggcgtgagccaccacgcccagcgtttttttttttttttttttttttttttgaagcggcatctggctctgttgcccaggctggagtgcagtggtgcgatctcggctcactgcaacctccgcctcccgggttcaaacgattctcctgccccagcctcctgagtagctggggctacaggcgcacaccaccacacccagctaagttttgtatttttagtagagatggggtttcactatgttggccaggctagtctttaactcctgacctcgtgatccacgtgcctcggcctcccaaagtgctgggattacaggcatgagccactgtacctggccttatttgtaatttttaaagtgtgtcagagaacacatagaaacaagatttcatggttcagaaaatcagctttggagagtaaggagttcacctcttcatgagctttagtttattcctgtagggagagtgacagcaacttctcagtggttttaaggattaaaacaggctgggtgcagtgcctcatgcctgtaatctgcattttgggaggctgaaattggaggctcacttgagcccaggagtttgagacctgcctgggcaacatagtgagatctcatctctacaaaaaaattaaaaaatcagcctgtgtgctggtgcacacctggtgtggaggctaaggcaggagggtcgcttgagcccaggaggtcaataccaacctgagtaatatagtaaaccctcatctctacaaaaaattcctttaaattagctgggtgtggtggcaggcacctgtaatcctggctacttgggaggctaaggtgggaggattgcttgagctggcaagtttgagagcgaagaaagaaagagagggagggaggaaggaaggaaggaaggaaaggaaggaaggaaggaagraagaaagaaakaaagaaagaaagaaaaaagggccaggtgctgtagctcacacctgtaatcccagcactttgggaggctaagtggggctggatcacttgaggtcaggagtttgagaccagcctgggcaacatggtgaaaccccatctctactaaaaatataaaacttatccagaagtggtggcacgtgcctgtagccccagttaatcaggaggctgaggcaggggaatcacttgaacttgcaccactgcactcttgcctgggagacagagtgagatctatctcaaaaaaaaaaaaaaaagaaggaaggaaggaagggagggaaggagggagggagggagaaaagagagaaagacccaggctctggaaaggctgaggtttaaacctcaggtctgccctgagttagctgtgtgacttttgacaagtgacttccctgctctgtgcctcagtttccccatctagaaaatggggggataataacagttggtacattagagagtggtaaatattaaatgagttaaatatttggtgggtgtctgaratagctccctgagggcctaagactacgccccaagtcaagcaggagacaatcctctgacaggggaggaggaaaccaggctgctgcctccaggtcttcccttctccaggaggcagcattctccccaccatgcggaaggttgcagcttccagcccaacctgcctccaggtgggattccatgagcaagcccaggcctatgtcatctgtatcgaccctgttggatataataaagctttcagccccacctgttcctctttcttccatttcccaacttctttgaacccagccagactccctggagtcaccagcagctcacattcagccagatgaatctgcataagactgtgagttagaaacggttcttatttccatgttacaagcatatccactcccgaagtgtttgctgaacatctatcttgttccagacacggtgctaggggccgaggaagcatgaaggcaaaatycctgacctcgaggcacttacttgcaagtcaggggcaagagacaataattaaaaccaaagtcagaatcccagcactttggaaggctgaggtgggaggatcgcttgagtccaggagactgagaccagcctgggcaacataggaagaccttgactctacaaatagtaaagaattagcccggcatggtggtgggtgcctgtggtactaggtacttggaaggctgaagcaggaggattgcttgagctggggaggtggaggctgcagtgagccatgatcgtgccactgcattccagcctgggcaacacagcaagaccccgtctcagcaaaacaaaagtcagtacgtaacaagtaagggaaaataaggctgaggaagaggaaaagaagttgccaatgtataggtgggaaaaccatgttgagaaagtgacattagagcaaatacttgaaggaaacatgggagcaggtaaagggctggaggtgggaaggtgccctcgtgttcaaagagtagcagggagggctgagcacggtggctcacacctgtaatcccagcactttgggaggccgatgtgggcagatcacttgaggtcaggagttcgagaccagcctggccaacatggttaaaccctgtctctactaaaagtacaaatattagccgggcatggtggcgggcgcctgtaatcccagctactcgggaggctgaagcaggagaatcacttgaacccaggaggcagaggttgcagtgagctgagatcatgccactgcactccagcctgggcaacagagcaagactctgtttcaaaaaacaaacaaacaaaaactgaggcccagaaaggttacataacttgcccaaggtcacacagtaggtggtgaagcctggattcgagccctgattctaggctcataaccccctcaataaatagtacctaactgatatygctcatttttagatttctagcaacttataagcttttccccacttcccctgctgccccctagaacctccaggtctcctgcctcaatgctgagcagaaccagcacctccgggcctccctcagccgcctgcatcgggtggcacaggtaacccctcctgctggaaccagcacctccgggcctccctctgccgcctgcattgggtggcacaggtaacccctcctgctggaaccagcacctccgggcctccctcagccgcctgcatcgggtggcacaggtaacccctcctgctgggatctggctccactgcccctgctggacacccggggccctgaccgtcgtctctgtcgccatcagtatgcccgggcccagcacgtgcggctcctggtggatgcggagtacacctcactgaaccctgcgctctcgctgctggtggctgccctggctgtgcgctggaacagcccgggtgaaggcgggccctgggtgtggaacacctaccaggcctgtctaaaggtgtgcagtgtgttccaggaggtacaggctggggtccccacaccctgacctaccagaacctgcctgcgtgccctataggacacattcgagcggctggggagggatgcagaggctgcgcacagggccggcctggccttcggagtgaagctggtacgaggtgcatatctggacaaggagagagcggtggcccagctccatgggatggaagaccccactcagcctgactatgaggccaccagtcagaggtaggcccgggccagctggcctctgcaggaaataataacacctagtggttgggtgcagtggctcatacctgtaatcccagtgctttgggaggctgaggctagagattcacttgagagcaggagttggagaccagcctgggcaacacagggagaccccatctctaaaaaattttaaaaatagtcaggtgtggtagcacatgcctgtggttccagccacttaggaggctgaggtgggaggatcacttgaggccaggagttcaaggctgcagtgagccatgactgcaccactgcacttcagcctgggcagcagagcgagaatctgtctcamaacaaacaaacaaacaaacaaacaaacaaaacaaaacaaaaagaaatccttacagtggcctctaagccccacatgctccctgtcacttccctaactttccctccctctcttcctctccctcactccactacagccacactggcctcctccatgttacccaggggcttggcacatcctgtttccactgcctgggacattcccactgcagacagtggcatggccccatccctcacctccttagatctttacttcttggtaccttctctgggggccacagggactcagccaggctacagagcaggtggcctagccacgcttggaatccaggctcatgtccaagatctgcaggggctccagggcacgtttgtgtaccatcagcttaactggcaccaagccaggcacagtggtgtgcacctgtcatcccaactacttgggaggctgaggcaggaagattgcttgagcccaggggtttgagcccaatctgcacaacatagcaagaccccatctgtaaaaaacattaaacacaaaaaattatggccgggcatggtggctcacgcttgtaatcccggcactttgggaggctgaggcaggcagatcacctgaggtcaggagtttgagaccagcctgacaaacatggtgaaaccctgtctctactaaaaatacaaaaattagccgggtgtggtggcttgcactggtaatcccagctacttgggaggctgaggaaggagaatcacttgaacccaggaggcaaaggttgtagtgagccaagattgagccactacactccagcctgggcgacagagtgagactccatctcaaaataataataataatttgcactattattttaaatattgaaatataattcacgtatcatagaattcacaattttaacatgtacaattcagtggagtttagtatattcccaaaattgtgcaaccatcaccactctttgattccacaatattttcatcaccccaaaaagtaacctcataccaatgagcagtcagctgccttctgttccctcctcccctcagcccctggaaaccactaacctactttttgtctctgtggatttgcctattctagacaatcttataaatggaatcatacaatatgtgcccttgtatatttggcttttttcatttgttttttaagttatttttgagacagggtctcactctgtcgcccaggctggagtgcagtggtgcgatcttggctcactgcagccttgactccccaggcccaagccatcctcccacctcagtctccccagtagctaagaccaccagcgcacaccaccatacccaacacatttttttatttttgtagacacggggtctccctatgttgcccaggctagtcttgaactcctaggctgaagcagccctcctgccttggcctccccaagtgctgggattataggcgtaagccagcatgtccagccacaactgtgcattttaaaggcagactagcctaccgataaggagcctgggctctggagcatcagacagcctgagttcaaatcccagcctggccacctctagctgtgtgacctggggacaagagatagaacccctctcagcttcagtctccccactctgttaaaatggaataagaacatctgcytcccagagttgatgtgggaattagatgagtgattagctttctccaaagcaaacagaattctgcacaaagggttttaactaaaggaaatgtggtgaagaggctgtttatagaagtgtcaggggccaggtgcagggcctcacacctgtaatcccagcactttgggagcccaaggtgggaggatcgcttgagcccaggagttggaggattccgtgagccgagatcacgccactgcactccaacctgggcaacagagtgagacccagtctctaaaaaacacaaaacgaaaaggaagtgtgggcaaagtcagggaagctattaggaagctattttgacccctatgctgtagttgaaggagaggggccaccttagggagctgtggccacacacagaacacagtcagggtgagcagggaggggccgaggtgagacacccacactccttcctgcacatgactccatgggggatgtggggcaaaagtgtcagcttcctgaggggcagagaagggtagaaaacaggtctggggggcgatagggaagacccacagaggatgtgaaatacatagcgtggcccgtggcctgcagcatgcttgcaaggtgtttgccaatctatttcctcttccatatcagtacccagacagtgtcttccttccttttcacagttgcgcgatagagcactatcttctctgtaccacaatttccttagccagttccccatttatggacatttgggctgttgctagtgatgttctgttgacaatgcagcagtgataaccttggggaaatgtcatcttgtgcaygtgatgcgaccctctcctgtgagaccgccgccactgtcccaaagacttcatatcccccttatctcactccatcctcacaacagtgttgctcggaaactcacagtgacaagagattaacatggggccgggtgcggtggctcacgcctgtaatcccagcactctgggaggctgaggcgggcagatcacctgaggtcaggagttcgagtccagcctgggcaacatggcgaaactccgtctctactaaaaatacaaaaattagccgggtgtgatggtgcacgcctgtaatcccagctgctcgggaggctgaggcaggagaatcccttgaacctgggaggtggaggttgcagtgagctgagatcatgccactgcattccagcctgggcaacagagtgactccatctcaaaaacaaacaaacaaaacccccaaaaaaccccagaagatgaaagtggctcagagaagtgatgtcccttacaactggtgcagatggaacagagtactggttccagagaccccttgcttaggagcaccccacccaccccagtcgctggggcctgaccctcgctcaccaggtgagctgaacagagcatctcccttcagttacagccgctgcctggaactgatgctgacgcacgtggcccgccatggccccatgtgccacctcatggtggcttcccacaatgaggaatctgttcgccaggcaaccaagcggtatgaggtggagggatgggcgggaaataggtgcccacaaaagggccctcccttcctctcctttgctcaaatgccagagatggacagaggtgttctggggagaattttaaaaatatttatagccaggcatggttggcacatgcctataatcccaacactttgggaggcgaaggtggaggattgtttgagaccagcctgggcaacacagcaagamcccatttctacaacaaattaaaaaaaaaaaaacagctgggtgtggtggcgcacacctgtagtcccagctattccggaggtggaaggatcacttgagcccaagaggttgagactgcagtgagcagtgcttgagccactgcactccagcctgggtaacaaagcaagtccctacctcttaaaacaaacaaacaaacaaacacattaacccctgctatacctgtaagtccttataggtcccagatggacaagacgttgccccttatttgctggggcatgaggaggtctgagggctccagggaactggctgggagtcactgggggaccttcaaggaatgcaaaggactggttattatgtatcattgagtttggaaatacttcaatgtttgaattactggagccgccatatgggtgcatagtggctgactttaagctgtagatgcagccacagtctggactgatgatgtggccttttctgtagcatgtgggagctgggcattcctctggatgggactgtctgtttcggacaacttctgggcatgtgtgaccacgtctctctagcactgggtatgtgaatggctcccccacccccatcaagccccaggccttactccctcccagccagagcccttctcctattcccaaccaaggcccagcctccagatccttccagagagatctgtcattccagtgtctgtgggccttccaaggctgtgtctctgtgtctgccgtctgtcatttctgctggttcttgatcatggtgtattatttcttgtgtgttttgttatctttactgtgctgctcctcagggcctgacaccaggtaattaatgtttccttctgccaggtgctaagcagaacgaaatcactttatcctaaattcatagcttgaggtttcttgaaacaccccactggcacaaatttgagctgcaaatacataagggggttaacccatagccccaacttcgcagaggtggatttttctgttttcttccttgatctgtttatggccaagaccatttcctgggactgggggaaggttgcagggttgactttttattaactcttactctaagggtgtagatttttgggttccagcttaacttggggaagttctcccttataactctcacctcaggcttgaagactgactcaatgtccccccgcaactctgtgaattcatcagatagcacctcggttttgcttttggggcagaagtggcttgctgtgtgtctcttctctctctgggttctcattttctcttttattttattttatttatttatttattttgagacagagtcttgctctgttacccaggcaggagtccagtggtgccatcttggctcactgcaacctttgcctcccaggttcaagcgattctcctgcctcagcctcccaagtagctgggattacagacggctgccaccacgcccagctaatttttgtatttttagtagagatggggtcttaccatgtttgccaggctggtctcaaactcctgacctcaggtgatctgcctgccttggcctcccagagttgctgggattacaggcgtgagccaccacgcccagcttatttattttgtttytgagacagagtctggctctgtcgcccagacttgagtgcagtggcacgatctcagctcacttcaacctccgcctcctgggttcaagtgattctcctgcctccgcctccccagtagccgggattataggcacgcaccaccatgcccagccaatttttgtatttttagtagagacggggtttcaccatgttggccaggttggtcagtgtgctgagattgtgccactgccctccagccagggcgacagaccaagactctgtctcaaaattaattaattaattaattaatcaattgagataaaataaaaacagttagctgggcgtggaggtgcatgcctgtggtcccagctattcaggaggctgaggtgggaggattgtttgagcctgggaggtcaaagcagcagtgagtcgtgatcacaccactgcactccagcctgggccacagggctagaccctgtctaagagagaaaaaaaaaagtttgctccaggacttttagctttttcagttagaaattttatccaactcacttaatctgccatgttctcagaaacagaagtctctgttccaggtggggactggggagtgtccccccagcccaagcccataccctgtcaacactccaggctgggcatggtggctcacgcctgtaatcccagcactttgggaggccaaagcaggaggataacttgaggtcaggagttcgagaccagcctggccaacatggtgaaaccccatctctactaaaaatacaaaaatgagccgggcgtcgtggcaascgcctataatcccagccattctggaggctgaggcatgagaatcgcttgaacytggaggcagagcttgcagtgagctgagattgcaccactgcactccagcctgggcaacagagcgagactctgtctcagaaaaacaccaaaaacgaaaaaacaaaacccactctccctgcagggcaggccggctatgtagtrtataagtccattccctatggctccttggaggaggtaatcccctacctgatccggagggcccaggagaaccggagcgtgcttcagggtgcccgcagggaacaggagctgctcagccaagaactgtggcrgcggctgctgccaggatgccgaaggataccccactagcacccctgagggggtcatgtggtcaataaaagtccttagstgctgcctaagctgctgtcctgcactgacgccgcctccttggggaagggctcatcttgacctcagccagcccaagctaggggttttgcagttcaagagagatcgttaggctgggagtggtagctctcgcctatactcccagcgctttgggaggccgaggtgggaggcgtgcttcagtctaggagttcaagaccagcctgggcaacatagcaatattctttctctacaaaaaattaaatcagtagggcatggtggtgcgtgcctgtggtcccagctcgggaggctgaggcaggaggatcacttgagcccaggggtttgaggctgcagtgacctatgactgcaccactgctctccagtctgggtgacagcaagagactgtgtttaaaaaaaaaaaaagaaaagaaaagaaaaagaggccgggcacggtggctcacgcctgtaatcccagcagtttgggaggccgaggcgtgtggataacgaggtcaggagatcgagaccatcctagctaacatggtgaaaccccgtctctgctaaaaatacaaaaaatagccgggcgtggtggcaggcgcctgtagtcccagctactcgggaggctgaggcaagagaatggcatgaatccaggaggcagagcttgcagtgagctgagatcacgccactgcactccagcctgggcaacagagtgagactcagtctcaaaaaaaaaaaaaaagaaaagaaaaaaaaaaaaaagatcgttagacacccattgagcatagccagggcattgacggaggactaaggaagcctccctcacctctgaggcagaccatcctgggttgggtctggccagtgactgatgcagaactttcttcatcccaggggatgcctaaaggaagggcacacatggggagcagacaccaaggcactgaagtcaaggggctcggcccaggccacttggcgagggagggacagaagaaagagccaagccattctctcagttaataagcattgaatgaaactaggyrcagtgactcatgcctgtaatcccagcactttgggagaccaaggcaggtggattgcttgaggtcaggagtttgagaccagcctgggcaacatagtgaaaccccattatctctcaaaaaaaaaaaaaaaaaaaaaagaaagaaagaaattagctagccaggtgctgtggctcacacctgtaatcccagcactttgggaggctgaggccggcggatcacgaggtcaagagatcgaaaccatcctgcccaacatggtgaaaccctgtctttactaaaaatacaaaaattagccaggcgtggtggcactcgcctgtaatcccagctacttgggaggctgaggcaggagaatcacttgaacctgggagatggaggttgcagtgagccaagatcgtgccactgcactccagcctggcgacagagcaggactccatcttaaaaaaaaaaaaaaaaattagctaggtgtggtgggtggcctgtgcttgtagtcccagctacttgggaggctgaggcaggaggttggcttgagccctggaggtggaggctggagtgagctatgatcttgccactgcacaccagcccgggcaacagagtgagatcctgtctgagaaaaacgccaggtgcagtggctcatgcctgtaatcccagcactttgggaggccgaggcgggcagaagtcaggagattgagaccagcctggccaacatggtgaaaccccgtgtctactaaaaatacaaaaatgagccgggcatggtggcgtgcgcctgtaatcccagctactcggaaggctgaagaaggagaattgcttgaacctgggagatgcaggttgcagtgagccgagatcgcgccactgcacgccagcctgggcgacagagtgagaataaaagcactgaatgaggcctcttttgagctaggttctggggtgaacaacgctgtgaacacaacagtgacaagaacgacccaaggccctgccttacagggcttagtccggtgtgggtagacagccccgtcctcagacagtgacagccccgactggtcagggctgtggggcccaggctgagtggctggggctgtgttggggaaggggatgctactgcgcaggcgctgcgggaggccactggtgctcaagcacctcggattcccgctcatacagccggccggatcatgtggcagtcaggtggcgaccactatctagcccaacggtgagtgcaaagccaccaggactggggtgtgggcccagaactttcccagagctttctgggccctcagatcaccctcagacccttcccccagccctcaggcccctcccaccctgtccttctcttccgcggccctcagaccacacccctgcccgcccctttagcgaaccctttccccattccactgaccccttccccagccccagacactgtcctcagagcccccttccccagcctgtagcccccacccccaacacacagacacttccctagtccttagtccacgcgtcccacccgcggaccctcgcacagtcggcagatcctgccatcagcgccctctcctccttcagagcgcgcccgctgccctcagaccccatccaccccacggaccccacagacgctgtccctagagcctccccatgacccctctcaccgcctctcagatcctaaaccacaggcgcctcatcctcccaccgcagccttcagagcctcctcctgagccctccgactcctttcccaagctcggatcctatcctcgcagcccttctgccaccctggcacgcccgaccccagccctaagccccctcccagactcccgattgccttagatccccctcagctctcagcctccctgcgaccccagaccttctggtgtgtcgccctcccagagccacccccttttctcattcagccacctcccttcccatcagacccctcctaaatcccgttcccgtctagactgcgcccccaggacccccagccagctctgtcttcattgttttgttgtgcccaaagttccagtccttcacatcccccttccctgatgagacccccctagcggatccctgcccaggagccgactgagccgcagcccacagatgccctcgcagccctttcgcgcttcccagtggagctgggctccaagagggatctagacacccaggtgggccgtctgcaccacctggctgtggctgggggcccaggatggggcccggccaggctcctgcggagaggtgagggcctggctgcaggtacatctgtggcggcaggatcaaggagctgtatggagggtgtggcttcagttggccagtcagcagtggtaccgaacaccgactgtgtcccgagctctgtggtccctgatggggctttaagggtgaacatgacccttggaccattgggaatgaaatgcagtgggatgaggatgagaccctagacagtatggcctttcaggtggaggatgcttgagtcttacagtataagagtcagccacgcaaaaaaggtgaaatgaagtggggagagatggtggggtgcaatggctcatgcctgtaatcccagcagtttgggaggccraggcaggcggatcacttgaggtcaggagtttgagaccagcctagccatcatggtgaaacctcgtctctactaaaactacaaaaatcagccaggcatggtggcatgtgcctgtaatcccaactacttgggaggctgaggcaggagaatcatttgaacccggaagacagaggttgcagtgagctgagattgtgccattgcactccagcctgggcaacagagcgagaccccgtctcaaaagaaaaaaaaaaagaagtggggagtgatggaagaggctgtgcaaacgctctgaagtcaaaatgaactgcccatgtatgagtagcagcaggacttggagagacgtgaggctgaagtggccacaagtccacacagttaagggcctctaaaggagtgtgagttttgttggattttgtgtgtgtgataggaaactgttggcattgtaagcaggaaattaacataattaacattaaattaggctgggcaacctgttccacatggctcacacctataatcccagcactttgggaagccgagacaggaggattgcttgagtccaggagtttgagaccagcctgggcaacatagcaagaccctatctctattttaaaaaaattaccagggagtggtggcatcatatgcctgtagtcccagctacttgggaggctgagcagggaggattgcttgagcccaaaaggtcaaggctgcactgagccttgatcaggccactgcactccagcctgggcaacagagtgagaccctgtctcaaaacaataacccattaaattaacaatgtacaatttctgttttgatttttgtaaagttggttgtgtttcaggccactttctgaacttgcttactagttttaattgtttttttgttttgagacagagtttcactcttgttacccgggctggagtgcaatggtgcaatctctgctcactgcaacctctacctcccagattcaagcgattcgcctgtcccagcctcctgagtagctgggattacaggcgcataccactacacctggctagttttttgaattttcagtagagaaggggtttcgaactcttgacctcaggtgatccacctgcctcagcctcccaaagtgttgggattacaggcatgagccaccacacccagctgatagattttcttatgttgaatcatccttgctttatggggataaatctattctattttatttaaagtttttgcatatatatgcaattgatatataatcttactttctgtttctggaaactttcatctagttttggaattaaggtcctgctagcctcataaaatgagccttgccttctttttctatttttcttttctttggaacaactcatataagattatctagtccttaaaagtgatttgtgttttaagaagagacctcgggccgggtgctgtggagtgtgctgtagtcctagctgctcaggaggctgaggtgggaggatcactttagcccaggaggtcaaggctgcagtgagctgtgatcgcaccactgtactccagcctgggtgacacagcgagactccgtctttattttattttatttatttatttatttatttgagacggagtttcactcttgttgcccacgctggagtgcagtggcatgatctctgctcaccgcaacctccgcctcctgggttcaagtgattctcctgcttcagcctcccaagtagctgggattataggcatgtgccaccagacccggctagtttttgtagttttagtagagacaaggtttctccatgttgatcaggctggtcttgaactcccaacctcaggtgatctgcccacctcagcctcccaaagtgctgggattacagacgtgagccaccatgcctggcaacactctgtctttaaaataaaaaaaaaaaggccgggcacagtggctcatgcctgtaatcccaacactttgggaggccgaggtgggcagatcacctgaggtcaggagttcaagaccagcctggccaacatggcaaaacccctaatctactaaaataaaaaaaaattagcctggcatagtggcacacgcctgtaatcccagctacttgggaggctgaggcaggagaatcacttgaacctgggaggcggaggttgcagcgagccgaaattgcgccattgcactccagcctgggcaacagattgagactctgtctcaaaaaaaaaaaaaaaaaggcctctgtggggcaggatgagtgcagaaaggcagttaagatgctgttgtaaaagatagtgagctaatgagtcaaatgcaatgccgcaaatctggtattcagagattcctgaaggtccacatttggaggggttttgtggcagagaccacgctgggttgggcccagtgcatgaataattagccgtgtctgccaaggacacaggagtgcaaggacaaggataccatgcatttgctctacctggggtaggggctggaggaagaggaactggggaatga

SEQ ID NO: 94342 - DNA, 29756 bp, Homo sapiens
tataactggaaatagttaaggagtgttcactcagccctcaagccttgagagagagtctcgccctgtcaccaaggctggagtgcagtggtacgatctcggctcactgcaacctccgtctcccgggttcaagcgattctcctgcctcagcctcccaagtagctggaactacaggtgcctgccaccatgcccaggtaatttttgtatttttagtagacatggggtttcaccacattggccatgctgatcttgaactcctaacctcaagtgatccgcccgcctcgtcctcccaaagtgctgggattacagatgtgagccactgtacccagccagcagctgggcttttgagaagatttggagaatcaagagtccacaattcttgattctcagtgtgggcctggaggttgcatgggtttgcaatacattgagtctgggcagatgtgtgcgcctagcaaagccagaggtggtagcagccatcacaggtttccaaagctggggccctggccacctaagtatcagccagtacagacacaatattagatctgccccagcccttgaacaactgatggggcactcagtatcacacctcaatcggcctccctccattggaggactgactccattcctcaatatcaagataagtgtcacagactgtccctgtcccagctctaaattaaaggtaatgatgctgccctctccaggacagtcataaagttaaacaagaaaatagtgaaattacgcacagagtttactatttttcttttcctgtctcagcctttaagaactcagtaaaggccaggcgaggtggctcatgcctataatcccagcactttgggaggccaaggtgagcagatcacctgaggtcaggagttcgagaccagccttgccaacttggcaaaatcctgtctctactaaaaatacaaaaattagctggacttggtggcaggcacccgtaatcccagctacttgggaggctgaggcaggagaatcatttgaacccggtaggcggaggttgcagtgagccgagatcatgccactgtactctccagcctgggtgacagagcgagactcggttaaaaaaaaaaaaaaaaaaggaaagaggaaaggaagagagagagaaagagaaagaaagaaaaggaaaggaaaaggaaagaagaaaagaaaaaagaaaggaacagaacagaactaagcaaagatccctcagaagggacctccaggggtccccccaccctcgtatctgttcagttctgtttccgttcagttggatgtgtcccacctaggaagtggtttcagacagggttcctcagagccctggggttcagaggtgatgttttggggtttgtggctctgggctggtcatcatctaccctcactcccagacctattctcagccctaccctctgccctggaggctcccccaccctctgttttttgttttgttttgttttgttttgagatggagtcacgatctgttgcccaggctggagtgcagtggcaggatcttggctcgctgcaacctccgcctccccggttcaagcaattcttctgtctcagcctctcaaatagctgggattacaggtgccctccaccacgcccaactaatttttttgtatttttaaatagagacagggttttgccatgttggccaggctggtctcgaactcccgcctggacctcccaaagtgctgggattacaggggtgagccaccgcacccggcctggatttcacttgagtttagctaaagggaggactggctggagctccaagggggaggacagtcaggacatttctattctgctcccttcctgctgtgcctcacatctctggcagtggcttcatctccccacccacatctgcagcacctgtcaggtggccccttctacatccccaggttttaatgagtttcggtaacacagtttctgcctgttaccccatcagtcctagaagcagtaacaggctccaatagttgctagtctcttagggcttcagcattccttgtagcctcctttaaccatatccatttctccataaggagtccctatattaaagcctccagaactgcgtgttccaatagataacaactagccacatgtggatacttaaattggagccagatgtggtagcttacatctgtaatcccagctactcaggagctgaggcaggaagatttcctttttttttgagacagagtctcgctctgttgccaggatggagtgcaatgaagcaatcttggcccactgcaacctctgactccctggttcaagcgattttcctgcctcagcctcccgagtagctgggattacaggcacgtaccaccatgcccagctaattttggcatttttagtagagacggggtttcaccatgttggccaggatggtctcaatctcctgacctcgtgatccacccgccttggcctcccaaagtgctgggattacaggcctgagccactgcgcttggcctctttttttttttttttttttttttgagatggagtctcgctctttcgccaggctggagtgcagtggcgcgatctcggctcaccacagcctccaactcccctggttcaagcgattctcctgcctcagcctcctgagtagctgggattacaggcacatgccaccatgcccagctaatttttgtatttttagtagagacagggtttcttttttttttttttttccagatggagtttcactcttgtcacccagactggagtgcaatggcacaatctcggctcaccgcaacctctgcctcccaggttcaagcgattctcctgcctcagcctcccaagtagctgggactacaggtgtgtgccaccacgcccggctaatttttgtatttttagtagagacggggtttcaccatcttggccaggctggtctcgaactcctgacctcatgatccacccgcctcggcctcccaaagtgctgggattacaggcgtgagccaccgcacccggtgagacagggtttcaccatgttggccaggatggtctcgatctcctgacctcgtgatatgcccgccctggcctcccaaagtgctgggattacaggcgtgagcctccatgcctggccttttttctttttttttttttaagagtaagagtagactttattttattttatttatttattatttattattattattttttgagacagagtctcactctgttgcccagggtggagtgcagtggcacgatcttggctcagtgcaaccttcgcttcctatgttcaagcaattctcctgcctcagcctcccaagtagctgggactacaagtgcatgccaccacacccagctaattttttatttttagtagagacggggtttcatcatgttggccaggctgatctcgaactcctgacctcaggtgatccgcccacctcggcctcccaaagtgctgggattacaggtgtcagccactgcgcccggccttatttatttatttttgagacggggtctcactctgttgcccaggctggagagtagtgatgcaatcttggctcactgcaacctccacctcctaggttcaagcaattctcctgcctcagcctcctgagtagctaggattacaggcacgtgccaccacatctggctaattttttgtatttttagtagagatggggttttaccatgttggccaggctggtcttgatgtcctgaccttgtgatccacccgcctcagcctcccaaagttctgggattacaagcgtgagccacggcgcctggcctctttctttttttctctcaagacggagtcttgctctgtcgcccaggctggagtgcggtggtatgatctcggctctctgcaagttctgcctcccgggttcaagcaattctcctgcctcagcctcccgagtagctgggattataggcgcccaccaacacacctggctaattttttgtatttttagtaaagacgaggttttagcatgttggccaggctggtttcgaacacctgacctcaagtgatacacctgccttggcctcccaaagtgttaggattacaggcgtgagccactgtgcctggcctaacaaagtgatttaatgtgcttattgtgtgaagcactctttctgtgtatttttaaaaattgagatgtaattcatctgtgtatatttaaggagactagaagacttgctcataatggtagaattttaaaactagatatgactccgaggttgctccagaccaacactgagattttgagtgaagaggggcagtgagcagctctgtggcttggtccagcacttgcctagcccctgactggaccaaagccaaatccattttccattttccagtttacaccttggtgcctccaactatgagtacttttttttttttttttttttttgagactgagtctcactctgtcgcccaggctggagtgcagtggcacgttctcagctcactgcaacctccacctcccaggttcaagcaattctcctgcctcagcctcctgagtagctgggattacaggcgcccgccaccacacccagctaatttttgtatttttagtagagatgggtttcaccaccttggccaggctggtctctaactcctgacctcaagtgatccgcccatctcggcctcccaaagtgctaggactacaggtgtgagccaccacgcccagcccaagtacttttggtgtcaggaaaccaccaggagtcagcactgtcaagctccccaaggcatttgtcatgcgctcagtgttttcctggcttttgccacagtgggaggtgacatgagcaaggcgggtgacacgaggctcctccacagctacgggaggcactcgggccaccgcgaattcgtgatcagtgctccagttctgctggcgccttccagccttgcccagccatcccaggagcacactgtgctcctttcaatgaaaacgtgtggaataggtaccacatttgtagcagctgttgatggaaatctgttagtgacaaagtgcttagacacaggagaagccacccacatcagaacccctggggagctcgttaaaaggcagactcccagcactacctggacctggggatggcagccatgactctgtgaggcagagccagaggcctcagtgagcgatgcttatggctgagccccacgtgtcaggagaaggaagctcctgggaggctgcacctggcactgtgccatggagaggggcaccccaagtcctgcaggtggagagcgctgactccaaggcgagtgtttagggtgacttaggacggaaggagtgttccaataaaagctggccctgtggtgggcctagattaagcagggactgccagagatcaggactgatgctatagctcagggtctgcttatttaaaaaccttgctcacccaggagcggtggctcacacctgtcatcccagcactttgggaggcagaggcgagtggatcacctgagatcaggagtttgagaccagcctggccaacatggtgaaaccccgtctctacttaaaatacaaaaattggcttggcctggtggcacatgcctgtaatcccagctactcaggaggctggggcaggagaatcactagaacccagaggtggaggttgcagtgagctgagatcatgccattgtactccagcctgggcaatagagtaagattctgtcttaaaacaaaacaaaacaaaacaaaacaaaacaaaaactttgctcattgtgttattttataatgttatttggtgataggatttaagctgcttttaaaaaatatttggaagacatcttttttttttaaattaaagtctggaaatcttataggacaggcaggcatctcagaaactttctttaccgatttctgcctgcagggagatgaggccctcaccaccacccagtggcagcactgggaccctgccttcattccacatttactgtgaacctctgggcaggcgctgggctggcggggggcagagtgaatgggacagacagagcccacctttcacggagcccacctttggcttgtcacttcaaccatacagcaaccccttgcgagtgaactcatataaccctaatgtagacaatgcctcaggtaacaccacagctcaacaaacagacaaaatgacacacacgtctcgctgcctttatttccaggaattagtggcgggcccttggaaaaccactacagactgaagcaatttcacttccactggggagcagtgaaygaggggggctcagagcacacagtggacggccacgtgtaccccgcagaggtttgtagacgtggcctaacrgcacatatctggacgctttccatgtctccggctctatggtggggggcgaacaagccatgcctgccgctcagatgtgaaggatttcctggggcctgggactgtcagtgctcaaaccagaaccgtcggccgccccacccgtttagtcacactcctctcctacgaagaaggcactttaagttctctcatttaacggaagaagagactgaggttctgaatggttacggaacttgccaaagccagacagctgggattcaaagtcagagcttgagctctttgccacgcttcactcagctgtgtgcttgcagctgtagggactagcaaatccacaaggccctccgctgagaagctgaacatctttgcaatagagatcatcttcttttgtttgtttgttttttgtttttttgaaacagggttcactctgtcacccagactggagtgcattggtgcaatcttggctcaccacaacctccgtctccyaggctcaagcgattctcctgcctcagccttccgagtagctgggattacaggtgcgtgccaccaggccctgctaatttttgtatttttagtagagatgtggttttgccatgttggccaggctagtctcgaactcctgacctcaagtgatccacccacctcagcttcccaaaatgctaggataacaggcgtgagccactgcacccrgccaagatcatcttcttaaagcagtcttattttcaacattccaaagtgggagtcagtagagaaaatgagtgcggatcaatgctgggaattggtttttgtagtttttttgggtgataagtgatgccttatagatttccccaaatattttattatgaaatttttgcaacataygaaaaaatgaaaagaaatgaacragaagaatctatgagtttgacgtctcagtcctgtgatgatcatttttgccatattcactttatcacacctctgctcacccactcacctgacttcttgatgctttttcaagttgaggactctttctgttttttgaacttgttgttgttatgaaagtaatgctgcagttaatgtggaactagagtgcacccaaaccaaaaaatgaaaattgcttgtaatcgcacacccagaggtgacctcyggacattttataaatagggagtgatatctattgtcatcatcatacasatatttataaatagttccaagaatgagcrcaacaatggcttctgtgtgcttcctttcatttaacaacatgccttttattttagtatctctatctgcaactttrtttttgatgaacagatattttatttatttatttatttttgagactgagtatcactctgttccccaggctggagtgcagtggcgcgatcgcaygatctcgcratcttggctcactgcaacctctgctgcccaggttcaagtgattctcctgcctcagcctcctgagtagctgggattacaggcacctgccaccgcgcccagctaatttttgtagttttagtagagacggggtttcaccgtcttggccaggckggtcttgaactcctgtcctcgtgatccactcgcctcggcctcccagagtgctgggattacaggcgtgagccaccacgcccagccgaggcstgagttttttctggtaatccttgtccaaggataactaggaagtagaaaataatgaaaccacccatttctattggatgaggttaacatgatcctctcctttttcccaccaccaggaagactgaggctcttccttcccatggcttcrtcaagtgcctgggagctcagaggtgctgctrgtgctgggatcttacacatctggctgcaacaacttagttcyttttttttttttttttttttttgagacggagtcgcgctctgtcacccaggctggagtgcagaggcacaatctcagctcactgmaagctttacctcctgggttcaggcaattctcctgcctcagcctcctgagtagctgggactacaggcgcccgccaccatgctcggctaatttttttttttttgcatttttagtagagacggggtttcaccatgttagccaggatggtcttgatctcctgacctcgtgatccacccgcctcagcctcccaaggtgctgggattacaggtgtgagccactrcgcctggccatttcattatgattaagtggacacataggtcagccattcagaaggggaagtgactgtcttatttcttgctgatcaatttaagttctctttccattgtgtttcagctgcatttagttcactggaattctgtgaaataccaaaattacaaggaagctgtcgtgggagagaatggtttctgtgataggcgtgtttttaaaggtaatcgcttgctggggtgtagatctaatgaagaaagtggtgatccatcattaggattgcttttttttttttttgagacaggactcgctgtgtcacacaggctggagtgcagtggcacggtctcggctcattgcaacctccacctcctgggttcaagtgattctcctgcctcagccttcccagtagctgggactataggagtgtgtcaccacacccagctaatttttgtatttttagtagagacagggtttcaccatattggccaggctggtttcaaactcctgaccttagatatctgcccacctcggcctcccaaagtgctgggatcacaggcgtgagccaccgtgcctggcctaggattgcttttaaaacgtggtgtatttacagtggagtgagcttccccccgccacccaytgccttttcagctaaccccttgtgtgtctgccacgcagctcggggcccatcatcagatgctgcagaggctggtggacrtcttgctggaagtaaaacataaggtaagctgcatatttgaaatcagcaggccgggcgcggaggctcacgcctgtgatcccagtactttgggaggctgaggcagtggatcacctgaggtcgggagttcgagaccagcctgaccaacatggagaaatcccgcctccactaaaaatacaaaattagcagggtgtcgtggcacatgcctgcaatcccagctactcgggaggctgaggcaggagaatcgtttgaacccagaggtgraggttgcagtgagctgagatygcgctgttgcactccagcctgggtgacaagagtgaaatcctatctcaaaaaaaaaaaaaaaaaaagaaaagaaatcagcataatttgacaagcaaaattgtttagtgcagcgattcatttgcaaggaaaaagaaatctcatagtggaaagagccccgccgaggcgctgtgattccagttctggaaacaggattcygcagggttgatgctcgtgtgtccacagctagctctctctgactttgaatgcgtcaccactgctctgggaccctgtttcctcctccataaaataagggtgttgggctcaatggaagttcccaaaattcagtcrtgcaggcaagatcctgaagactttgacrtatctgcctgccaatgggacaactttctactgaatatttttcttttcttttttattttttcgaggagtctccctctgtcactcaggctggaatgcagtggcgtgatctcggctcactgcaacctccgcctcccgggttcaagcaattctcttgcctcagcctcccatgcagttgggacgataggtgtgcgccaccacacccagctaatttttgtatttttagtagagacggggtttcaccatgttggccaggctggtctcaaactgsggacttcaggtgatccgcccrccttggcctcccaaggtgctgggattacaggcgtgaatcaccgcgcccagcctacttaatatttttctttaaattgattagctcgaaaaatttttagccttgtcctgggtgatgatattcactaatgataaagtttgtttgaaaacagattgaaacaaaaacctcaaatccctaactaataacatttaagaatgttgactcatgtaccacccagcatctccttgaacgtccctgtccgaccccaagcccaagggcagagagaaacctgcccaaaccgcggctctccggcccagctctccacacgcttccctgcatccagcgcccagctctccatacgcttccctgcatccagcacagctcgaaaagatggcggggacaagagtgtcgcctttctscaagatcagctgagaaaaggctttgagggagaaggagaaattccaaagaaatgtagtttatttattcagcagcaaacaaaagaattccagggcagaaggagtcaacgcaagcctcagatgtgcggamggatgaggcttcaacctgtgttaacaatggtgcgggctggtccagatggagctggggcragcccttcctcgcggttcaaggagccgtttgatctgtacgtggccttcgccttgatgctggcttcggggcggcctcctgggrctgggaccagatcaccccccgccgccccatytgcctgctcagaaacttcacaaggccacggttctgagagctctgacgccccatcctcttcctccgcgckgctccacagccagaggaaacctggggaggggttgttttcccagccagcctccacctyccacaccaggtggtcccacctcttggtgggaaagaaaagagctggctgtgaaggaccctttacccaagggctgttttcctcctggggaaggttctggagcatttcttccccatggggtaagtcaraattttctaggcaaaccacaggggaggaatgatgcccgggacaggggaggaagtgcaccgcggactgagctctggtcctgatgctgatctctgggctcatcccctcagctgaaaataaagagytagactctttttttttttttttttttttttgagatagaatcttgctatgttgcccaggctggagtgcaatggcgcgacctcggctcactgcaacctccgccttccaggttcaactgattctcctgcctcarcctccygagtagctggaagtaccggcgcccaccaccatgcctggctaatttttgtatttttagtagagacagggtttcaccatgttrgccaggctgatctcaaactcctgacctcaagtgatccgcctaccttggcctcccaaaktgctgggattacaggcgtgaaccaccrcgcctggccgagttagacctttgagaaattaaaagaccttaagaggctgagtgcggtggctcaagcctgtaatcctaacactttgggaggccaaagcaggcagaccaccttaggtcaggagttcaagaccagcctggccaacatggtgaaagcctatctctactaaaactacaaaaattagccaggcatggtggcgggtgcctgtaatcccagctactcgggaggctgaggcaggagaattgcttgaatctgggagatggaggttgcagtgagctgagattgtgccactgcactccaggctgagtgacacagcgagactcatttcaaaaaaaaaaaaaaaaaaaaagaccttaggaggtaaaagacccagccttcggggcaagagtctatgcttcatgggtcagggaatgggaagagacttgaacaaccctctcgcctagaggctcctagcctaggacttctgggagcttctcccatagcacagtgtatcagagagccccacagttggactcctgggtccagagccctgayccaccactcctgagctgcgcacctctgagcctcagcttcctcrcctgtgaaatggagatgttaaacatccacagtagcccgggcgcggtggctcacacctgtaatcccagcacttagggaggccgaggtgggtagatcacctgaggtcaggagttcaagaccagcctggccaacatggcaaaaccccatctctactaaaaatacaaaaattagctgggtgtggtggcacactcctgtaatcccagctactcaggaggctgaggcaggagaatcgcttgaacccaggagatggaggttgcagtgagccgagatcatgccactgcactccagtctgggtgacagctcgagaatccgtctccaaaaaaaaaaaaaaaatccacactagagcagcattctcaccatgtaatggaataaggagcatgtctggttcttggtgaaatgtgcagttgagtttaaggcccagctgtggccaacactcacacacacacgtctgctgtggaatgcacaggctgctgctgcctgtcacraaacgaaaatccaccagcccaatcactaaggttaaagtcgctttttgttgctgcgggtgctttcagtcagctgrttcccagagagagctattaccttttgggagtccatgaaactttagaatgatggccttctgatggaaaatgctagaagtgtggttgaatctaactcctgattggtgggcagtgcagggcaggacggggccgtggtggcctcaggctcaagggcagatggccttggcttcaaatcccagctctgcctctcaccccckcggactcagcagtcctcacccagggatgggctcayctgcagcttctgggctgytttcctggtttcctccagttaaggaacaagctgtcctgaactagggcaggaaagaccagagtcacgtagtccccatcatctctcctagttccaggctggtccgggccctgmtgtgggactgactcggcagagaccctccaggaatgcctgccacggtcattccctggggacccagctggcttctatgcagtgctcagggctccaagggtgcatttccagaaagagccagayggacacgatgtcttttctgcyctggcttccagagtcacaaagcactgctcctgcggcatcctgttcaccactcccaccaggagcacctgcccaggctcrgggcaaggsgacatcrccccacacctcggtgggaagggttcaaagaagcgacagccctccatataaatyatcacactgaatcttccaatcactccayggggcagggcctgtgattcatctgtcttgcacacacagggaaaccaaagctcagagaggcagagaaggccttgcccsggcacacaggtggcaggtgaagagccygtttttaaacccaggaagtggstccatgcagcctgaactcccagtcgtcccagcgcccacctcccacatgcagtcagaacccaggctgagctccaggccctgctgcacatttctgagcttttcagcagcttagagggaaacacaggcagtgtctataaccaaaaccacattaggcgccgcctggaagcccggacccccacccccacccccagcgccgtcccatctgcacaggcccctaccagtgcygacctgtcactatgcactcagctcccagcacgcaggcccagccccagtgtggccccggtgaccctgggcagacamtcccagaatggagacctcgaggcttcgcctttgaccctctcaccatagccagaagttttggcaaaaactgcccacagagggtccccaccctccatgyctggacaagctgcaagctcctcaggctgctggggycccccctcctccctgccttcgcaagagtcagggctaccggggaaytggctgccttgtggagytggaaacagcccaccaggtccaggggatccagggaatggctctatgccctgtgggggctcttctagcttyggcagcagcagcggcagcacctaccgagccccacgcccatgtggcaggcactgatggaagcccattacagccaccacactgcctgtcgtacacctggggaaactgagactctaagaggacaaaccaagggcggagttaggctgggtgaggcttgacgctcataaaatgyggggtcctgtttaagagaaagaagacaaaaccaggaacagagcrgtggctcacgcctataatcccagcactgtgggaggctgaggcgggtggatyacctgaggtcaggagtttgagacgagcctgaccaacatagagaaaccccatctctattamaaatacaaaattagccaggcgtgatggtgcatgcgtgtaatcccagctgctagggaggctgaggcaggagaatcgcttgaacccgggaggtggaggttgtggtgagccgagatcgtgccattgcactccagcctgggcaacaagagcgaaactccrtctcaaaataaataaataaataagagaaaagtggaacaagtcaccaacccacttccgccagcaaaggcttgtggtgctttccacaggtagctgggccatcsgtgctcagataatggatgtgatggtcttcagcctcattggtgtgctcaccggtgtcccattctagctgcctggggctcaccacacgcataaaggaagggccctgacttcctytgggggccctgagggggagcagctttctgtaaccayatggctgctccagcyctcatgcatcttagagacaggacaggaactcctggggacgatgaggcaacacacaggcatcctcttctcagcccaaggctggaaagcttaattggcaggaaacctgcacgcagtggaatggctggggcctgccrctcccccgactgattcctgcagtcctggggagggagagawgagccygcaccttggaamgggccaggcctcagtggccctgactggcaacrtggctttgggcaagttgtttatatctgtctgtctatcttcatcagtaaactagaaatacttcttgaagggttgttctgaagatttgaagtagttgctcagaaagtgactggcacatctgtgccctgggagcggggacgtgtggccggcaggaggagaggacatctcactgcacacctgcctgttacccatgtgcatagacggacgtctcactgcacacccgcctgttacccatgtgcacagacygacgtctcactgcacaccgacctgttacccatgtgcatagaccaacatctcactgcacacccgcctgttacccacgtgcaccagactgacgcctcactgcacacccacctgttacccacgtgtacagactgacgcctcactgcacacccacttgttacccatgtgcaycagactgacgcctcactgcacacctgcctgttacccatgtgcaccagactgacatctcactgcacacccgcctgttacccatgtgcatagactaacacctcacggtgcacccacctgttacccatgtgcacagactgacgtctcactgtacatccgttacccatgtgcacaagcagcctgctccttcacagcccagctagagtgtgcaatgggatgtcaacccagctagaccatgcaatgagatattacttggcaatcagaaaggacacagctctaactcacgctgcggtgtgggtgagcctcaaaagcaccrtactaagtgacagacgcaagacacaaatgttccacatgttacatgactcagttcctatgaaacccacagagacagaagcagcacggcgggggtggggagaagagctaaaaagtaccaagcttcctccttgaggtgctgaaaatgttctaaaattgacttgggatggctgcacaactgtgaatatacccaaaaccatagaattgtacacttcaattttttatttactttttctgtttttttttttttttttgagatggagtttcactcttgttgcccaggctggagtgcaatggcatgatctcagctcactgcaacctctgcctcccaggttcaagcgattctcctgcctcagcctcccgagtagctgggattacaggcatgcaccaccacgcctggctaattttgtatttttagtagagacgcggtttcgccatgttggtcaggctggtctcgaactcccgacttcaggtgatccacccgccttggcctcccaaagtgctgggattacaggcatgagccactgtgcccggcctatttacttattttaagaaaggatctcactctgtcacccaggctagagtgcastggtatgatcacagctcactgcagcctcaacctccggggctcaagccatcctcccacctcarcctcccaactacctgggaccacaggcatgtaccactgcacctggctagtttttgtgttttttgtagagtcagattcttgttatgttgcttaggctggtctcaaactcctggcctcaagcagtcctcccacatcggcctcccaaagtgctgggattacaggcatgatccatcgcgcccaaccaggttgtacactttagatgggagagttgcatggtatgtgaattctatcacaataatgctgtgggttttgttgctgttgttgttgtttgagaccgagtctctytctgttgcccagactggagtgcaatggtgcaatcttggctcactgcaacctctgcctcctgtgctaaagcaattcttgtgtctcagtctcccgagtagctgggatgacaagcacctgccaccatgcctggctaatttttgtatttttagtagagacgggggttcgccatgttggtcaggctggtcttgaactcctgacttcaggtgatctgcctgccttggcctcccaaagtgctgcgattacaggcatgagccacttcgcccagcctataatgctgttttttttttttaattaactggataattataaacgtgaacacgtgtgcacagaactgatgcatgtgtctgccggcgtggacactcctgggcttccttctggtagctcagccacctctcttgaccctgaccctcactgcttgatgttaggagacaagcccaaggcatctaggttgcyggcttccaccttggaaggccagggcccagcaaagtcaaggtgatgtgatgtggctgagcagggaggccatcttccttscagacagrgactctgtcactttggactggactcttgtcccacagtgctggccagggacaggtgcagagttgtgcttggttggcatgggaygctgatgarggctgtgttgcggccaggcccaaccaccatgagccgagatcatgccacggcactccagcctggaagacagagtgagactctgcctcaaaaaaataaaaaaaataaaaagttataaatagaactaccctatgattcagcaatcacacacttctgggtatayatccaaaagagctggctgggcacagtggcttatgcctgtaatcccaatattttgagaggccaaggcaggaggatcactggagcccaggagttggagaacagcttgggcaagatggcaagaccccytggctacaaacaattaattttaaaccctggtatggtgtcctagctacttgggagactgacgcggggggatcrcttgagcccaggaattagagactgcagtgagctatgatggcatcattgcactcctgcctagttgacaaagtaagaccctgactcttttttttttgttttttggctgtgagtgtattcaatgcaaaataatcctctctaattttacggaggtggctggccatgtccacgaccaaatctgcctctaaactggaattcggttgctgacccagcccgagcctcagctttcttatcggcaccaggggcacagcactccgtctgtaggtatgtctgttggcttcccctcttgtgagtcttgcaggtcgcccaccctccagacctttaggccgaggcctgccagtccctggacggctgcagcgtagggtggcaggcacagtttccagggacagatgaaggtaatcacggagatactggataccctgatcggtaaggtagcagtagaaatgtctccaggcaagccaggcacggtggctcatgcctgtaatccyaacattttgggaggccgaggtgggcggatcacgaggtcaggagatygagaccatcctgtctaacatggtgaaaccccgtctctactaaaaatacaaaaaattkgccgagcgtggtggcgggtgcctatagtcccagctactggggaggctgaggcaggakaatggcatgaacccaggagttcaagctggtcttgaactccaggaggcggagcttgcagtgagccgagatcacaccactgcackccagcctgggtgacacagcgagactccgtctcagaaaaaaaaaaaaaaaaaaaaagcaacaatgcagggactcctgacacatgctccaatgtggataaacctgaaggacattatgcccagtgaaataagccagacacaaaagacaaaaaccacaggatcccacccacatcaggtccccagagtcctcagattcagagagatggaagcagaatggtgggtgccaggcctgggggaggaagctggacatagtgtttagtggggtcaggacagaatttgagtttgggatgatggaaaagttctggagacggatggtggagatggttgcaccacaatgtgactgcrtttaacgccatgaaactttacacttaaaaattgttaagatgggctgggcatggtggctcatgcctctcatcccagcactgtgggaggctgaggcaggtgaatcacctgagattgggagttcaaaaccagcctgaccaacatgaagaaaccccgtctctactaaaaatacaaaatcagcaggtgtggtggcgggtgcctgtaatcccagctactcaggaggttgaggcaggagaatcacttgagcctgggaggcgaagggttgcagtgagccaagatcgcaccattgcaccccagcctgggcaacaagagcaaaactgcatctcaaaaaaaaaaaaaaaggttaagatggtaaattttatgttatgtatattttatcacaataaaagtaatattttttgcagccaaggtatgctaaaagaaatggcgtttttattttttattatttatttattaattattattattatttgagacagagtctcactctgttgcccaggctggagtgcagtggcgtgatctcagctcactgcaacctctgcctcctgggctcaagmaattctcttgcctcagcctcctgagtagctgggactacaggcgcccaccaccacatctggataatttttgtatttttagtagagacagggtttcatcatgttgaccaggctggtctcgaactcctgacctcaagtgatccacccgcctcggcctcccaaagtgctgagattacaggggtgagctactgcgccccaagaaatgacttcaaaaggaaaaatgtaagcaccaacataagctggtgtaatgtaatgtaattcccaccaatgtaagttggcaggaatccttgctctgtatagaaggstcacattttcttatcactgcttccaagtgtgacagcagtggcctcatggccttatctcggggaaagcacttccttccaagcaccatgaaggcctcccgtgctgagacaagatggaagctcctagtcccrcctgaggactgayacggcctkkgcttctcggtctctcaggacgcgcrggcggccatgcgccccttcgacccctccgctctgctgcccacctgctgggattactggacctatgtgggctygctcaccaccccgccgctgaccgagtcggtcacctggatcatccagaaggagcccgytgaagtggccccaagccaagtgagccgtgcccgtaactggcatgatggcgcttcatggaaggcgtctctcttgcttggcagcgtcactaagatgctgcataagagccttgaggagttatatatattctttcatgcatttggggtgttcttacacaagaagaaagttccaattgaagtaggagcttgttgagattggacagcggttccagtgatcacagcgagcatgttctgagcaaygccctaatctatcacacacagacacacaaggcatccatgggagttgtcccagcgtcatgggtctgcatggtttttgttttcttcctttttcttttctttcytttttttttttttgagacagagtctcgctctgtcgcccaggctgcagtgcagtggctcgatctcagctcactactacctccacctcctgggttcaagcaattctcctgcctcagcctctcgagtagctgggattacaggcacccatcaccacgcctggctaatttttgtatttttagtagagacgggrtttcaccatgttggccaagctggtcttgaactcaggtgatctgcccaccttggcctcccaaagtgctgggattccaggcatgagccaccgagcccggcctcctttttcttatctaaatagtttcattgctttttttttttttcgaaaattagttaataatccttgtatacatttttaaaagttatactattgggctgggcgtcatggctcatgcctataattttagcactttagaaggctgagacaggcagatcacttgaggccaggagttcgagaccagcctgaccaacatggtgaaaccccgtctctactaaatctacaaaattagccaggcgtggtggtgcacgcctgtaatatcagctacttgggaagctggggcaagagaataacttgaagccgggaggtggaggctgcagtgagccgagatcgcaccactgcactccagcctggacaacaagagcaaaactccatctcaaataaataaataaataaaaatacaaaaattagccrggcatggtggcgtgtgcctgtagtgccagctacttgggaggctgaggtaggagaatcacttgaacctggaaggcggaggttgcagtgagctgagatggcaccactgcactccaacctgggcgacagagtgagactgtctcaaaaaaataaaataaaaaataaataaaagttatactatcatttttttctggaaatcttaagaatctatagcaattctgtctgtccaaggcagttcagagccacaggcatgctgcctatgccccgcccccgcccggcagacrtttctcagcagtcgcagcaggacttagcatctctggctcatctctttctgagggctccaggtgagctcttagagggtctttcagtctcctgggcctgtgaaaatattcccttatatacaaaccatggcatgatgtcatttgcacgtggagatgtgggatgcagaatatctgcctacctccaaaccagagctgttggacatggggaaggcttttgttgaaggtggccccttgtcagcaaggcccttatgctactcaacaagcatatatgtgacaagtgcccattctgggtctgtgccaccaagagagggtgggaggggggcaggtgtggaggggcggcacaggaacagggcattcgtctcagaatactgctgtctggcaggaaagtagaaacgaagccaayagtattaagccagggtggccggtgtcatataaaaatgcagggcaggagcyccttatcctgagcaggggagccagggaggcacatgtcctggaaggcggggagttttccaggggaggagaaaggctgcctttctgagacagtcaacaaatgtgcagaccacaaatgtggatgagcacactgtggtcatggcccaggaggccasgtgcaccatgcgcgcrcaattctagggggcgctggatcatcaygcagggctaactggcccagtatgctgtcagcatgtagacataatctcacttctgaatttaattaaatgygtgagttgcctcacagagttcrtaagtatattctgtgaacaagtgagataatacataaaaagtctttttttattttttatttatttattttttttgagacagagtttccctcttgttgcccaggctggagtgcaatggcgtgatctcgctcaccacaagctccacctcccaggttaaagcgcttctcctgcctcatcctcccgaggagctggattacaagcatgagccaccacatctggctaattttgtatttttagtagggatggggtttctccatgttggccaggctggtctcaaactcctgacttcaggtgattcacccaccttggcctcccaaagtgctgggattacaggcatgagccaccacacctggcctcccaaagtgctgggattacaggcatgcacaaccacacctggctaattttgtatttttagtagagacagggtttctccatgttggccaggctggtctcaaactcctgacctcaggtgattcacccaccttggcctcccaaagtgctgggattacaggcatgaggcaccgcatccagccataaaaagtagtcttttagttccttgagtgaaaagtaaattcaaatgttactttagcatttacattataggtgttagttatctattgctgtgtaacaaatagctscaaaacatagtggctttagaaaacaatcatttgggccgggtgcagtagctcatgcctgtaatcccagcactttgggggccgaggcgagtggatcgcctgaggtcaggagttcaagaccagcctgaccaacatggtgaaaccctgtctctactaaaaatacaaaattaggctgagcacagtggctaacgcctataatcccagtactttgggaggccgaggcaggtggataacctgaggtcaggagtttgagagcagcctgaccaacatggagaaaccccatctctactaaaaatacaaaattagccgggcgtggtggtgcatgcctgtaagcccagctactcaggaggctgaggcaggagaatcccttgaacccaggaggcggaggttgcggtgagcaaagatcacaccattgcactccagtctgggcaacaggagcaaaattccatctcaaaaaaaaaaaaaaaaaattagccgggcatggtggctcatgcctgtgatcccaattactcgggaggccgaggcaggagaatcgcttgaacctgggaggcggaggttgcagcgagctgagatcttgccaatgacactccagcctgggaaacaagagcgaaacactgtctcaaacaacaacaacgacaacaaaaaccaatcatttattatctcccatagtttccttgggttgtgaatttgggtggctctggcttaccatctttcatgaattgtagcccagtgtcagctgggactgtagcgatctgaaagctcaactagggctagaggattcattccaaggttggccctctcaagtggatggcaagttggcgctggcagttggctgggagcctcagctcctytccctgtgggcctctcctcggggctgcttgagtaccctcccaatatggtgaccagcttccccccagagcaagtgatcctaaagaccaaggcggaagcggcaatgccttttataasctggccctgcacacaccatcacttccaccatctttactggtcatttcrggccatcctgattcagcatgggaggagaccacacaaggcctgagggacaccygggggctggctcaccctgcactcataccaagctcaccctggctgccctctattccagctctctgcatttcgtactctcctgttttctgcacttggtgaagagaagaagatgayggtgaacaactatcgtccacttcaacccctgatgaactggaaggtctgggcgtccttccaggccactaatgagggcacaagatcctagagacattaggtccacatgaatagcagaactgactttgaaggaaggaagcgttgtttcccaagtttcacaatgtgattgtacgtgacttctgaaattaaaaagagagaatgaggttattgttttagtcaaagtacgtttcagctgcaagtgaaagaaagatgtgtaagtaccgtggggaacataacgctgggatggaggggtgtgccatggcacccaacgcaagtgcagggtgcttagtttcactgtaacaaagtaccacaaacttggtggcttaaaacaatggagactgattctcttacggttcagtgagccagaagcctgacaccaaggtgtccgcacggctgcttccttctgaggctctaggggaggatccttttccgtgcctttccagcttcagcttcctccttgtaaaaactcctggccgggcgcattgcctcacgcctttaatcccagcactttgggaggccgaggtgggtggatcacgaggtcaggagatcgagaccatcctggccaacacggtgaaaccctgtctctataaaaaacacaaacattagctgggtgcgtgtctgtaatcccagctacttgggaggctgaggcaggagaattgcttgaacccgggaggcagaggttgcagtgagtcaagattgcactattgcactccagcctgggcaacaagagcaaaactccgtctcaaaataaaaaggaattcttgtgaggccaggcacagtggttcacgcctgtaatcccagcactttgggaggccgaggcaggtggatcacttgaggtcagaagtttgagaccagcctggccaacatggtgaaaccccgtctctaccaaaaatacaaccaaaagtaatctggcaggataaaaccagaaaacacacacaatttgatgtcaagacctatttcaaaagctatagtaggccaggcgcagtggctcatgcctgtaatcccagcactttgggaggccgaggtgggaagatcacctgaggtcagaagttcgacaccagcctggccaacatggcgaaaccctgtctctgctaaaaatacaaaaattagctaggtgcggtggctcatgcctgtaatcccagctactcaggagactgaggcaggagaatcgcttgaatccgggaggcagaacttgcagtgagctgagatcacgccactgcactccagcctgggcgacagagtgagactccatctaaaataaataaataaaaataaaaagctatattaattaagataatgtggtacctgtcagagaaggacaaatcaaccaatgaaaaagaatagcatgtctagaaggttccacacatttgtgatccctgagtcatgctgtagggaatggttgggcttttctgtgaatagttttggatcatttggatacttatctatctacgtattgattgatcgatcaattcatctgtcgatccacagggtctcactatgttgcccaggttggtcctgaacccctgagctccaatagttctcctgctttgacctcccaaagtgctgggattacaggcatgagccaccccaccgagccaacgggatatccaaatggggaaccatgaatcttttttctcaccatacctcacacccctacctcacagcacacacaaaaattaattcctgacagactatagatctaaataggaaaggtaaaacaataaagctcctaaaaaataacataggagccaggcgctgtggctcacgcctgtaaacccagcactttgggaggccaagttccagactagcctgaccaacatggagaaaccccatctctactaaaaatacaaaattagccgagcttggtggtgcatgcctgtaatcccggctactcgggaggctgaggcaggagaattgcttgaacccgcgaggcagaggttgtagtgagccgagatcgcgccattgcattccagcctgggaaacaagagcgaaactttgtctcaaaaaaaaaaaaaaaaaaaaaaagacttgatccagaactcaaagttgggtctgagtgtggcttttctgtctctctttcgtgatgttgtctctctctcttggcaagctcattcttttggtggaaagagagctaccactcgtgccaggatggtttccattaattcatgtaacatttattgagtgccaattacatggcaggctctattctagactctggggacagagcctagactgtttcaggtctgaagagcctttgcctcggagctcacgttctgatggaaggaggtagaccacgatgcatcaacacagaaagtctggggtggtaagtcacagggagaggacatggctgggtggggaggtctcttctacaggggccatttgggcagagaccaaaggaggagtgaaccacatggctacccgagggcagagaattccaggcagaggctggaggcaggagcrcccttctggtgttcaaggtgcagcccgagggtgaggcagccaagtgcaggggtgaggagagaggcatgggaggcaagggtgggtactggggcccsataggctgggtggagactttggagctgctgctgggttctgagcaaagggcattttcgagtggaaaggctcagtttggctgtgctgccaaagagttttccaaagtggtcgttcctgtccttgccagcaggtcattgtgtgctttctggagggtgtgcccaggtgtctcctgtggatttaatttgcacttccctaatgattaatgatgtggagcactttgtgcagattcattggccatctgcatatcctctttcaccagacacctacttgagccatttgcccatttttctcttgggctgtctgtggttttcttagtgatttttaggagttctttatatattccaattataaggcctttgtccattttacaaatctcttctcccactctggggctgcctttcaccctctttttttttgttattttttgttttgttttgtttttgagatggagtcttgctttgtcacccaggctggagtgcagtggtgtgatctcagctcactgcagcctcaaccttccccagctcaggtgatccttctacctcagcctccccagcagctgggactacaggtgcaccaccaccacgctgggctagtttttgtattttttgtagagacggggtctccctatgttgcccaggctggtcttgaactcctgggctcaagagattttcccaccttggtctcccaaagggctggcattacaggcgtgagccaccgcgcccagcctccaagtcatctttcacacgcagagcacgcctgagagcagcaacaagactaacgttggggccaaagctaagaagtggggcggagcctccctggtggccggtcgtcagcccagtgcctgaaatgcatgcaaagtctatttttattttgcgtagttgaacctaagcaaaaaatctggccctacaatctctaaccttgctcctaactggcacctaccctattgcacaagaagctatctaggggaggactcagtgagcactcggtgagtttgcccagccatggtggtactgtctccttccctctgcaggcacagcgggaagaatagggtggatggagggctctctgcaccttccacagcccgcagcgtggacggcagattacaagttagtatctgtgcgacctccgcactcccctgccggtggctgcctgggctgctgagatttcgcttggttttatcactgcagaggaatgcctgccataccggggggcgagcaaggtccagaatgacaagccgtggcattcctcagccgcctcctccccggggtggggcctggacattcctggctgcagctagaggtcccagcacgacagggattctgaccccccctccaccacggctattgttcaggattctgtggattccagaggcatctgcccagcagactgtcttgctgtgaacacccagctctgcaaccggtgtttgcgtgtttgccctgggaggctgaacgctcacccagaacaaaggcctccccacatgcctgctgtgagcttccaagtactcgttaggacacacgccaaggaaccccgggttggggkgataccgaggagcttcctccctgacccacacacaccctttgaasaggtctttggctgctcaccagtctggtcaatctcggggcagtatttatattccttcccgtttccaggcctaggagccttggcatcctgctctcgcctctaactgaaattacctctcaaccctttttagctaagatgcctctcgcattccccaggaataacaagctttaaagccccttcacactgaagcctgcctttgaatttcccagctagatttgggggtgggggtcttatggctcccggtgaacccccggttctgttgattaaattgagctcaggcagagtgctggcttcccaaagcctgtgttattactgcttctcaaagctacgggcaccggatcgccatctttggcaagattcttttgggatacaatgggaattactgggtggcctcggttcggttcttccctcgtctcagttcgcggctcaccagccacattgatgcagcccccaggctggaaggaggctgcaggagcttcccctcaggtcatcttctcatccctcccccgtgccccaggagctggttgtgggggcggttccatcccctcggcccatccgggacaggagcctaggttcccttcggggggtaccccaaaccccatccttggcctcaggccagccctggtgcactgcccgctcccaggcttgacgagaggctgcgggccagtgggtgaaggggctcgccctgactgccaggccccgcccaggcgcacccgggaggacgggstgggatgacgcgggcgccgggggggtaggtcgcgaggccggggtctccatggcgcaggagtacgggggccttcgaggaccacgcgggcctgggaatcgcctgccaggctaggccggacgacgcacgtgctccgagctgggtcgagggggcggggctgagggccgcggccgggccacgggkcggggaggagccgcggacggtgggcggggccagcgggccggggcctaaaaggcggcgcgggcggggttcttgacgcagctgcgggcggcgagcggcgcgcacaatcctcgctcggctgcggctctcgggtgtcccaggcccggccggtaagcagagcatggcsggtgcgggcccgaagcggcgggcgctagcggccccggtggccgaggagaaggaagaggcgcgggagaagatgctggcctccaagcgcgcggacggcgcggcgccggcaggcgagggcgagggcgtgaccctgcagcggaacatcacgctactcaacggcgtggccatcatcgtgggcgccatcatcggctcgggcatcttcgtgacgyccacgggcgtgcttaaggaggcaggctcgccggggctggcgctggtgatgtgggccgcgtgcggcgtcttctccatcgtgggcgcgctctgctacgcggagctgggcaccaccatctccaaatcgggcggcgactacgcctacatgctggacgtctacggctcgctgcccgccttcctcaagctctggatcgagctgctcgtcatccggccttcatcgcagtacatcgtggccctggtcttcgccacctacctgctcaagccgctcttccccagctgcccggtgcccgaggaggcagccaagctcatggcctgccactgcgtgcgtgagtacggggcgcsggccgggggttgggaggtcgtggtccctgggtccctgcatccttgcatcactacgcccctggctcccacatctctacatttttgcgttcctggaccgtcccggcagttctaggctaaggtcattggtcccagaaaccaagtgcgtttctttcattcattcttttacacttctccccacrggctgggaatatcttcagtgacgggacagcagggtccctgccctgcccttcggtgggcatttcattcccccacttaagcggttcaggcaagtgccagcctcccgttggccccgctgagcaatactcccagcctcttgcgtggcacccacgtggagtaactgagcaaccggtttattgttaaagctccgattgctgactggttgttgaaaacgaaattgcagttgaaaagaaa

SEQ ID NO: 94343 - DNA, 67228 bp, Homo sapiens
gaagagagtctcctagaccacattttttttttttttttgagacagggtctcagtgtctcgcccagattggagtgcagtggcgccatcttggctcaccgcaaccctctacctcccaggctcaagcgattctcctacctcagcctcccaagtagctgggattacaggtacatgccactaccacccggctaactttttttttttttttttttttgagacggagtctctctctgtctcccaggctggagtgcaatggcgcgatctcagctcactgtacctccgcctcctgggttcaagcgattctcctgcctcagcctcccgagcagctgggattacaggcacgtagcactacacccggctaattttttgaatctttagtagagacggggttttaccacgttggtcaggtggtcaggctggtctcgaactcctgaccctgtgatccgcccgcctcagccttccaaagtgctgagattacaggcatgagccacagtgcccggccactagaccacatttctaaaagctttacagtgtggtcttttgcgtttggtgacagtcaaccttgggttgactgtgttgaggggagtccatgtctgtttggctggcatctgttgagcactttctaagttctgcacatggcagcaacactcttcattctgggtgctttatcctcacaaccaccctgtgagggagggtttattttattgtcattagttgggttttttgtttgtttgttttgttatgttttgttttgttacagggtcttcttactctgtcctccaggctagagtgcagtgtgacaatcttggctcactgcaggctcaacttcccaagctcaggtgatcctcccacctcagcctcctgagtagctgggactataggcatgtgccactatgcctgggtaatatttgtgtttttagtagagatggcgttttgccatgttgcccaggctggcctcaaactcctgagctccagtgatccacccacctcggcctcctaaagtgcttgggattacaggcgtgagccactgcacatgggcatcattacattggaaagataaggaaacggaggctccaggaggttatgaaacatgtctgaggcttccatggagcaggaaacaagccctgatggtttgtgtgggctgggagtccggctggggctggggcttgtcccttcctgtccctgggccttggtttgagccccagcctgtgcagtgagtgtggaatgctggtgtccactggtggtttctggcctgaattccaagctccaggcacgttctgtgcctgagcagctgaggctgagctcaaagggtgtctggccacttacaagccactggacactcagcagaatgccggattgggcatctgcaaactctcccatgagagtggaccctcggtgaccctgaacaggctaatttgccttgtgagtcctagtttcactgttttcacctctaggatggggattagactagcccccacctcagtgttgggagggcgctcaggaacttgcagcatgaattttaaattatttctattactactgtgtgtgagtggttctccctggtggggcagcaacactcagctgagaaggtggaggtgtccaggcaagtcccagatagcgtctgtgaaccccacccggccctcctgcagatggcggtggccctttgaggcccagaccaagtggcaggaccgataaggcctcctatcctgccaagggcaggcccaggctgggaggaagggtcaggggtttcagtttccaaaaatctacttaccgtcaaaaaagcaggtcatgaaacagctatttaaaggtaaaatgaggagacttggaggtgtggggtcttagcagagaagagcctgaggatgtcccctgtagcaaatggaggttggccctggtgcttcattgtccaggagaccctgggagaacttagagctgggactcactcagggaccatctgctctgaaccctgttactggtggggaaactgaggtccaaagcaaggcccactgaccctcaggccagcgtgtgacaatgatgtctcatttctgtcacagccaatgaggtgcaaacatggacatgagggtggcgctgggatccagagtgctgcttcgagggcagggacgcacccaggacctctgtgggctggggtcatggtgagctccctgcactttcaccagttcgagctctcattatgactgacgatagtcagaagaatgaacaatgagtgccagggttactggcaggaggccaaccctgagagggtaaccgggggaacagtgggatcctttgagcccagagatgtccagtctggagccccaaggttctgcccattggggcagcagcacgattaggtcagaagagcgagacctgagtcacagtcctgctccattcgcatggtcgctgtgagggtccctgtgaggaggcctccattaccaccaccggccactgccctgggttcccccacccccatctgtcccatctcacccctccagcctcaagccctgctcctgcagtctcatttccatcccagaggcactcctgggaagtgcgggagaactcacaaaccttttgattatacataaaatcaaaacatggacaacggggataaagccttgcaaaatgtgtagcagaggttatgtattcctcagaaagaacacagccagaccatccaagaacagaccacctgtaaagaaaacaagaaaagcaattctctgcaaataattaagtgatgcagctctccctctcaatcaaagaaatgcaacatagaacaagacaccattttcctttctgggaatttcaggaaaaaaaaaaatgttatgcaggccgggcacggtggctcacgcctgtaatcccagcactttgagaggccgaggcgggtggatcaagaggtcaggagatcgagaccatcctggctaacgcggtgaaaccccgtctctactaaaaatacaaaaaaattagccggacgtggtggcgggcgcctgtagtctcagctactggggaggctgaggcaggagaatggtgtgaacctgggaggtggagcttgcagtgagctgagatcgtgccactgcactccagcctgggcgacagagcaagactccatctcaaaaaaaaaaaaaaaattagcctggtgtggtggcgggcacctgtagtcccagctacttgggaggctgaggcaggagaatgatgtgaacctggtaggtggagcttgcagtgaactgagattgtgccactgccctccagcctgggtgatagagcgagactctgtctcaaaaaaaaaaaaaaaaatgttatgcagccctgtgcaagaaaacgcacctgttggtactgttgagccatttcaaatgcacgtacccttcaccctggtgaggccaatccacaaatttgttctgcaaaatacacattagtgtcagtgttggtgcaagagggttacttgcaacagtgaaaatgctcatccctcagtcaagtggttaggttctgatgcatttgatgtgcttgggaaagttctggaagcagccaaagaagctcattacctttagttacctcctggggaagcctgggatagggtaggtggggtgattttttaaaaaacaacttcattgagatataatttaccataccataccaatttgcataccataaagcttatccacttcaagtgtacacttccatatcttttttttgtttttgagatggagtctcgctctgtcgcccaggctggagtgcaatggtgcgatcttggctcactgcaagctccgcctcccgggttcacaccattctcctgcctcagcctcctgagtatctgggactacaggcgcccgccaccatgtccagctaattttttgtatttttagtagacacggggtttcactgtcttagccaggatggtctcgatctcctgacctcgcgatccgcctgccttggcctcccaaagcgctgggattacaggcatgagccactgcgcccggcacttccatgtcttttagtgtattcgcgttctcagagctgtccaaccattaccacagtcaacgttagaacattttcatcactccccttcaaaaaacccatgaatcgctccatatttcccctgaccccctggaagccctaggcagccactaatcattctgtctctatggatttgcctattctgggcatcttatataaatggaatcatatattagtgtgtcttcaagatggattcatgtgccgtacttcattcctttttatggctgaatagtattcccttaaacaaactataccatattcacccattcatcaattgatataccctaggattgcttccactttgggctattatgaataatattactaagaacacacatgtttttgtgtggacatatgctttcatttctcttggctatatatctaaaagggggatttgccgagtgttgtgttaactctaacctttcaggaactgccagcctgttttccatagcgagtgtagcctcttacattcccaccagcaggagagagattcccgtttctccacacccctgctgacgcttgtctttttgattacagccatcgtaggaggtgtgatgtggcatctatttgtagttttgatttgcatctccctaatgcctaataatgttgagcatttttaatttctgttttgcccaggctggtctggagttcctggcctctcagcgctggggtcacaggcgtaagcctctaccagttgagctgagcatcttctggtgcttattggccatttgcataatgcactggaaaaatattcatatcctttgtgcatttttcaattgtctttttattgttgagttgtaagtttcctccattctagatacaattcccttatcagatatgtaacttacaaatattttctcccgttctgtgggtggacttttaattttcttgatggtgtcctttaaagcaccgaagtttttgttttgttttgagatggagtctcgctctgtcgccaggccagagttcagtggcacgatctcggctcactgcaacctccgcctcccggcttcaagcgattctcctgcctcagcctcccgagtagctgggattagaagcaggcgccgccaaacccagctaatttttgtatttttagtagagagacggggttttaccatgttggccaggatggtctagatctcctgatctcatgatctgcccacctcggcctcccaaagtgctgggatttcaggcgtgagccaccgcgcccggccgcagtaaagtttttaatctgatgaagtttaatttattcttctgtagtcgctcctgcctttagtgtcactgcctcgcccaaggtctcaaagatctcctgtcggcttccaagtgttttttttttttttttttttttttgagacggagtctcgctctgtcgcctaggctgtagtgcagtggcgcaatctcggctcaccgcaagctccgcctcccgggttcaagcgattttcctgtctcagcctcccgagtagctgggattacaggcgcccgccaccacgcccggctaatttttttttttttttttgtagagacggggtttcaccatgttggccaggatggtctcgaactcctgacctcgtgattcacccgcctcggcctcccaaagtgctgggattacaggcgtgagccaccgcgcccggccttttttttttcttttttctttctttctttcttttttttttttttgatacggggtctcgtcgctctgtcgcccagggtggagtgcaatggcgtgatcttggctcaatgcaacctccgcctcccgggttcaagcgattctcctctaggattacgggcgcctgccaccacgcccggataatttcttctaatttttagtagagatggggtttcactatgttagctaggatggtctcgatctcctgacctcgtgatccgcccgcctcggcctcccaaaatgctgggattacaggcgtgagccaccgcgccccgcccaagtgttatttgtaaaacgaagaaaccaacatcgagagggacgctgactcgaccccgcgcctttcccatccgcaccagcaagagggcccctgtgccccaaacgcgaaccgtacggctccagacagcaccgcggaactcggtggcttccagaaggccccgcgcctgcgcattccgctgcctgcgcctgcgcctgcgcctgcgccgttctcccggccgccgccttagcacctcctccggacggtgtcgccgaagtctcgcgagcccggagcgtggcacgtgggttggtaactgtggcgctgctccctccaccacmacccctgtcctcctcaggccccctccgcctccacccctgccctcctcaggccccctccgcctccacccctgccctcctcaggccccctccgcctccacccctgccctcctcaggccccctccgcctccacccctgccctcctcaggccccctccgcctccacccctgccctcctcaggccccctgcgtccccgcctcgtcctcctcaggccccctccgcctccggctccgtcctcctcwggccccctccgcctccggctccgtcctcctctggccccctccgcccccggccccggccccacggcgggatgcgggacaacaccagccccatcagcgtgattctggtgagctcggggagcaggggcaataagctgctgttcaggtaccccttccagagaagccaggagcacccggcgtcccagacaagtaagtgagcgctgggcgggggcctggcgctcgcgggggccgcctcattccggggtcgcctcattccagggccgcctcgcggagcttagcttttgctgggcattcgagatctgctcgttgtagagtatttgaaaagtagaaaaaggaaaaaaaaaattaaaatcatgcattgttcaccacaccaaagcaactactgctgacatttcatcagtctccagcctttaaaaaataaagtaaaataaaataaaatgagtttgggatgtattcatcatgagaaaatacaaaattacacgaacaaggccggtggcggtaatcccagcactttgggaggccgaggcgggtggatcacctgaggtcaggagttcgagaccagcctggccaacatggttgaaactctgtctctactgaaaaaataaaaataaaaaaaaacaaattagccgagcgtggtggtgcgtgcccataatcctagctacttgggaggctgaggcaggagaattgcttgaacccgggaggcggaggtttcagtgaaccgagatcgcgccactggattccagcctgggcaacagagcaagactccgtctcaaaaaaaaaaaaaaaagttacgtgaacatctgaagttgtctttgccacccccagttcyagcaagcacagggatcacccctggccgtgttgggagttgtctgccctgtgcatagatgcagatctatccacaggaaaagrgaacgtcgcgtgaggtttttcatcgcacgaattgttctgtggcgcccttttcccatagtcggccttggagctccgtctgcctttgcaagcagggatcaacctcacccttggctgcaggctgctgccttcccctgtggacggcatgtaggttacttttgatttttcatcatcatgaatgttcagtttttgtttttattttatttattttttgagacggagtctcactctgtcgcccaggctggagttgagtggcgtgatctcggctcactgcagcctccacctcccgggctcaagrgattctcctgcctcagcctcccaagtagctggggctacagggcatgtgccaccacaccctgcaattttttttttttttttttttttttttagtagagatggggttttgccatgttggccaggctgatctcgaactcctggcctcaaatgatctacctgcctcggcctcccaaagtactgggattacaggtgtgagccaccgcacccggactgttcagtttttattttgtattttgttttaaaattatttttaaacttgttgatatggcagaaagttttaaagatacaaaggagtttagattatgaaaagaaagttctttcctwctattggcccccagccctcagtttccatcataggggtaactactgttcccatttttctgtgtctttccaggaccttctgtgtcaatacaggygtatgtatttcttttttctttttttttttttttgagacgagtcttgcagtcttgccaggctggagtgcagtggcgtgatctcggctcaccgcaacctccgaccccctgtcaagcaattctcctgcctcagcctcccgagtagctgggactacaggcatgcgccaccatgcccagctaatttttttttttatttttagtagagatggggtttcaccatgttggccaggctggtctccaactcctgaccttgtgatccgcccgccttggcctcccaaagtgctgggattacaggcgtgagccaccgcgcccagcctgcacttgtgttttttttctaagcacaagcaaagtcacaccatacacactgttctgcccctgttttcgttttcacttcatgtctgcatctttgatgtagatcagaacctgtcgagcacccttgtccttcttaccggccacggtgaattccatgagatgaacatattgtgatttgtttatcgtgtccttttggttgatggacgcaaaattgttttcaatcttttgctaatacgaaaagttcaaacgttctttccaggtattgtcattttgcagaattcttgtaatattaaatccccaaagtagcatggttgggtctaagggataaagagcatatttatttttaataggttagatttttcaatctttgttaatctggtaggtgaaaaattatatctggtagtaattttaatgtttatttgccttttaattgagatagaaagcatattttcctgtttttggagccatttggatttccttttcagtgaatgacttatttataacctttgcctaatgttctcttgggttgtttgattttttttccttatagatttgaaggagttctttatatatttaatgtaaaaataggtcttgggacaaagctatagtcaccctgtttgcttctgtgtagttcttgccagagttttgatttttgtggagttttcagtctaatctcttgtggtttctgagttttgttttaaatggaaaggcgttttgctctccmaaattattaacaacaacaataaaaaactcccttattttcctccagactgtttatgtcttttttttttttttttttttttgagacagagtctcactctgttgcccaggctggagtgcaatggcctgatcttggctcactgcaacctctgcttcccgggttcaagcgattctcctgtcccagcctcccgagtagctgggtttacaggtgcgtgccaccacgcctggctaatttttgtatttttagtagagatggggtttcaccatatcagccaggctggtcttgaactcctgacctcgtgatctgccttcctcggcatcccaaagtatgtcttgtttttaaatgtgtttgtcttggcataaggtgaaggctaatcctaagagctgatattttctgggctcttgtgaagagttgcagatgaactgcatggttgcctttggagccctgtggaactggagttataacaggccacaacgtggccaaatgatgattgattgggccaacataattttcttttccatatggctatctggtcccaacataattttattgaataattcaccttayttccactaattgattctgctstctttatcgtgctaaattctcacgtttacttggatctattttttgtctttcttatctcctccaatgatctatgtgtaggttccataataattactgtgacttggccgggcgcggtggctcacgcctgtaatcccagcactttgggaggccgaggcgggcggatcacgaggtcaggagatcgagaccatcctggctaacaaggtgaaaccccgtctctactaaaaatacaaaaaattagccgggcgtggtagcgggcgcctgtagtcccagctactcgggaggctgaggcaggagaatggcgtgaacccgggaggcggagcttgcagtgagccgagatcgcgccactgcactccagcctgggcgacagagcgagactccgtctcaaaaaaaaaaaaaaaaaaaaaaaaataataataattactgtgactttatgttatactatccgtaaggttagtcacttgtcgttacttttctttttcagcgttatcctggctgtgctttattatttttccctgtaaactttcgcatcaagtgcattaggtcccactcccaagctcttggtgtaggtagctttgaatctgttgattaactgggaagaaaaagcatctttatgttgaatcttcccgttcaggaaaatgatatgtcttcaattcatttttttctcccttattagcttttccattgttttcatgggccttttgcactcttcttagattcatcactaggtttttaaatttttttactccgggaaagtattattgtttgtgtatatgaaggctcttggtgtatgtacatttaaattttttttattttgcctatgctttttccaacctaattgtcatcccacactgtgagggggtgtgtgtgtgtgtgtacatgtgcataggggcctacctcactttattgtgttttctacaaattgaaagttcatggcaamcctgtgtccagcaagtctgtcagcaccatttttccaacagtatatactcactttgtgtctctgggtggtgttttggtaattcttgcagtatttcaaactttttcattattattgtatctgttacggtgatacatgatctttatgttactattgtgattgttttggggtaccaagaaccatgtccacataagatagcaagtttcatcaataattgtgtgtattctggctgttcgcccatctgtttccatctccttggaccaccctgttcccttagacacaacaatattgaaattaagctggttatctacagtggcctctaagggttcaagtgaaataaagaatcacatgtttctcacattaaatcaaaagctagaaatgattargcttcttgaggaaggcatgttgaaagctgaactaggccaaaagctagtctgcttgcacaaaacagccaaatggtaaatgcaaaggaaaagctcttgaaggaaatgggaagtgttactccaagccaggcctgcacctgtactcccagctacctgggaactgtaggcaggaaaattgcttgagcccaggagtttaaatctagcctgggcaacatagggagaccctgactcttaaaacaaacaaacaaacaaacaacgctaggcacagtggctcatgcctgtaatcctagcactttgggaagccgaggcgggcggatcacgaggtcagaagttcgagaccagcctggacaacatggtgaaaccccatctctgctaaaaaaaaaaatacaaaaattagctgggcgtgttggcccatgcctgtaatccccagctactcgggaggctgagacgggagaattgcttgagcctgggaggcagaggttgcagtgagctgagatccgacattgcactccagcctgggcaacaagagggagactctgtctcaaaacaaagcaaaacagaacagtgaatgcatgataaaaaggtaaatagctttgtttgttgctggtatggaaagttttagtggtctggatagatcaggccagccacaatattctcttaaaccaaagcctaatccagaaaaaggctctaactctctttaattctgagaaggctgagagaggtaaggaagctgcagaagaaaagttggaagctagcagaagttagttcatgagatttaaggaaagaaaccatctctataacgtaaaagtgcaaggtgggccgggtgcggtggctcacgcctgtaatcctagcactttgggaggccgaggtgggcggatcacgaggtcaggagatcaagaccatcctggctaacacagtgaaaccccatgtctactaaaaatacaaaaaattagccgggcatagtggcgggcgcctgtagtcccagctacttgggaggctgaggcaggagaatggcgtgaatccgggaggcggagcttgcagtgagccgagatcccgccactgcactccagcctgggcgacagagcgagactccgtctcaaaaaaaaaaaaaaaaaaagaaatacaatttgtaaggctatagctgccatagatagtgattccttggacagatcagggcaaaataaattgaaaaccttctggaaagcatgtgccattatagatgccattaagaacattggtgatcatgtcaaaatatcaacagtaacaggagtttggaaaaagttgattccagctctcatggatgactttgaaggagtcraaacttcagtggaggaagtaactgcagatatggtggaaatagcaagagatctagaattagaagtagggcctaaagatgtgactgaaatgctgcagtctcacgataaaacttgaacggatgaggacttgattgttatggatgggcaaagaaagcagtttctgggctgagtgtggtgactcacgcctgtaatcccaacacttgggaggctgaggcaggtggatcacttgagcccgggagttcgagaccaacctgtgcaacatgacaaaaattcatctctattaaaaatacaaaaactagccggacatgggtgtcatatgcctgtagtcccagctactcaggggactgaggtaggaggatcacctgagccttgggaggtcaagactgtagtgaacggtgatcacaccaccgcactccagtctggatgacagagtgataccctgtctcaaaaaaaaaaaaaaagaaagaaagaaagtagcttctggaaatggaatgtattcctggtaaagatgttgtaaacattgttaaaatgacaacagagatttcgaatattatataaacttagttgataaagcagtggtacagtttgagagcattgcttccaattctgaaagaagttctgtggtggataaagtgctgtcaacgtcccgtacgacagagaaatctttcatgaaaggaagagtaaattgatagatgtagcagaggtcattgttgtcttattttaagaaattgctacagcaccccagccttcagcaagtaccactctaatcagtcaacagccatcaacattgaggcaatacctttctccagcaaaacgattgttttgctgaaggctgagctgattgttagcgttttttttttttttttttttttgagactgagtctcactctgtcacccaggctcaagtgcagtagcacaatcctcatcctcctgagtagctgggattacaggtgcccaccaccatgcccggctaatttttttttttttttttgagacggagtcttgccgtgtctcccaggctggagtacagtggcgcgatcttggctcactgcaagctctgcttcccgggttcacaccattctcttgcctcaccctccagagtagctgggactacaggcacccaccaccacgcccggctaattttttgtatttttagtagagacggggtttcaccgtgttagccaggatggtcttgatctcctgatttcgtgatccacccgcctcggcctcccaaagtgctgggattacaggcgtgaaccaccgcgctcagccatgcccggctaatttttgtatttttagtagagacggggtttcgccatgttggccaggctggtttcgaactcctgacctcaggtgatccacccaccttggcctcctaaagggttgggattacaggcacgggccaccgtgccttatcactgtttttgaagataacataagatttgtcattttaatgatttgtaagtgtataattaagtggcattaattacattcattatagtgtgcagccattaccgctatctgtttctaaagctttttcagcacgtaaactgaaactctgtaaccactgaccaataactcttcatttcccctgctcccagcctgtgctaacctctaatctactttctgtcttgatgcatttgcctgttctagacatttcatatactgtaagtgcaccatttgttcttttgtctctggcttattcagcatgatgttgtcaaggttcacccatgttcattcctttttatgtctgagtaatattccatggtatggacagagcatgttttggaaaacatggctgttaacggttccataaccctcctgtgtgtggaaggaccctgttttcttagcccttcccctcttttcgccccgactcaggtaagccgcgtagcagatacgctgccagcaacacgggcgaccatgctgatgagcaggacggcgattccaggtaaaggctctgcggccacttcagggcggggcgtgtcctggtcccaggcctgggcaaagccccaccctcctattcacccagatgttttctccctgagaagtctggtgtttgtttttttccgtttagtgggtgctctcaggtagtgtagagtggaggactgcgtagacagtctggggcttgctgaataatttgggcacctgttccagcttcaggcttgtctggtgggtgaagcaggtcagagcacagatgaggccatgtccacgtgagatgtttatctcctatgaaagaaacatagaggaaagcagacccctatgttgttgtctttggatctaattccttgagcatgtacccagaggtcaaatgcaggtgcttgggtttagcacagcctggtcaagtcccttcttggtgtccaggctcaggtggtgatatgggcagtggggcttagagctgggatggtgtgaaccttgatgttctttgatgttcttttaggcacagatgaaaggtggatccggttccttcctgtgtttgtgcccctgctctctctgggaggcactaccagggtagaaactttagaaatgaccacttctgccttctgttcattttgaagcatagtaaatggtaacataggcccaggtgagggagggaagattgtgagttacctgccctgggttcccttaaacacagacaaggcctgtgtggagtaaaggacttggcttccactgtcccgggaaaaaatagctaagatccctatgctgggcctttgctgtgcagtgaggtagtgctgtttctctgcagttctctgacaaggcagcaccacacctgccatggcaatttgcaagtctttttaaaaaaattttattgattgattgtagagatggggtcttgctttgttgcccaggctggtcctgagctcctggcctcaagtgattttccttccttggcctcccaaatttttgggattacgtacataagccaccatgcctgaccacaatttgtggttccaagagtgtgatttttatcatcatttgggaggatgttggggcctctggcatgactgatgactgtctctgagtggagtgggctttggaagggcgatggggcttgctggacaccccattggaccgtcattttgatgtagaggcctgtggttgtcttgccctttaaatgtggtggtggaacaaactctggtttgtcacaggcatatagaatgcttttgcccctgcacagtgggtaggtatttcctgttctccctccacctgtgccacagatcagcttagagcagggctggctgctggccaccccccacattagccttactccaagctgcagtggatgtgaggcccaggctgctgaagactcagaaggaaggctggcagtacctaattcctgcagttaattttcagacttataatgacatgaccatgaggatattttctagggaattaatttaatatttaacgtaatgaagaggtaaaactgtgggaggggcatgcttctctctagaatcttttattgaagaattgcttcattcagtaattttagcacatcatatatctgtaaatctcactggtgccacccatgttttccagatacagggttcatacccttaggggctcagttcccctcctggtttattttgtcacgtaggcccgcaagcccctgctctgccttgtcatagctcagagcatgttcctggagcaaggcagtgaaagtgcatcaaatccactctctgtgtctttgatttttttttttttgagacggagtctcgctctgtcacccaggctggagtgcagtggcgcgatctcagctcactgcaggctccgcctcccgggttcacaccattctcctgcctcagcctccggagtagctgggactacaggcgactgccaccacgcccggctaattttttctatttttagtagagatggggtttcaccgtgttagccaggacggtctcgatctcctgaccttgtgatcyaccagcctcggcctcccaaagtgctgggattacaggcgtgagccaccgcgcccggcccgtgtctttgactgttgttcccaaaagtgcttttctttctgaaaccagagcttcagtttaccagactgaaacagtattaacaggctacacagtgacttgtgagtggtcgtggcctgccttagaaaagtgaggacacagccgtgctgctcactattacaaacactggccagtgtggccatttaaattgaagttaactgaaataggccagatgtcgtggcttatgcctgtaatccaagcactttgggagtcccaggcagatggatcacctgaggtcaggagacagcctggccaacatggcaaaaccctacctctactaaaaatacaaaaatttgtcgggcatgggagcacatgcctgtaatcctagctactccggaggctaaggcaggagaatcacttgaacttgggaggcggaggttgcagtgagctgagatcacrccactgcactccagtttgggcaacagaacgagagtctgtctcaaaaaaaaaaaaaagaagaagaagatggaaattaactgaaataaaaaattcacttgcggccgggcgcagtggctcaagcctgtaatcccagccctttgggaggccaaggcgggcggatcatgaggtcaggagatcgagactcatcctggctaacacggtgaaaccccatctctactaaaaatacaaaaagttatccgggcatggtggcgggcgcctgtagtcccagctacttgggaggctgaggcaggagaatggcgtgaacccgggaggcggagcttgcagtgagccaagattgtgccactgcactccagcctgggcaacagagtgagactccgtctcaaaaaaaaaaaaaaaaaattcacttgctcagttgcactggtcacatttcaggtgctcaatgtctatatggaaatagtgtctaccatattaaatggttcagatttggaatattcccatcacagtagaaagttcttttggggccgggagcggtagctcatgcctgtaatcccaccactttgggtgtccaaggcggggggatcacttgaggccagatgtttgagaacagtctggacagcatgacgaaaccccatctctacaaaaaatacaaaaattagctgggttggtgacctgcgcccttagtcccagccactgcggaggctgagggagcccaggacatggagcttgcagtgagccgagatcatgccgctgtactccagcctgagccttgagtgacagagtgagaccctgtctcaaaaaaaaaaaaaaaaaaaaaaaaattggacagtgctgtcttagagagggggctagttttttgaggtgcatcatcaagatatggttcagggctgggcgcattggcccatgcctgtaatcccagcactttgggagactgaggtaggcagatcgcttgagctccggagttcgagaccagcatgggtaatatgacgaagtcctgtctctaccaaaaatacaaaaaattagcctggcatggtggcacacgcctgtggtctcwgctactcaggaggctgaggtgagaggattgcttgagcctgggaggcagagattgccacaagccaagatcacattgctgcactccaacttgggtgacagagtgagacccccctctcagaaacaatttaagatatgattcaggttatagagattaactcttayttattttttataatccttttctataattcaattatgagaaaagaaaatggatattgtccagtgtctctaagacttgaaaccaaggtcagaaaagatgyagtgttccctgggtattaggggccatggtgctcatgtttaaatgtaccgtgtgtccccaccactggtaggggcagaagccatcaagccaggtctgagagatagcctggtgtccctcagaaaggctggtgtgggcatgtccctctctgtgtggacaccgtcttcctgctcccttctttgaaactgcgagcagtgcttaggccactacctcagagaatggggagctagaggtttagagaagaactgatttctttcattttcaaaatgctctgaaatcatattattattattattattattattattattattattattattttgagacgtagtttcattcttgttgcccaggctggggtgcaatggcrcaatctcggctcactgcaacctctgcctcccaggttcaagcaattctcctgcctcagcctcccaaagtgctgggattacaggcgtgaaccactgcacccggcctaattttttttttttttttaacagagggtttctccatgttggccaggctggtctcgaactcagcttggtcaacatggagaaccctgacctcaggtgattgaactcctgggcttaartgatcctcccaccttggcctcccaatgttctgggattacacgcatgagccccctcacccagctaccagctctgcctttaattctcaggtgacatcttggggaatcaggtggcactgctactgtcctcaggcttggccacttttgtagcagtgtacccaacttgtggctgcacttgggcctaggccagatggggtccttggccaggcaggcactctctagctcacaacatacaggtcctcccaccaggcacacatgaggctctgccagggcctctcttgttaggtttgcctctattagcttgtgtttttagagccctacactgatgtgttagaaagatgccctctcctttctgtagctgaggttgacacacaagaaagcaggtaggcatttttgtccccaggcttgggcacttccctctgcccagccatcryatccatgctgcagggcagtgtaaagggacaagtgcaggttcagggttccaagtttgactctcgctttgcagccttcggtgtgtgatcttgggcacattctttagaatgagccttagttccactgttttctgttaagatgcctgagggtggtgagttgccttcacctcttcctcccagatcaggatgttgtaggaccatccttgtctctgagtgttagctgatggccctgcctccctcagaggggcagacgcaagtctgtaaaatgctcctgtcaggaaatggagcattgccggactcagaagccctctgtgcttactccttttcctctggagcaaaggggttgcattgtgacttgtctagttgtaggaggcagagcttacagtcaggcttcagcttcgaggattctgacttcttgggtgatcttgggaaaatccatgaaacatcttaatgctttcatactgtacaacctgaggagcttggcagctgctgaggaaagagatcccttctgtggatctttggcagagctcccacaatgtttcyactcctggattcaggtctcctttctctttccagaatacatgraaagcagtgtgtcccagaactcaaatatctgcagaggaaaataaaggtttttttttttttttttttttgagacaaagtttcactctgtcgcccaaggctggagtgcagtggtgtgatctcggcttgctgcaacctcacctctagggttcaagcgattctcctgcctcagcctcccgagtagctgggattacaggcatccaccaccaaggtgagctaaktttttctttttaagtagagacagggtttcgccatgttggccaggctggtctcgaactcctgacctcaagcgatccacccacctcggcctcccaaagtgctaggattacaggcgtgagccatcgtgcctagccagaaagtaaactcctaaactgtttctaaaaatctcaactcaggtagtgcaraagcccagatgttttctgacaaatatatatggatccaccatgaccactttattgctccaggcagaggcttagggaagtcaggtgtgctggcagtcacagtatctcaagaattggagctggtgaaattcatatgacacgctatagttttcagaaggcttttgcctctgggagtcttatgtgatcctcggtaggcgatttcttgtcatgcagatgagaaaacttttaccacaaagattagttttaggctgggtgcagtggctcacgcctgtaatcccagtactttgggaggccgasgcaggaggattgcttgaccccaggagtatgagaccagcytgagtagcattgtgagaccctgtctcttttgaagaaaaaaaagaaaaaaggaaaaaaaaaaagaaaagaaaagatgagatacttctgcacaggcatccggctaatacatatggtgctgggtctgacccagctctgccagccttgtgcttacttctgaaaaatgacttttgttcctgcccagcctgtacttctgtgtgagaatttgacttttagygagaaaaccccatggtaagcgttgagtgtggggagcgtgtgaccctgtttctcagcgtggggagtgtgtgaccctgtttctcactgttgggagtgtgtgatctgtttctcagcgtggggagtgtgtgatcctgtttctcagcgtggggagtgtgtgatctgtttctcagcgtggggagggtgtgaccctgtttctcagcgtggggagtgtgtgatcctgtttctcagcgtggggagtgtgtgatctgtttctcagcgtggggagtgtgtgaccctgtttctcagcgtggggagggtgtgaccctgtttctcagcgtggggagtgtgtgaccctctttctcagcgtggggagtgtgtgatcctgtttctcagcgtggggagtgtgtgatcctgtttctcagcgtggggagtgtgtgaccctgtttctcagcgtggggagtgtgtgaccctgtttctcagcgtggggagtgtgtgatcctstttcttgtctggtaagttgcttagtcgtgatggtcaacagttaatgcttaatggtggcacttctgctagacttttgtgcagtttttataaaatagccttgtaacttttcatggtttttaaaaaagtgatatgtttttgtttggtcttgatggtcctgttcccatttcagcgagccatgtcctccaaccgatgagcaattggttgcagggtaagaccgagacctctccaccgtctttctgtcttgattccggctgccttctcttcttgtaattgtgcttaattcctgatttccctccatgttgaagagtgactgatgaggcacacaggcgtggacctcactgccccagttcccccatgaatgcccagacttcccaccaccccggctttttctctacccagtcatttagctatttcacattacctgagaggccaaggcatggctggctggcacccgggagacttctgggaccaggcatgtcacacaaacctcctcttcctccaggtaggcacaagtagtcctgtgagggtggygggcaagcaggagtggactctgtcatctccctagtccactgccgccctagagagacctgtgactgttgctccttgtttttattttttgaggggttttgtgggggcctctcccaagggttgggcattaagtgtgatgctcaggcctagatgctattgagtgtgcttaatagaggcagaaatgttctcatggaattgatatggtgcttgtccaggagggcacggatgacgggcgactcttccattccccttgacagtgcatctcctctgggccttggaggtacacacagtgtctgtgagcttccagcaaggaggtgggtggggcgagcagagttgagctcccctccaggatgtctttccatccctttaggtgggtggggggagcagaactgagctcccttccaggatgtctttccatccctttttttgtccaagctagagagcaaaccctactccagaatagctcggcagtgatagaaggtcctggcctgttttctggctgggctggttcatcttcctaaatgtgtttttcttgaatttccaagttattccaggaatcttcagtttttgtaacagatgttttattgtgctgcagtacatttattaggcctttcaccatcaaaatgagggaaaaggattttcataaatgttggaagccaataaaacaaaacaacacttgtttatggttcagtttgctgtttataagttttgccccacccccaatctcatgaatataactctgtctttatgtgtattacattaccagacagactatataaagtataaagccagakgggtgcagtggctcatgcctgtcatcccagcactttgggaggccgaggtgggcagatcatgaggtcaggaggtcgagaccagcctggccaacgtggtgaaaccttgtctctactaaaaaatatgaaaaattagccgggcttggtggcacgcgcctgtaatcccagatatttgggaggctgaggcagtagaatcgcttgaacccaagaggcggaggtttcagtgagccgagattgcgccattacactccagcctgggcgacagagcaagactccatctcaagggggaaaagaaaaagccgctcaattgttttgtcatggggccgggcgtggtggctcacgcctgtmatcccagcactttgggaggccgaggcgggcggatcacctgaggtcaggagttcgagaccagcctgaccaacatggtgaaaccccgtctctactaaaaatacaaaaattagctgggcgtggtggcgggtgcctctaatcgcagctactcgggaggctgaggcaggagaattgcttgaactcgggaggcggaggttgcagtgagccgagattacgtcattgcactccagcctgggggacaagagcaagacttcgtctcaaaaagaaaaaaaagcgttttgtcattatatgtttgtaatattaaggtgtggggagtagatttctctgtgggccagatttgctcagataaacaatggctaactaccaccctgctggctgcctcagagggctccatgaacagccactaagtcaatgtgactgtttttttttttgagacggagtttcgctctgtcacccaggctggagtgcagtggcacgatctccgctcactgcaacctctgccgcccaggttcaagcgattctcctgcctcagcctcccgactagctgggactacaggcttcactgcgcccggctaatttttgtatttttagtagagacgggggtttcattatgttggccatgctggtctcgaactcctgacctcgggtgatccacccacttcagcctcccaaagtgctgggatgacaggtgtgagccaccacgcctggcccagtgtgcctttttacttcagctcacagatttccagttggccgtctctgcagaccctggcctctagcagggaaagagccttttatttggctgttgtgagggcgccttgaagtttaggtatttataaacgcgaactgggctaccactgcttgcctctgagaatcccagggaccatctcacagccaaactaaatttggtccctggactggtgcctgagggctgaggctgagacatggctgtgactctttatgacagagcagcagtttttagtggagattttgggctgtcagagcaagggacctttctggagtggtggtggttatttttctgttacctctgtgtcccctgagtcactgggtggcagagtggaggggcactgtttagataggatgtgaggcgttggccctgggtcagttgctagagcagaagtgtttggtggcgttttaatacctcaaaccctccttcaacattaccatgtcccacagatgggagttatagaacagagtgagccatttagggtttttgaagaaagcatattatgcctgtggtgtaaggcacttgaatcctccatctctgcaggagagacctgcagtgggctgctgaggacttggctgtgggtcctgcgtttcccaggataactctaacaagattgatttcagaaggtccaactgcaacctgactgggttgagaggctatttccaaatggcacaaataggtttgaccaaaccctcgtatgtggtttgtttgtgagcctagggtgacttcggatggttagagggtcgtgccagttcaggaggaaggctggaaaacagtctgagccccacagcccatgatagacttggaaagaatcatgtagctacttgccatttgctattacagagctgagctacagtgcagttcaaagcaggccttcctttttcatcacaacatggaggagttatgtcagtctctcccatcccttcaccaagagggcctctggggaagaagcatgaccaggtttgcaccctagaatrtctgtcctcagtggtctcttctaggaccttaggggtctccctgcccaggggcagagtatggccctgcggaggctagagcttccccaagagagtgcaccctcctgacctagatattagatatatttttcctgggtggagagatatgtatgggacttctctctcttctgggtccagatcagaggtagtacatttgtgtttctagagcggaggccctcagagccctggactctgagataagagtcagcaccacccacagcacccctgcaggtgacactcccttatcyagatctccccaggcaggaggcatcagcattgccagtaaggagacagaagggcacagatgaccttgaaaaggggaaaagggatgccctccytcccacaccacagctgcacccacttctccgtggcacccagttgtgtgcaacctggtatttctgccatttggaaatagctgtgatcacagtgggcttgcacatcttgcacaaagcttcttccctgataaaaaccggaaagtttaagtgtttgggataagggaacggatgggcagccatgctatgaggaaggaagtcagcgctctgcacgcatccctgtgcactgtccccttgccctccacgcggctctttgggtgaagggcygctctgtgggtgaagggcctgggtcctgggagttgaaggtgcagcacagcaaacctgagtgtaactgggagaggcccctctgcctgtgaactttaaagagcagctccgcagggcagtgccggctccagctgatcctccctttgaaagcaaactgcaactgtttctctcctgaatttaatagagcatgccaaaaaatgacagcatgtgccttcagtctgtgcttctcatgccttttaccttgtaattctggtgatcttacatccataacctctgggattgctacagaagggcaactgttagtagcttccaccagcagtcggggcagagcaactccatgaaggtgcagtttactgagacccttccgctctggggccagcagggcatggtgctgtggtattttgttaacttatttttattctacctctcttaaattttaaggttttcagatgttattctggcaacaattttggcaaccaagtctgaaatgtgtggccaaaaatttgaactgaagattgataatgtgcgatttgttgggcacccaacactgctacagcatgctctggggcaggtatggctctccctgggcaggtggggctctccctgggcagatgtggctctccttgggcaggtgtggctctccttgggcaggtgtggctctccttgggcaggtgtggcttcccctgggcaggtgtggctctccttgggcaggtggggctccccctgggtagatttggcttcccctgggcagatgtggcttcccctgggcaggtacagaccctctgggaaggtgtggctccccctgggcaggtgtggcttcccctgggcagatgcgtctgtccttgggcakgtggggttctccctgggcatgcacagaccctctgggcagatgtggctctccctgggccggcaggcctggtccattctggctctggggggctcagaactgaggctgacaccagctctggtgaaggtactgggcaggagacctgattagacacttgstatgaactgtgcatcttcataaacccagagagtccagtagaaaaagagacaggtgttcttgcccctgaagacaggtgcttcagtccctgtccctagcttttacagtctgcattctaggtctctactgactgtggccctccccttcatatgtaggatgtctgtttccaggggaggccaagatagtgagttaactagcatcgtgaaacccttgaattttctacagtgtggtgcaagcatttcctcttatttattacaagacactctagtagctaatattagtattatttagcacttatttttctgctaaaccctctctatatgttctcttgatgaataggtgtcatagcactgaggaactcatcttgttagcaggatgaagggaacttgtacaccagagcctgccagtcagctctctgcatacaggcaggatcagtgatggcattactaagattctgaagggtcgaacacagtaacgtaggatttagctacatttatacagatccagcaattctgggaggttctgtggtgttattcgtgaacctccatggaaggagtttctgaggcggttgatgagcctggtcccctgtaccgcaccctcccttctcatcacagcctccacagctggggcacagtcccctacctgtaggcaatgaaggggagagttggcagcctgcccgcggtcacaccctgtagacaggagtggcagtcaggggtaggggatgggtgccagggcagcctggggccccaactccccctggtggcagaacttgtagttggctttgaagagttcccccgtgccccttggaatgcttcccttgagcgccctggtccttgtgaagctggctggatgccagaaccgggagcacagaaattaggacttgctggcctgcctcacctgggccctgctcagggcttggctgtccctgaacatcgtcctgtccctcaattgttctgagtatgcgtcatacttagcagatacagcctggtggatgcaggcgggcacgggaaggcagtgggggtgtgggtctgggtcctccacccatttatgcccctctccatctcgtcccctgtgggcattgtcagctcacttctgttagcgggggggcgagggggtcagagcactgaccttcccactcttgtcatagttgtgactttgcccatgcagtaggcacgcctccagagcaaaggcattcattgcttttccaagaccttggtgctgtattctggggacttttgccatgcctgaagtagaatagctctaaacagctttccttagaaagtcgtctcaattaattagaattatgcatcttttacagatctccaaaacagatccttccccgaagagggaagcacctactatgattctttttaatgtggtgtttgcactgagggtgagtgtttatataaatggttaagatcagggagtggggccagtggagaagcagctctttttttccaacgagcgtgtcattgactcggagcttggactgcagcgggctggcccctcctggggtgcaggcagactrcacttcattgtttacccctttttgttttggtaaaatacacataacactatttgtcattttgaagtctatgcttcagtggcatctggtacattcatgttgtataaccatcaccacyatctagatccagaacactttcaccaccccagaaggaaaccccatacccattagcagttattctctttttttttttgagacagaatctcrctgtgtcacccaggctggagtgtagtagcgcaatcttggctcaatgcaacccctgcctcccaagctcaagtgagtctcctgcctcagcctcccgagtagctgggattacaggtgtgcgccaccacgcccagctaatttttgtatttttagtagagatcggtggggggggggggtctcgccatgttggccatgctggtcttgaactcgtgaccttaggtgatccacccaccttggcctcccagactgctgggattacaggcgtgagccactgtgccctgcccctgctaatttttgtattttttgtagagatgagttttcaccttattgccctggctgatcttgaactcctggtctcaaatggtcttccctccttggccacccaaagtgctgggattccaggtgtgagccactatgcccagctggagcttaatttttaagacaggcctgccttgttgataaataaggaactacaaattaaaacaaaatgatttgttaatggctcctggggtacagggttctgggagaagttcttcactttctgcttgatacacttttgtagtatttgcattttcatagcatctttgtatttcttacataattacataatataaagcgccacaaagaaaaatgaattaagtaaaaaaacaagcaaaggagtaaacaaaatccatgacgaatgttgtccacctgtcaacaccgataacccctgtgggacagttgatgaaacgcagccacagccccacccaggatgcygtaggcaggccctcacctcggggaacagtgtttgcaggatgctgtaagcaggccctcacctcggggaatagtgtttccaggatgctgtaggcaggccctcacctcggggagtagtgtttgacagcatagcatatgatgcccttagatctagcagtcccactgttaggagtattatcaagaaaaacaagcaacttttacaactgcgtaaagatttcccccaggcttgttctcagcaagaataaagatttttataacaataattaaactggagataatcatagtgtgtagtagttggggagtgattaaacaatgtggtgattattatacactggcccatcctcttgccatcaagggtgagaaatggagatcagaccagaacctggagaagtatagattgattacggacaggtaaaagcaaccggagcygagcacaawkgcttacgcctgtaatmccagcactttgggaggctgaagcgggcggatcacctgagatcaggagtttgagagcaggctgaccagcatggagataccccgtctctactaaaaaatacaaaattagccaggtgtggtggtggacacctgtaattccagctactcaggaggctgaggcagtagaatcggttgaatccgggaggcggaggttgcagtgagcagagatcgcaccattgcactccaatctgggcaacaagagcgaaactccagctcaaaaaaaaaaaaagcaacaggaaacaagatagtctaggacttcagctggccgtgatattgacgagtaggagaaattttgataatgtaaagagtttgtattttttgggtggacaagtctttctttttaaratatatacttttgtcrttttaaatatatattctttctttttaaaatatacacttttgtcattttaaatatatattctttctttttaaaatatacacttttgtccaggcacagtggctcactcctgtattcctagcacttcgggaggccaaggtgggtggatcacttgagcccaggagtttgacaccagcctgggcaacatagcgaaaccccatctctacaaaaaatacaaaaattagccaggcatgatgatgtgcgcctgtagtcccagctacctgggaggctgaggtgggaggatcacctgagcctggaaggtcaaggtggcagtgagcagtgatcatctgctgcactccagcttgggcaagagagtgagaccctatcttaaaaaaaaaaagaaatacacttttttttttttactctgaaaaattttaaaccctgaamtagagagagcagactgacaaaccttatatgcctgtctcaggtgcctttaaaccctggctccatatatttccttccctctctctatttcaaggcaagtcccagaccttatgtctgttcatccctacatacttcagaagatatctgtataaaatatgggcacttaattttcggccatgataccctttgtacatctgaaaaaatttgctgtaataagttggcatcacctagtacctggtccattgaagcttctcctgattgctaaagccttttcacagctggactgtctgaaccaggatgcaaacccagcccagctagtgcatgtggtgtctttatgtctctgccaatccagaggtctcccctccctttgttccatcaaatgttccacatttggattaatctcattgtgcagtcagacttgctctctgtccctgtgtttccttcaaactacaagttaactctgaaggcttggttctatttgggtacaagttttggggatgagaaagtctcatgcgtgatgccttaaacttcctgccactttatgtcgtgtatggtgaaaatatggtgtttctaaaagttcccattagtgctggcacaccctaggtgttagctttctcagcatgtccctcactccatgtcaggcctttgcaaaccggacatgctgggacaccccatgagtgcaggtcactgagcgtcactggggactgcaccactttgtatgtctggaaaggtcaagcatatgggccctggacatccaactcatggacactgttgtgcctcagctgaataatcacatatccaggatcattgtcctcctccttgctttgctcgtggaagtatttgtacacagattcttcttctaggtgggtattttgttttgaggcaattgtatacaccccatatgtcagccctctggtcccaaggacactgttgaggcaatgcccttgacatggaggagcaggtctgctgcccagtggtgggcacagcatgggagcaacagtcctttctctggcaagggatgctgccttgttgtaagtccatccaggtgtgagttctgtttgtgaacatgggatctgatgagaatatagagaatttcttcagctccagatgaagaacgtatttactgtctgggtcaggctttgcccctgaagcctggctgtgaacactttgggcatggccttccctctcagataaacaggagggggaggcagcaccagaggttgtaatcagcagtaccattcacccctttcccttgtcccacctccaccccyacaggatgactcagcagtcctgttggcctccagaagcactragtcatggttggcccagttatctgctcyctcaagtgttttcacagacccccacagctgcatgcctccacccttggcttgggcagatgtgcttgcctggctgactgtggtccctgataggttccagagggtcgagggcccctcttgttcctgagagcctcctgcactgtcctttgacccagtcatcatggttgcagaaggagctcttgrgcagagatatgggcctggagcctgctggttttcttgttaaccagtgtgacttctgctgggaagagcttctcatccttcaggaccaaaagtattcagtgaacaattggcctggtgcctctctttttgtaccgtgcatccctgtagtaacgtggcctgtcgtgactgaattcttacaaattgtagactggttctgcctaccagtagtcagcagtacagtggtgaccacagacactagcagggtctttgctcagggcaggttctgttcttagtttgttacatggctcgctaatttcttccattcagtccttggtgagggaggcaccattgttgttcttccttaagaacaacagtgcctccttagggcacccaggcatttccagagccatctctgttactattcaggcagccactcccaagaayagagcatgggggctgacagcccacatgtctatggatgggccctggaggggactcaggaaatgagcagcagtggcctctgcaaaggagcctgggggaaaggagtagagacgctttctttcatggtttgagtttttgctgtgtacctgtgttagctccatttaaactgtgtccagctgtgtccctgtgcacacgtttgagtctgtgtatggtctctctcctgcaggccaacgcagacccgtcagtgataaactgtctgcataacctgtcccgtcgtatcgccaccgtgctgcagcacgaggagcgccgctgccagtacctcacccgggaggccaagctgatcctggcgctccaggatgaggtgtccgccatggctgatggtgagtgcagcagggcgtgatgggcatgggtctgggctggctggtggcctctctgcagcgcagacctctgtggaggggctgtcattcagtgttaatgatacagatgttggcggggcctcacccaccccaacaccagcagagcagtcaggagcttgcaagcatcggcttttggtgagctgtgcattgaaaatgaagtcctcacaacagcttcgctaggcagtgtccatgatcatccccattttgcagatgtggaaactaaggctcagagaagttacatgatcttcacacggggctgattgtgcctggggggcacaggaagactcccaaggggcacatttgtagatgaattttcctggctggatgtgttgaaatagatttcccgaccagaaatgttctttcttcccacacactgctgcatgatcaccgttcacataggtgaggcagctctgcctagccctggtcctgttggagatgttgaagaaactattactccctggggcaggagagggcgttggaaatatccagctggtgaggtggacagtttccagttctttgctttcagccagattgaaggaggacctaattgggttatcaactaaccaattattaaaaataatttttgcagacagaacattgagtgttttttggcctactgtaaagatttcaaaacataaagagacacytgtaacaaactctccatctccattttctttggccagcacctctataacaaaagagagaattaggaacaaaactaaagtcagacctagttgttgtagcaataagtaaaattagttattgacatgaatgaacaataataaagaacagcctctctgactcaggtgcattttcagtacaaatttacctgtggctggctgcggtggctcatgcctgtaatcccagcacttagggaggctgaggcaggtagattgcttgagctcgggaattcaggatcagtgtgggcaacatggtgaaatcctgcctctaccgaaaaaaacccaaaaattagccgggcatggtcatatgtgcccgtagttccagctactcgggatgctgaggtgggagaatcacctgagccttgggaggtggaggttggggtgagctgagattgcaccactgcactccagcaagggtgacagagtgagaccctgtctcaaaaaaaaaataaataaataaaaataaaataaattttgacaggtaattgtcaaatatataaagtttttcttttgttttttcctctgtcacccaggctggagtgcagtggtgtgatctctgctcactgcaagctccatctcctgggttcacgccattcttctgcctcagcctcccgagtagctgggactacaggcgcccgccaccacgcccggctaattttttgtatttttagtagggacggggttttcaccgtgttagccaggatggtcttgatctcctgaccttgtgatccgcctgcctcggcctcccaaagtgctgggattacaggtgtgagccaccgcgcccggttacctgtcaaaatttataatatgtttctgttttggccaattatatactaattataattgtgataataacaatccaaaagttttgtttttttaaacgttatctttttagagtctgtgactttatcacaggaagtaaaaagaaattttattttaagtctatgtatatatttttagaaatttatgaaaaaggatgaataaaagactttttggctggatgtggtagctcacacctgtaatcccagacaaaaaattttaaaattagcaggtctaggccaggcgtggtggctcatgcttataatcccagcagtttgggaggccaaggtggatggatcacttgaggacaggagttcgagaccagcctggccaacatggtgaatacctgtctctaccaaaaatacaaaaaaattagccagacatggtggcgggcgcctgtaatcccagctacttggraggctgaggcaggagaatcgcttgaacccgggagctgtaaatcttgtgttgtgattcttgtaggaaatgaaggtcctcagtccccattccatcacatcctgcccaagtgcaagctggccagggacctcaaggaagcttatgacaggtaagacaggtgggtgtgcttattaacctccttcttatgggccagcctgcctgggcctgaggagcagcgtcaacaggtagggctccccggtactgaccactgttctcctggggtgtgagcatcagggttccctgaggttagggccggagaggactgggaagggatggtcatgtggctgctcttgaaagaagtgaccttggtggccgtttttttttgtttattttttatttctatttctatttatttcttttttttgagatggagttttgcttttgttgcccaggctagagtgcagcggcacgatctcggctcacagcaacctctgcctcctgggtttaagagattctcctgcctcagcctcccgagtagctgggattacaggcatgcgccaccacacccggctagttgtgtatttttagtagagacggggtttctgcatgttggtcagggtggtctcccgacttcaggtgatccacccgcctcggcctcccaaagtgttgggattactggcgtgagccaccgygcccggccagtggctgttttttaaatggtttgctgagtagggtgcactctgctggaacttacatcacaaaagacaaatcactctcctatgtttaaggacttatatttcccaatagaagaatgaacaagggatctgagcagtgagctcacagaaaagacaggtggttcaaacatgtgaagagatgcatcagtgcatcacaataaagctacacagagatcccattccccacctgttatactggttaagatccacaatttcacgagactcgatgttggcaaagctcgggggaakaggcatctcgtgtgttgctggtgggacagaggtacaaacccctgagtacctttgcttttttaaacccctttgctgagtagcatgcactctgctggaaccaccacctccagactcctcttaaaacagaaaacgagcccgaagttatacatgagagtccgaaagtgtttttaaatcaaacagatgcaaaatgccattttactgagcatgacgcaacaccaagtgctgggccaccttcactaggtgggtgtcactgactccagtcactcaagaggaaattgaggctcagtgggtgaggctggggccagctgtctcctctcastctgagagagttggggtttgcgacactgactgtgtgagggcagcaagccttgaggataccatgaaaacctcacagttgttctgattgtattggctgagcatcacctttattaaatgtggacaagcaggccgggcgtggtgactcacgcctgtaatcccagcactttgggaggctgagggsyggatttcttgaggtcagaagtgcaagatcagcctgaacaacaatgtgagatcgcatttctacaaaaaatttttaaaaaatatctgagtgtggtggcacaagtgtagtctcagctactcaggaggctgaggtgggagggtcacttaagcctaggaaatcaagattatggtgagccatggttgtaccattgtaytctggccccagcaacagagccagaccgcgtatcaaaaatgaaaaaaaaaaggccgggcgcggtggctcacacctgtgatcccaacactttgccaggctgaggcgggtggagcacgaggtcaggagttcgagaccagcctggctaacatggtgaaacccgctgtctactaaaaatacaaaaaattagccgggcgtggtggtgcatgcctgtagtcccagctactcaggaggctgaggcagaagaatcacttaaatctaggaggcagaggttgcagtgagctgagatggcgccactgcactccagcctgggtgacagaactagatgtcatctcaaaaataataataataataaaaattaaaaaamaaaagtaaaataaaaaataaataaaatttaaaaaatactttttaattctttttttggctgcctagtgagccgcaactgcccccaccattgagtttgttccagccttccagtgctaaccatttacctgtgttattttgtatgtgcgcctctgtatctataagataaattcctaaaggcattactaatagggaaaatggcatttgtaatgttgtgtttccttctcrggggtttgtacctctgtcccaccagcaacacacgagatgcctcttcccccgagctttgccaacatcgagtctcgtgaaattgtggatcttaaccagtataacaagtggggaatgggatctctgtgtagctttattgtgatgcactgatgcatctcttcacatgtttgaaccacctgtcttttctgtgagctcgctgctcagatcccttgttcattcttctatcgggagatataagtccttaaacatgggagagtgatttgtcttttgtgatataagttgcaactagcatttgtttgtctcttggtgaccctggggactgagcctccccaggtgtgagagaacatcagcccttgccaggtgattgctttgttttctggccccttctgtgttgcagaatgggacctttgtggtcatgtagtctgaccctgtctttgattcattgttatcacactaatgttttctctgtgttgagagaattactaccctctggctttgaattgcctggtatccagtctcttccttggacattgttcccttattctgagtgtatgcctcaactcggattagattacaaacaaaaatcaggctaacttggaattaaaataaaaaccaagctggtgcggtggtgtgctcctgtagtcccatctcacaggcgaggccaaggttgggggatcacttgagcccaggagttcgagcttgtagtgctctatgctggtgtctgagtagccactgtactccagccccagcaacatggtgagaccctgtctcttaaaaatttgtttaaataaaaaccaaaccattgactttatatttctttttcttcttctttttttttttttttttgmgatggaatatccttctgttgcccaggctggagtgcattcttctgcctcagcctcccgagtagctgggactacaggtgcacatcaccatgcctggctaatttttgtatttttagtagagatggggtttcaccatattggccaggctggtctcgaactcctgaccttgtagatccgcccggctcggcctcccaaaatgctgggatgacaggcgtgagccaccgtgcccggctcgttgactttatatttctaaaggaagaatggactatgatttcttaggtttgaatcgtgctggaaagttgaaaggagacaaaaccttggactgcctgttgtgtgatctgcaggctgcggaggagctcagaacttgaggcaacccagcgccacctagtggatattaaaggaggacaggaatctgagttttgctgaaaaaggctcctaagctgttgttcagcaygtagcattctttcctgacctacgcattctgtttgttagtgcccaggatcacatttcctccatccaaactcccaccctaacagtcttgggtcctggagcttgccccagggatgctggcagctatgtttctctggcaggagtccaggcagtagtaccctccctgtacccatccttgtctggcactggcatggctctgcagccacccaggagcccctctgggctgtggcctctcgtctgtcctcatcccatcaggtccatggttggcctcaagggtctggtctgctgctgctcactcttctgcactgagaggaggagactgagtttccattactgatcaggtgacctaggacagagcgcctttctcctgatggtgactgactgccagatctgggggaatctcagaacagaactgaaagaccagaagctgtgagattaatgaggttggagattggggtgggatttttcaaaggaattgttcctggttctttttttttttttttttttttttttttttaatttaaggcagggtctcactctattgccaggctggagcgcaatcttggctcactgcaacatctgtctcccaggctcaggtgatccttccatctcggcctcccgagtagctgggactataggcacccgcccccaygcctgaatagtttttgtatttttttgtggaaatgggattttgccatgttaccctggctgatcttgaattcctggactcaagcaatctacccaccttagcctcccaaagtgctgggattataggcgtgagccaccatgccctgcccccagttgctattttatttatttatttatttatttgtttgtttgagacggagtcttgcttcgtcacccaggctggagtgcaatggcacaatctcagttcactgcaacctccgtctcccgggcttaagtgattctcctgcctcagcctcctgagcagctgggattacggcgcctgccaccaggcctggctaatttttgtatttttagtagagatggagtttcaccatgttggccagcctggtcttgaactcctgacctcgtgatctgccaacctcgacctcccaaagtgctaggactacaggcgtgagccaccacgtccggtccccagttgctattttaattaaagctagggttatggtgtggctgaatagcctggtggccctstcctgcaggacctaacatctgtgaatataggctgggaatgtgaatcgctcaggaggccaccccaacacttgtgccakacctagcacttgtgtctccctgtggatcccagtggccctcagtgacagcatgtcactcattcatatgaccattgaattgtgtctcccaggagggcagggatgtctcttcactttctgcaacacagcccctacactcagcctgtggaggagcacagctcatccgctaggggtcgacggaatgtgtgggtgggaataacagcagtgtagattccatggagtgtgaagaagtgatttgctgaatggttctccgagttaacaggacctgtggtggggagtgatgtccagggtctggctgggtaggtggtacttggtgcggagccttgcactgcaaactgtcgagagcagggttggtcccatggaccctctgtgaatatcctgagagttgtagtacccatttccataaaaatgcacctatatataaactttcgtttgaaatttcaaggtaggctgtttggaacccacatagatcttttgggttatgcagcatcccactacttatggtaggaagccaggcccatccgtgggaccagagratgcagaggtttgcaggatagcttcacaggtcctgtcyagttctaaggttaggaatggatgctttctcagatgctaaaagctgaggggactagactaagcttgtgcacatttctgtcttggagatgaacggcgagagtgtgtttgaagccagccattcccttttgcatagtcattgtcaggatgcagggctttggctggggcacctatctcctgtcacagactgggctgggccctcttggctggcccagagctgtgtgaggggctggataagtcttgaggaggacagtgttttcctccagagtgttttcagaccaaaccattaaacaccttgcaaatagaagtgcaagctcggcaggaaacctttcagggcccaaaccctgcttgtgctaagggctcttgtcttaaagctgcagacttaaaaacagtgacaaacctttctctttccccttgttaacagacctcagtgcagctcctggcttaccctcttactgtgggggatttacaggctggagrttgggccggcacctttccagagcagtcatccctctgacatgttcagggaatttgcccaggtctgccatggcctttggggcactcctggtggcagcacttgtcaccgctctagggagctgggttagttcataaagaagcaccagcctcagtgcagagtgctctgagggagaaagcagcaggkgggtgagctgatgcttgggaaaatggagtaaagtccacgtggaagttagaggaaccaacatggcgtgtctctgccagaggagagggccccatgccagtgtacaaaccagaccacatgactgcggctccaaggacagctgacacggtgagggcagcagagatgaccaagctgggaagtcactagaagaaccttcatgtgaccctcctgccctcatttctccatacccatagctggaacttgttcctggctttccatgaggtgtgttccaagcccctgttcctttccctataactctctccagtttctaatgctccatacaatttgattacaattaggtgtctttttttttaaacgttaatttcaattttttttgagacagggtcttgctctgtcacccaggctggagtgcaatggcgcgatctcggctcactgcaacctccgcctcctgggttcaagtgattctcctgcctcagcctaccaagtagctgggattacaggcacctgccaccacacctggctaatttttttttttttttttgagatggagtttcacttttgttgcccaggctggagtgcaatggcacgatctcagctcagtgcaacctccgcctccgcctctacctcccaggttcaagtgattttcctgcctcagccttccaagtagctgggattacaggcatgcaccaccacgcccagctaattttgtacttttaatagagacggggtttctccctgttggtcagtctggtctcaaacttctgacctcaggtgatctgcccatctcagcctcccaaagtgctgggattacaggtgtgagccacggcacccggcctaatatttgtatttttagtagagacagggtttcaccatgttggccaggctggtctcgaactcctgacctcaagtgatcggcctgcctcggcctcccaggttttgggattacaggygtgagccgccacgcccggccaattatgtgtctgtctagatgccgctgagtgaagcccccagcgtgcagagcagccaagttattttcttccctgctgcactccaagtacctaaactggtgctgggagccacagcacatgtcataaggcctcactgtgctcctagatggagcaaagacagctacatttgaaacaataggagcctccgtattctgattctgtggtgtcccaacagccactttgagctgcatcctaaataggacagaaacagaaaggccttgggtgggtgcggtggctcacgcctgtaatcctagcactttgaaaagccaaggtgggaggatcgcttgagcccaggagtttgagaccagcctaggcaacatagaccctgtctctacaaaaaaaaaaaaaaaaaaaaaaaaaaaaatcacccaggcgtgatgttgcacgtctgtagtcccagttacttgggaggttgtcttgagccygggagatcaaggctgcagtgagcggagatggcgccactgcactccagcctgagcaacagtgagaccttgtctcagaaaaaagaaaaaaaaaatagaccttttatttccagtggccctcctttctgacccagatggtgacagcacagtgcatggggccacctctcgcttgccctttcttccctgtcgcatacggatgccaagatcctaactattgcttactcaagttgagtaacctggatcccctggacaaatctctcctggtgtgatctttaattccttagcggctgggacatttctcagggtttgatacgagtttttcaccctgcaaagaccctgaccaaagagaggtaaggttctgggagcctctgtctgccccgacatacttggttagcatgcagttctggaagaagctgagactgctgccctcctctgggaccttggggccatggtgttctctgagcaccccgtattgacgtgtcctaagagacgtccgaggggccgtttgtaccttctggcctggggcagccagaagtctggccaagtctcccggacttagccggatgtgggtgtgttggcctgtcccgccaactgggagctgagaatagcagaatagggtcagggggtgatgggaaaagcactagttggctgctctcctgggcagtggggcagtgaacagaggaaacatgatgcggggaggtgctgtagaaatgggcagtttggagaagaacttgtgtgtgttttgctcctattttagaactggwgtcattgtgaggcttcacaggctgcgttccctgtgcaggacacaaggaaggtgccggccactttgagtagccaggccttgacaagagtaggtggagatcccccctgttgcctggagcctccggggatgcggtgaaggccagctgcagacagctttgcttgagcagttgcatctcctctgtgtcatagaacaagtgctgttggctcttacttaaggcaagggcgctttgtggtgagcggtggagttgggtggygccctggcttctccatcagggagttttagaagctcctggtgaaaacaactccttccttgttttgtgtggttccccgaggggatgacgtgggctgcatccccactgtggagcctgttcttggggcagggcttcctaggaaagacagtgcatgcagggagggcggtgtgttccttggcttcattcaggaaatgcagctccgtgcctatgtgcctgacacgttttacaatgtgtagagagcagagaatgaaacccacaagcccccctcctcaggagtgagttctggttggggagacagcattaggcagcgggtcaggggttggagtgtcaatggggctggggtcaggggtgcttcactgagaatgtgacacttgagtggagaccgatggagtaaaggagccttggggcgtctgcagagagtttgtgggcaagggcaaatgccagggccctgagcacagcgggacctgagtgactgggcacagggagtgaggccacaggaacgtgggtgttgcaggcccatggctgggactgcccaggtgggagtgtggggagcggtagtcagaggggccagtgctctgggtggcttgggcctggtgatgctgaaaaggcctggattttggacatccctgcaggtggagcagatgggatttgctgatggtttaaagtggactgtgaaagaaataaggaaactgggatggtgttgctatgtttggcctgagcaagctttgggacccgaaagaaccaagttacccttactgatagaatgtggagtgaaaggttttccgtcgtagtgaagtgttggggctggctagcacggctggcttgtggtgaccacttggtatccacatgcactgcaactgaggtgctgtgggcatctgcagactgcagggaggtgggcactgtgtgcttctcaccactggaacactctgggggacttggcattccttccctgccctcctcgccctctgagacagccactgttctgcctggacgtgcacctgtgaygggtcttcatgaggtgtgcagggcaggcccattcacagggaggatgtactctgggtgttgggtgtctgccaggggtctggacgggcaggggcctgagttagagtgcctctagtgcactgagtccccaggacagggtacggcttctctcaagccctggcagtctggttggactacagattccagggctagccagaaatatgtttctctttttctttcttcttcttcttcctttttttttttttttttttttttttttttgagacagagtcttgccttgttgcccaggctggagtgcagtggcgtgatgttagctcactgcaacctccacctcctgggttcaagtgattctcstgcctcagcctcccgagtagctgggactacaggcgcacgccaccacacctggctaatttttgtatttttagtagagacggggtttcaccrtgttggccaggctggtcttgaactgctgacctcgtgatccacccaccttggcctcccaaagtgctgggattacaggcatgagccaccrtgcccggcccccatattttcttttcttaaacataatgtgatcttaagagatgctctcctgcccgggtctccacctgcagtttcccctaagcagcaggggaatcagcaccattgagcagggtgttttctgatctgtgtgcatggttagaaagtttatgtgaacgggtaacagcgcccactctctgcagcctgtgcacgtcgggcgtagttcggcttcacatcaacagctggctggaggtgagcttctgcctgccccacaagatccactatgcggcctccagtctgatccccccagaggccatcgaacggagcctgaaagccatccggtaagtgcccagccccacgtgctcactccctgccagggcccttccctttagcttctgcctgagattttaccacttactttgttccaaaatttctctttttcttcttcccactgcggaagcttgcaggtggggctctgccgtttatagaagttaaaacacataattttgtatccagttgtgtccagaaatgaccaatcccaggtttctcctgggcccttctggcaccaccttaggcttgggcagggcagcctggatgtggggctgagtgtccttggggaggccggagggctggagggacttcatcttaatggtgttgccctaccccagtcttttgcatttcagtcagcactcatgggatctcagttattttctttttcttttttttttctttttcttttttttttttttttttgcgggggtgtgtgtgtgtgtgagagagagacagagttttgatcttatcgcccaggctggatttcagtagtgcgatcccggctcaccactacgtccacctcccaagttcaagtgattctcctgcctcaggctcccgagtagttgggattacaggcgcccactgccatgcctggctaatttttttggtacttttagtagagacagggtttcaccatgttggccagactggtctcgaactcctgacctcaggtgatccactcatcgctcatctcagcctcccaaaatatactttcttaatttaattgacttttttttttttttttgagatgtagtcttgctcggggctcaagtgcagtggcacagtctccactcagtgaagcctctgtctcccgggttcaagcgattctcctgcctcagccccctgagtagctgggattatgggtgcacaccactacacctggctaatttttgtatttttagtagagatggggtttcaccatgttggccaggctcgtcttgaactcctgacctcgtgatccacccgcctcggcctgccaaagtgctgggttacaggtgttagccaccatgccctggcaatttaattgattttctgcaaggaaagaactgagcccagtcttctggcaccacctgttcccaagtcccccaataccttgaacattttttaattataaaaatatatctgggcacattgctgaaaatttggaaatgacagaaagcaaagcgctgcctagttccaccctccccagtccgtgctctttgctttcaatcctagctaagcatattttaatgtactttggtccctagtctgtgaggaggattttgcttttcccatatttgggacaatttccttaggaaagattcattcatgtcttcaatcaacagatgtttgctgggcgtctctgaggtgggatacagagtccagtcttcgagccttccccacttttgtcgtgtttttttccgagggtgacataatccttgcaggttttgtttttgttgtttttgagacagagtctcactctgtcgccaggctggagtgcaatggcgcaatctcggctcactgcaagctccgcctcccaggctcaagtgattctcctgcctcagcctgccgagtagctgggaccccaggtgggtgcaaccacacccggataatttttttatttttagtagagatggggtttcaccatgttggccaggctggcctcgaactcctgacctcacgtgacctgcctgccttggcctcccagagtgccgggattataggcatgagccagtccttggcagattttgtgaaggcctccaaacagaccactgcccttttctcaaatcccgctcttggcccttctctccgcagttaagggccaggaggctccagctgcctgtttgtgtcccaggtgcatacctgatrmacacccggtgcaggacctcgtgcaggacctggtgcatacctggtgcagggttccctgcacttcgtatgttccgtgtgtttgagtcccaggtgcatacctggtgcatacccggtgcatacctggtgcaggacctggtgcatacccggtgcatacctggtgcaggacctggtgcatacccggtgcagggttccctgcacttcgtatgttccgtgtgtttgagtcccaggtgcatacctggtgcatacccggtgcatacctggtgcaggacctggtgcatacccggtgcatacctggtgcaggacctggtgcataccyggtgcagggttcctgcacttcgtgtgttccgtgacaggtgattgttttgcagcccctaccatgccctgctgctgctcagtgatgagaagtccttgctgggtgagcttcctattgactgctcccctgccctagtgcgggtgatcaagaccacatctgctgtgaagaacctgcagcagctagcccaagatgcggacctggccttgctgcaggtatagctctggaggcccagatgggtggcatgtggcggtgctggggcatcaggaaaggcaggccgcctgccacagtacatccacaggggctgtgtccagctgagagccgcggcacagcccaccatggggtggggccagtccctgggatggctggaggttttggcatctgagtcagacctgggttcagggctggctttgtgagtgagccacgggactgacttgttcttctgtctcagagaggtaaggcgagtctgtgagagaaaggactggggtgcttgcagtcctggaggttgagrcaccagagctagggggtgggcagggcagcagcgggcagggccatgggggtctcacagtggtgcatgaacaacatacgggaactaagggcaggaagcttggatgcggggccctcccatgtgcagaacagagacctaacctggtggccttacgcccctgtgtgtgcacatgtgttggcctgtgcactctgtacaagatgccacgtccttgctgagccacatgcttatgggcctgtccatgcagagggctgccctttctgattagatggagggcccctcagcctcgtctgcggatctggttggagtgtgggaggaaaagcgcaggcaaggctgggcacggtggctcatgcctgtcatcctagcccaggactttgagaccagcctgagcaacatggcaaaaccccgtctctacaaaaaatacaaaaaaaaaaaaaaaaaaaatagctgggtgtggtggcgtgcacctgtagtcccagctacttgggggtatgaggtgtgaggatcaattgagcctgggaggcagaggttgcagttagctgagattgtgccactgtactccagcctgggcgactctgtttccaaaaaaaaaaaaagcacggggagaaatcagaagcaggggctgctgatggggtggccaacaggccatgggatcagctgtggctgctagtcatgtgggcgtggcccagagccacgggaccattgaaatactgcctgagggtgggagcaggtggtgcctgtgggtggcgccctcgtctggtggcggtgtgcacagcatggccaccagggggcagcagaggctgccgaggaacacaggcgtgaggtgggcccgcctgggtccctctggctgagcttccatgctcttttggcctgtgaaacaggtctctgcttcttagcacgttaggggaacttgtccaacaaggcctgactctcaggccacttttccccgaaagcagcctttttggattctgtctttgagagtaagtctcccgcctctgtatctcaggaccctttatctatcctctgtgagagcacttaccaaattgtgcccttgtatttcttttttcttttctgagacaggttcttgctctgtctcccaggctggcatgtggtggtgccatcatgatccacccaggctcaagcatcctcccaagtagctgggactacaggtgtgcgcctggctaatattttttttttttttttttttttggtagagacggggtttccctatgttgccctggctggcctcatactcctgggctcaagtgatcatcgcaccttggcctcctaaagggctggtattacaggcatgagccaccatgcccagctgtgcctttggacttcatgggctggacaggactcagtaaasaccatgtcctgcccaccttcatagcattcaggagacagagaattttaaaagaactcaccactccatacaaccctgcagagtgagggaggcagtgaccctccgtgtcctgatgagcaccgaccacatggtaaatgcctgtggctgttcactggtcctgtgttgagcttttgaaaggagctgggcctggctttcctgaggctgtctggcaggagtttgtgctggacactgtgcctctcatccttgctgtcagagtctccttggacaaagctttgatgccctcttctgaggttgtctggcaggagtttgtgtggacagtgtgcctctcacccttgctctcagagtctccttggacaaagctttggtctccttttgatgtccccttcacttccctgccgtggccttgactggggagagggaaggctgtttgtcattgttttcttctgtctgtaccccttccctgctgtccctgctgcaggtcagcagggcgttgctgctggtgtggcggtgcggaagcccctggggcccagccctggtgggtcactctgtttccggagatagccccctggggagcacctgcctcaggtgtgaatgtcaccagatagtttaaagtccctcatgtggctgggtgcagtggctcatgcctgtaatcccagcactttgggaggatgaggcaggaggattgcctaagcccaggaggtcacgaccagcctaggcaacataggaagaccctgtctttacagaaaattaaataattagctgggcatggtggtgtgtgcccatggtcccagctactcaggaggctgaggtgggaggatcacttgagccctggtgttcgaggctgcagtgaattgtgattttacacactgcagtctgggcaacagagcaagacccagtctcaaaaaataaaataaaataaaattcttcatgtttatatcaatccagagagaatctacaagtaaattttgggtgtgtcatgataaaattagtatgttacaagacttcaaacactacacaaattatagacacagaaagttcccacagtcccatatcccacaggtaacctagatccctccaggttttttatctgtatatatacattttattgtgtgtgtgtgtgtgtgtgtgtgtgtgtgtgtrtatatatatatatatatatatatayacacacacaaacattttattttgtattatgaaaattaggatcrtgctgtatattcgttgtgattggctgaataatggcccccacagatatacacatcctaatccccaaaatctatgaatgtgaactcatgtgggactttggagatgttactaagtagaagatcttgagatgggaagatcatcctgttgagctctaaatgtaatctctaaggcccttatcagagggaggcagaggaagatctgataaaaagaggcagcgatgtggccacagagacagagtggagtgacgtgaccgcaagccaagagacactggccgttgaagaggcaggacgaattctcttctggagcttccagagggagcctggtcctgctggcaccttatgcttgcccttaagtactgattttggattttcaatttccagaatggacagcatcttggagaggctgctgcagggagaggcaggaggtggagaccactatgctgagcagagctgggggaaagtgggggtgtctttttgagagagacatgcgagtggcacgtggggtgagggaacagggcggtgatggagctgaaacctgccatgtcggggttggcggagccattgggggcactactcgcacaatcttggctcactgcaacccccacctcccaggtgcaagcaatcctcctgtctcagcctccaagtagctgggactacaggcatgtgccgcagtgcctggctaattaaatamaaatttttggcagagatgagggtctcactatattgcccaggttggtctcgaactccgaggttcaggcgatcctcctgccttgccctcccaaaatgctgggactacaggcatgagccactcactcagtctggaggccctgttttctgagctgaggtataagtgtcctcagcagcagggcagcacggtgtccaggcaggggtgactcacctccacagaggcctacccgccaagagggtggagtggtgtcctgggctgatgcagaggcagaagtgcgagagcttaggatttcacacaccttttcgtgaagtgctggggtgctgtgctctcagacctcaggcctgagctttcctctggaaggggtttgggttgtgtttgtgtttcctgatgttcaagggtccacaagagcaaagctgggaggggggtctctgtgggagtcggggcacatggggcagacctggggcctttgggtatgtaggggtggcatgctgagtgactccacacccatcatcggggcaaggccatgctggagttttagggggtataagagggctgtgcccctgccaggacatccagctaagccccctgcccagctgggccagcactgtgttcccagcaccccagacattcccatgcttgtggcctgagaccaccattcttcagtgggagtcaagacagcataggatgggaaaacagtgccaccaaacagcacagggagcagtgacaaaaaggccattgtggccgggtgcggtggctcatgcctgtaatcccagcactttggaaggccaaggtgggtggatcacgaggtcagatcgagaccatcctggccaacatggtgaaaccctgtctctactaaaaatacaaaaattagctgggcgtggtggcatgtgcctgtaatcccagctactcaggaggctgaggcaggagaatcgcttgaacctgggaggcaagaggttgcagtgagctgagattgtgccactgcactccagcctgggcgacagagcaagactgtctccaaaaaaaaaaaaaaaaaaaccattgctcacagaaagtgctgtgtgctggctgtgccccacatcctagtgagaggttgcraaggtgctattccacgttagggaggaagtctcgggccatagccaccaggtgtgttctgcatgaggctggggccagcttctccaggctggtaggccatggccacccaggctgagagctgctgacagctcccggtgggccagcctcaggcatggtccttgcagcttcccttttgcctgcaggttttccagcttgcagctcatctggtgtactggggcaaggccatcatcatctacccgctgtgtgagaacaacgtctacatgctgtctcccaatgccagcgtatgtctgtgagtgctgctggctgccagagcctggagccccgagtgggaaggggtgaggctggcagggccctccagatgctgttctctgtgttggccaggcaccaaaggctgtggaagccccaaggccaggctctcacttcagcctaactcctggccactagcatacccaggtcccaattctggtctggctctgtgctctgtggctctcctgtgtcccccatatgcctggccccctcctccaggctggctcttctaatccaccttgagggatcagaggtgagatgcaggatgaactgtgcccatggctcctgctgctgctcaaggggaagtgcccaggctctgtccacctggaggcctgcctggcctcataccgttctgccctcatcgcactgtcctgrcccacctgccacactttgcttctctgctgcccactgaggccagtgttgagaacacggtgggggggtctgctgcactcactggcatgctcacctgcctgcaggtactccccgctggccgagcagttctcccaccagttcccatctcatgacctgccgtccgttcttgccaagttctccttgccggtctccttgtcagaatttaggaatcccctggcccccgctgtgcaggaggtgagtcacagaagctcaaggagcccagagtggcaggtgtgtagtggataggcactacctgcctggctgttggttctgatctgagagccctcagcactgccacctgcttctccttggttttgggggcttgccgtgcaagtgctacgtgcccagcaggacccaaaagtcagctgccgggccacctgcagatgcttggccagtgacccaacacttgagcagttgttccctccccatagagcccaccctggctgtggcaggcagtttttagtgttagaaccgagttaagcaggagagtgcttaccttttctgggcctacagacctgccttgtacccctttgggactggggactgcctacagatgagggtgcaaaggcagttttgttctcactgggcyaggcctgaccctctgagagttctgcttctgtcttcactccctgccatggttcaggtggccacagggtctgtgggtatgagttctggggtcactggtccccagaatctcctcattcaagagagcctagagaggaccctagtgggcctggatcagggcaacgggcaggcaggttgggagctaggagtggctgggggataggaggcctcctgcaggtctgtgggatgaactggtgcacctgcatctgtggcagggccagtggcttcccctgtgggctgcaggtgtcatagccttgtgctgaggtggctttgccatcctcccctccactgagttctgggcagagactcagagcagggccagataggatacggtgttggagacagacgagctgggtgttctcaagtctttgtctccagaagtatctgagtaagtgccagatctattaggcaaaaccagtccttaaagttaaaccctttccgttctcaaattacgaatgmkaacgattctggcttttcagctccgttagacgctaaacctgacagarctctcagtgcggtctttcacagagcccttggtttctgggagctgagccaggttgtaccagctgaataaaaggcactctctgcacccctgctcttggggcagtgcttagggaggagctgctggtgctcccttctcagaggcctcctgtggtctagataacggagtggcttttccaggccatgactgagtggttgctccaggccttgtcaaggggcctaggtcagccaggttctgcctgggctccagtgctgggaagcccctctgttttatttttggtttattgattttatttaattttgattgcacgtcaggctggagtgcaatggcatgatctcggctcactgcaacctttgcctcccgggttcaagcaatctcctgcctcaccctcccgagtagctgggtttacaggtgcccgccaccacgcctggctaattttttgtatttttagtagagacggggtttcaccgtgttgaccagggtggtctctaactcctgacctcaggtgatccacccacctcatcctctcaaagtgctgggattacaggcatgagccactacgcccagctttttttttattgttttgatatagaaacttgctttgttgtccaggctgaagtacagtggcgtgatcttggctcactgcaacctccgcctcccaggttcaagtgattctcctgcctcagcctcccaagtagctgggattacaggtgtgtgccaccacaccmggctaatttttgtatctttagtagagatgaggtttcactgtgttggcaaggctggtctcgaactcctgagctcaagtgatccacccgcgtctgttttatttcttaaattcatgtgaagtctggatatcttgcagtccttttgaccaagtcttcttacttgcctgggatatatcccccattcccatccccagttccccagccccctcccaggaggtgaccctggccagcagctccttgttgaccctcccagagatgagtagacagatgtgtatctgaggacactgatgtgtctcacactccttactgttcaacgcctgagtctgggcagtactttctcatggggactggactctacctggcacaaggctcctcactgctcctcactgccagccccacctgctaacccagagacattggagggcctggccaggacgtgccttctcacggtgggggtgggggtggggtgctccacccccaagcccagggtcactggcctcagctttcttgtggatccactcttgtgctcagggtggactttcaggtagatccaaggagaggactttctgctctcagggtacctgcccacagcctctttttaaacagtgtctgggcttgtgtggaggtggacttgctggctgggtccaactccagggccagtgggccaaagaagagaggaggcagaggggcagctgcagcagcacagggtggggggtttgctcagcgaagcagtcacaggggcctccacgtctcaggtcctgctcctcagccagatgctgggtggccccggtgtgtggtgggagcctgtgcaggtgtgatccagatgttcccctggcccctctcccttcccaggagggtgagcgggccttgcagagctggctggcagctgggggctccctttctgagaagagggcctttctgcctgtgcgtcagcacagggagcgtgctgtggccatgtctagggccatggctccctgatcacccaggaggaagttggagtggggagggggaccagcctcacctgctgccacccgcagacccagctcatccagatggtggtgtggatgctgcagcgccggcttctcatccagctgcacacctatgtctgcctgatggcctcacccagcgaggaggagccccgtccgcgagaggacgacgtccccttcactgcccgggtcggcggtcgcagcctcagcacgcccaacgccctcagctttggctccccaagtaggacccccagggcaccgctgtggtagtcaggggagacgcttgggggtggcatccaggaggctcaacgtgggygrtgctgtgagtgatgaggggcctccacacagctscacacgcacatgcacgtgcctcgtgtcccccgtggagacacctctcctgtctcctagcaccaccgtgactctgaggtggcagctctgtctccgggctcttcagcaggcttgctagaattaggggcagctcccagcccagcaaatcagtgctggaatctctgccscagcctgggagcagagcaggatctcataccactaccaggacagctgacacctctgcgccccagaagagcygtcatggccagtgtggcttsagggcagcagcctgttgccaggtcccaggtccccggtccccaggcttggggaaggaagggggtggaagactttgaaagtccccccttggctgaggtctggctgtaggcttcatgcttcatgtgaggaccccacctgcccagggtgctttgtcctccatcctgggtgagggacaggatgcccaggcccaccttggggtgtttgtggggcacacatcgcacctctgttcaggtcccttgaggttgcccccagaggggaggctrcccgtttcccaagtcagccgtatgaggggcgtgtcacacccaggaggtggggcagcagcgaatgcttgcaggcagatgtaccctaacccttgtaggagttaggggtgtcattggaggctggctgctggctctgccctcgctgttcccctgggtgtcctggaattccacttggtcaccctgacccatgtcccccacagccagcagcgatgacatgaccctcaccagccccagcatggacaactccagcgcagagctacttcccagcggggactcgccactgaaccagaggatgacggagaacctgctggccagcctgtcggagcatgaacgcgcagccatcctcagtgtacccgcagcccagaaccctgaggacctccgcatgtttgccaggtgggtgtaggttgacccgttgggactggggccagttgcagggtcagggcagaaagtggatagggacgtacgcaacagaaccaccaaatccactgagaacagatggggccctgttcgagatggagtctctgcattcaggtgtgtaggggcaggtgccactgcccaggcctgagggttcggcttgtcaccaagacgccgggccatgggcctggcatgcctatttttcggactcttctctctccagtacttcttagatgttccttttcccttgagaggcagtgccaagttctttttttttttttttttttgagacggagtctcgctctgtcrcccaggccggactgcggactgcagtggcgcaatctcggctcactgcaagctccgcttcccgggttcacgccattctcctgcctcagcctcctgagtagctgggactacaggcgcccgccaccacgcccggctaatttaagtgccaagttctcaccctcatgggacttggcaggggtttgcccaggactgtaagccctgcgggcatccagggtcccccatgttaaaggtgatgtggctcagtggtctctgtcagccccaccctgacttgggggacagtgcaggggcatagtttcccgggagtggtcgggttgtcagggactgagtttccggttragaaccacactcrgccctcgagagaaccacttgcaactcttctgagcagctggtccaggtctcacctgcatcctagcctcctctgtgccagcctgagttgcagaaagcaccctaaagcagtgaccttccaaatgatggtgacattaaaaaaaaaaaaaaaaaaagtcaggcgcggtggctcatgcctgtaatcccagcactttgggaggctgaggtgggtggatcacgaggtcaggagatcgagatcatcctggctaacatggtgaaaccccgtctctactaaaaaatacaaaaaattagctgggtgtggtggcgggcgcctgtagtcccagctactggggaggctgaggcaggagaatggcctgaaggcrggaggcggagcttggcgggaggaggagaatggcgggaaggcgggagktgcagtgagcccagatcgcgccactgcacctccagcctgggcagcagagcgagactccgtctcaaaaaaaaaaaagcaggctgggcacagtggctcacggttataatctcagcactttgggaggctgaggtgggtggatcacctgagttcaggagttcgagaccagcctggccaacatataatgaaaccctgtctctactaaaaaagagagaaattagccaggtgtggtagcgcactcctgtagtcccagcttacctgggaagctgacgcaggagaatcgcttgaatctgggaggcgggaggttgcagtgagctgagatcgagccactgcaatctagcctgggtgactgagtgagactccgtctctcaaaaaaaggaaaaaaaaaagcagtgaccatttggctccagagctacgtgggactcactgtagcacgaaaaagaagccaccagcagaaccctggtcccaacatcaggacgcagscttgggcacctctgggtttgaacagccgtctgccgtcctgaacccactccgcccacctggtggtcagcgggaccgtggtgggcatggggtccaggaggcctgcccacccttgttggggggctgtggtggctgcctccctggccttcaccaccagctctgttcaggcctgtgggcagctcagagctgattcccagcagtggctcttcagcagaggcctctgggggctggtgtcaggttgggctcacrcccacccatcccttccaggctccttcactacttccgcggccgccaccacctggaggagattatgtacaacgagaacacgcggcgctcccagctgctcatgctgtttgacaagttccgcagcgtgctggtggtgaccacccacgaggaccctgtcattgccgtcttccaggctctgctcccctgagcccaggcggagggcggaaggctgctggggtgcgcaggtgggcgctcgcgtctccccaccccagggctccccccgtgctgaggctgagccctcttggccctgaggcctggcattgggtggatgcgggctggccgtggcccagtgaagcctgcagagccccgctgtccttgcccctggtggttccgctgtggggctgctgccctctgtgttcctacgcttccctccagtccttgccgcacgcgtaggcatctccacgctggaggggggcctgccaggactcctgtctctgggtgaggccgcatccttcaaggcccatgtgggctgtgcgtttctcagaccctccttctgtccctacacctgctccttggaccccccagtctgtggccaccctgaagaatgtgcagaaacacttgtgtggcctgtccctgtctctctgacagccttcyatttgtgaagtgccctgtggccccctccccagcacctctgtctgccatgcgcttcttcctcccaggctaccctgagcctttcctggcccagtcctcaccacartccacagaagccrcaaacaggctcatagccaagctgtgacctggtcctgaccatctgggkcacgagggcctgggctggccctgctaggctggagaagccctgtcacctgtgcacatcttgctggtggaggcatggcccactgtgcaggaccccaccctcgggggctttcggctcccacactgatgattctccccagcatccacaccgggcctggcgctacgtactcaggcccccagctctygtgtcctggaggaagagctagctccagacatgggttgatcacctagaggagctctggctaaggcacagttttctagaaataaaacatttattcggtttttaaacaattaaaaaatcttgtctgggcaggccctttgctcaggmctgtgtgtcctgctcagccactctgtcgaccacactgacccaggggctgccccggacatagaagcggaggggtttccgggcccactcccctgcatggccgacgcccacccgggctgctrccactacagccggctcactgggctccaggggaccacgctccagccatacagcttcatcctgtgccaggtccctctggtcaaagctcttgttgatggccagggcctggcacagcttggaggggccactgcaragctcgcggtccttgaggacacggctggcggtgcctttccggagrgtgctgcgaagctgacgcatggtctccagaccttccaggggctccagtgctcgcagcaagacgcaagccccgtcccctgtgggacggacagtttggaagtggagcctccctaggctcctgtcctctctgccctagtacacatccagacatcctgtgctgcagggagggtgcagctgccttcctgcctgggccagggacctgctctgtgcacctgcaccatctcctgggtctgacctggtgggagggggctgcacctcactgtgtccagacccctctgcctaccttgccatcctccaagcctgcaccatgaggtgtgcctcctgtgggcacctctggcttccaccaccaggcagggcctcccccactgtggccgcccccacaaagccagactgttaaaaacacatgacaaatgctgggtatcagttcctttccacctggcttcccctggtcttgtgactggcagcagctataaagccagcaaaggaagctccagagagccagtcctcgggtgcgatcattcagccaggaagcaggaagccttrgcctagccaggccccagcgctccccttctgcctcacccactcagtgtttgtgttggtcaagtggtgggggctaggagttggcttagagcagctgccagtgtgcaccggatgttgggagagcccatgcaatgactcagtggaaggactgactgcaacaccctgcacaggcagggcaggaggaggctgacraagccccctcacctcccttgggatccctcctccagcctagccccctccctcaccaggccaggccccttgagaaacagagacagcaagcgaaggctcctgggcccaggggctcactcaagcacagatacccgaattccctctgccctgcaggtttggaaaggccccttggattcctggctggggacaatgatgacctggaccctggccagaagagccctggccctccagcaaggcagcacctgctctgatgcacctgtgcacccctggcyctcccagccacctgggagyccgaagcttagcctgdaggtggccaagccagtccctactcttgggctgcggccacgtgaggctccgcatcagcagccaggggcgagcactagtggacaaagccagcaaatgcggcgttcctgtgagcagataccctcaaccagccagctgtcaaaagtatttcaagataaaatccaggccaagcaaagcctttaagttcccgtccattctgtgattcccacgctgcttccagctcaccaggtggggtgcctgctgcccaccctgacccacctcagtagggaggagcaggaccctctacatccctgtgggtgcagggcacacgcccctcgttgkctcactgagcccccacagagccgcctgcaaatgagtcaaagcctggccrccctcatcaccacagccccgtgccctggctccttcacacagaacacatccaagtcccacatcctgacaaaaacatgacccctttgatcacttcctgccaaacctccctttcctcaccgactcctccgcygaccctaagtccccctgctgtgcccactgctccatccttggcaacctgaccacgctgctcttagcactgcagtcatcctcttctccaatcagcttctcatcctcatgtgctgcctccgtcaagggcaggcgacactgtgtcctcggccttctttctgcctccactccaaccaaccctttcttttcctttcctttttttttttttttgagatggagtctcgctctgtcacccaggctggagtgcaatggcgcgatcttggctccctgcaacctccgcctcccgggttcaagcgattctcctgcctccgcctccctagtagctgggattacaggtgcccactaccacacccagctaatttttgtatttttggtagagacagagtttcaccgtgttggccaggctggtgtcgaactcctgacctcaggtgatccgcccgcctcggcctcccgaagtgctgggatgacaggcgtgagccaccgcgcccggccccacccggccctttctacccctttaacctaaccagccctgccccgtcagcgtagccagagctcccgaaaccctggcctggcctggaagtggcacctcctcgctcaaatgctggccccacctcagtcctcctagtggtcccctggctgctagcggacagggctctgccggccctccaaccccccgtgccccagcactgctcaccctggctggagatgttcatgcagaagtacatgccgtaaatgatgtacacgtacagggtccccggcttcatgaacatgcctcggttgcggggggtctgccggccaccccttgagtgggcggcttcatcctctggccccaggtatgcctcggtctccacgatgcggcctcggagttctgtgccattaggaagtcgccggactaggacctgtgggcagtcagtttctgctcagggcgggaagggatgggggtccactcaccctaacagtgcccagcctggacctcatctccccagctcagggtgtgtcagccgcccaggtctagccagggaccttgccccgtctccatcctgcctcttctcttgctcctgctgaggctgaatgtggctattgagggcaccagttgtctcctccagccctgctagacaaccagaccgcaggccgaagatacctcaggccacagccaggctgggctgggaaccggcagtcatggattcaccttgcaggtcaagtcctctcagcaggaccctccattccccagattcctcctttcccaagtgcccttgagaaaaccatcagcatttagcacgaggccaggcatcacggaaggcacaggaccccaaggatgtccccacaccagctacctgggcaatcccagagcccgtgaagtcccctaaacctgggctgctgaggtggccacaagggaccctcatactcagctcccaccctccggctttctgagcagtaggcccagctgccccacggtgccccagcctggaccatggtcctggtaacggccaacagttgtgtcactgctcggagccccagagttaacagcagagcactggggaccaaccacatcccctgcacctctcgtttttaggccagataggtcagctggacagccaggctaccttcacctcagcccacgaagccctgtggtgccaaaggccatggtcagtatcacgggctggggaggaggggcactggagcttagatgctcgccgggggagtattcaggaggccttcccggagatagggtggtgggaagaaggggtcagcgccgggagcattcaggaggccttcccggagatagggtggtgggaagaaggggtcagcgtggggagcattcaggaggccttcccggagatagggtggtgggaagaaggggtcagtgtggggagcattcaggaggccttcccggagatagggtggtgggaagaaggggtcagtgtggggagcattcaggaggccttcctggagatagggtggtgggaagaaggggtcagtgcctgtgcgggaagcccgaaatccttaggcatccagagccatgaggacagaagtgaacaggccaggcttggccaggccatgtccaggggagaaagggtggccctgttccatcttccctggagcttagagggaatgcccctccaggggcttcactctgcacactcctgtgcctccatgggggcacactgggggggcccaactaccactctggagaggaggttcccacagcccttttctcattgtttccttttccatcccaaatttctgatcaggatttcactgataccatttccaccagtggcagatactggggcctctcacccctccccacccccatggccaacacacacccctcttccttgttggcagagcctcctgggggagaccacaccctcctcagcccagagagtggcctgggatttcatggcaactcactgcagtgacccttttagggatgagtacatgacccaagcctggctgaggggtctgcaagggcatccactaggaggttatggagagggcagagggctgtccctgatccaagggacacagggtgagacaccctcttctctgctggacatcatcttgtccaccaatgggctcaagtgggcatgactgtggcctgacaaggatgctgaatagagacaaacgtattgtggtccctgatgccatgctgggcccttgccctgttcctacgacgcacctgccacacgtgctgttttgttgtatcacaaatgcccattgtattttttttttatttttgagacggagtctcgccctgtcgcccaggccggagtgcaatggcgtgatctcagctctctgcaacctctgcctcccgggttcaagtgattctcctgcctcagcctcccaagtagctgagattagaggcgcccgtcatcacacccacctaatttttgtatttttagtagagatggggtttcaccatgttggtcaggctggtctcaaactcctgacctcgtgatccacccacctccgcctcccaaagtgctgggattaccggcatgagccaccacacctggccacaaatgcccattacttaaggtgcttttagaaggatccgcatggggacagaatgttctctgttctccatgaggtcgagcccacattctagggtctgctcctttagcacccaactcctggcactggtatttctcttctggttcttcttggtgattataacctaaaagtaggctcattaaaggacaaagggaaggccttggagcctctggagaaccagaaaggcaggcctggggctttggcatcgaggaccaccgccaccacctcgctcccaacagatccagccaagatgccacggctgtgtgagcatctgctcgtggggacaggctgcaccgtaggccccaccaggatgggacctgggcagtccctgcttcttactccaagtctgattggcagagcccagatccttgacctacattaagctgcaggggccctgggaagccagcactgcactgtgagccactacagcgggaaggggcagcccgacactggccacagccacagttcccacgtgtggaaaaactgaggtggattgccggtgaggaaggctaacggtgcaagtgctcctgccctagatgcccagagccgggggcagacagtggcacccctgctccaccctgggcaagcagcactgacaatctctacattcttcccagatgacctcaggcaactgagatgaagctaagcagggaccagtgtgagcaaagccgctaaatgcatgaggacaaggaggactaactgagggccaatccagcaggcagcggacaggggttcagggacaactgcagtgacaggcacttcaggagggccctcgctgctatgttcacattacctgtcccagaaatgcccgggccagggggactgccggctggtcgaagaactccaaccccagtcgggtaaggtggccctttgggcttgagaaatagatgctgcggtatgggcccggagtggtgggcggtcccaagcagcgctccctggggcaaggtgcctgggctgcatcggacgagctgtgtggctgctctgcaggtgcctgggctgcgtcggacgagctgtgtggctgccctgctctagctggtcgctgcttcttttgccccatccgtcggcaaaactgtaatgggaaaaaaaataaataagcatccgaataggagacagctgtgtggtaaggtcaggctcaggaagtgcaaggactggatctgaccacctgctttggtttcttcatctgcaaagcgggggtgaccatcctgtgggttgttatgaggcacaaacaccctgacacactcgaggcctcaggaaatgatcacgtctgacgatggacggctgctgctgggggcagggtggctgctctgccccacatatgtgcgagctgcacggcatgggggcccaggctgcatgacctggggagcagatgggggcctgagcctgggacagcagggctggtgccctccgattcccactcatcatgcaggtcccaagcaaacgtctgagctggtttctggagccctgccctttcatccaacccttgccagaattcaaaacacaggatcttagcagggccaaggtcggacacacagggaggggtgagcaccggggtgaccaccgcgtgctcagggtccctaactgtcctctgcttcatggcccaggctggataacgagcaagtggggcaaaggcaaggtctcctgagggactaggagggtctgctgagaccgagcaggccgccagcctcccacctctggcctccccatgggtagggggaacctaaccacacatcctcggctgtcctggggcaaaggagaagggaagatgaaggtggcgggtgagcgccggcctggcagcacccggagggctggtctttagcagcacctaagtcctcctggcatgggagagatgcattatttttaacgggagtgctgacgttaatgtagaacggagactgccagtcggcctggaacggacgctgacgtgaccgtctccgcagctcggcccgcgctgccagcgcgccgtgggttcagcccccgggcgttgcggccactgctctcggcccgagcttggcccttgtgcctatgctctggctctgccccgaaccctcgtgggctggtgtggcgctacgccctgtcccctggcactccctgctccctgctggcctgctgctctgctgctgctgcctgtggtgtgtgtggctgctgtcttgttcctgctggtggctggcctgatggctgcgctgctcacctgtggcccctgcatgcgctgctggtgcatcacggctggctcgtggcctggggacttcgttgggacatcggaccccggcgcggagcccagcaccgccgaccacggaagcacccctaggaccgggcggagcggcgcctgcgcagaaggggacggaagccgggagagggagggcagtgagcgccgggaactggctgcgcccccggggcggggcgggccacgtggaggtggatcctcttcccagcgcccaccgccaggtccggaccgattcccgggcccgatgcggtgcctgcgaggcgagagcggggaaggggcacctgggggtggggcgagccccgcactgtgccccggcgcccctcccaatgagctgtccgcccccgcctgcgccctggtcgcctggcggccccagagcccactccaccagccggtggtcagaccaccgagaggacgggcccgtcgtgaacctgagtggatcctcgaggggcccgggcggagtggtcgtgctttgggggagggggcgggccgcagacgtgttttccggtggggtgccagcggagtgagcgcctgggaggccgccccagccctggtccggagtgggccggggagtccttatccaggaagtggacgccaggcttgtgcggaggcccccgcccctggccggggttgtcacaggctggtcgggggaaggaaggagggagcggcgcggattctgcctctgcagcagagcccccatccctctttccgcccagggatgctgaagggagctcgcccacgttctgggttgggcctgctggagcgcaggcagcctcctctagaggccgaggccagaccagggctgaacacggcccggcagtgcgcagccgtcctacgcttctgaggcctccccgacggcccagcgcctgtaagctctcacaacctctcaagtcagatccatgcccctagggaggggcagggacggtgct

SEQ ID NO: 94344 - DNA, 48320 bp, Homo sapiens
  misc_feature (1)...(48320): n = A,T,C or G
ggtcgttcacgcctgtaatcctaccactttgaaaggccaaggtaggtggatcacttgagctcaggagtttgagaccagcctgggttacatggcaaaacctggctctacaaaaaatacacacacacacatgcacacaaagagccaggtgtagtggcacgtgcctgtagtcccagctacttagggggctgaggcaggaggtccacttgaacccaggaggttgaggctgcagtgagccaagatcgtgccactgcactccggcctgggtgacaaagtgagaccctgtctaaaaaaaaaaaaaaaaaaaaaacactgaacataaaacagagttcaattaagagctgacctgtatgatccagatcataccatttaacacttgtcaacctatgctctttttttcccaattcagaagattgacagagaagctaactcctacataactggtacttcctattaaaggtccaatgacgttacattatatagtcaatttctttttacctttcttccccagtattccataaggtctcagttatctttgcacctagtgtctgccacatggtagccattcaattaaatgtttgtcaagtgaatgaatgaatgagaaaccaagccaagcccatagcagtcatatcaatacactcaactctctcctatggcaaatcccaaaggtttaaggctcaaggcagttagctaatatggtctttgacctagccttggctacatgggatgactgatgttaaagccttgatgctgaatgttaaagtaggttcaaggggaaaaaaaaaacagcaaattctaaaatgcttctggatgagaaaggctagcacaatgctgaaactaaactgagtctatttgctaattgctattaagttaatttcattggttaattctccagcataaccccctctaggataaacctggcccccagtgaaaggaagataaaccctgtaaaccacgcaatcaacagtgcctctgatactcaaatgtacatcctagtcacctacagatcttattaaaataaaggttctgataaattacatctagagtgaggcctgacgttctgcatttccaacaagctcccaggggatattatgctgctggtatgcagaccacactttaatgagtatcaagagcttggacgacattgcagagaatagatctacagacttaaaaccagagttaagatatctcttgttcttatattccctaactgcataactttagataagtcatttcacctctctgagccctccttgtttcatctgtgaaaataatatagttaatacaataattaataacatagttaatactaatagctaacacatactgagttcttaccatgtagcagtaactaatgttttatgtttgtcaatttataaataaggcttagatcaaacatcctctccaagtaatggtgacctgatacctgattgtaggccgtttgactcatacttaacaccatgtagcacttacctcccagagcctatgaaaatgaaataataatcggtatttggctaatttgtactgagtactcatacgctccaggccctcgtctaaccctcccttggacgatattaactcatttatcttataaccaccctaggaagtattattatcattatctcgcaggccttaaaacggcctcaacaagtaaaattgctgaaggaccaacagtggcacagtcaggattggaacccaggcagtgtaactgcagagcgtggcttagtttcagcactgtactagattaattgaactagactaggttctgtaactgcagaatcccggatctccgagtcagctagctcactagggtcggtgcacacccgcgcccactcggggtggcttcattgccagagccactgactcccaaaacaaaacgaatcttctacaattagctctatgtgtatctttgggatgttatctttctcgggccacaactaggaaccctgaaagccgactatgactccagtgaaactatttggccctaagaagggtgattgtctaaacatcttcacaacggatttacactgaaattgtaacacgcacttgattggaaccccacaccacaggcagtcccaggaatttgtacccgccccggtcccggaccgcgcccctggacaaaccctccggcccgcccctccggattgagccccaagactgtccccggaccaccatcctaagaccactccctgaactgccccccccaagaccgccccctagatcgccccccgggaccgccctctctagaccgcctgcgagactgtccccggaccgccccctggaccaccccctaggcggccccccgagctgtccctggaccgccctctagaccgcctcccgccccctgcatcctgggaatcgtagtcccaatcctgctctggaactagcagtgcggcctgctcgggccagctccgcctctatctggcgccagcctaaaggtcccgcttctaatcccatcatctctccataccgccctctgccggcctttcctctggtcgcccggattgcgagccgcttccggacgctccggaagcgaacctttcttttccggattgggcatcccggcatctgcacgtkgttatgctgccggagtttgggccgccactgtaggaaaagtaacttcagctgcagccccaaagcgagtgagccgagccggagccatggagggccaragcgtggaggagctgctcgcaaaggcagagcaggacgaggcagagaagttgcaacgcatcacggtgcacaaggagctggagctgcagtttgacctgggcaacctgctggcgtcggaccggaaccccccgaccgggctgcggtgcgccggacccacgccggaggccgagctacaggccctggcgcgggacaacacgcaactgctcatcaaccagctgtggcagctgcccacggagcgcgtggaagaggcgatagtggcgcggctgccggagcccaccacacgcctgccgcgagagaagcctctgccccgaccgcggccacttacacgctggcagcasttcgcgcgcctcaagggcatccgtcccargaagaagaccaacctggtgtgggacgaggtgagtggccagtggcggcggcgctggggctaccagcgcgcccgggacgacaccaaagaatggctgattgaggtgcccggcaatgccgaccccttggaggaccagttcgccaagcggattcaggccaagaaggaaagggtggccaagaacgagctgaaccggctgcktaacctggcccgcgcgcacaagatgcagctgcccagcgcggccggcttgcaccctacsggacaccagagtaaggaggagctgggccgcgccatgcaagtggccaaggtctccaccgcctctgtggggcgctttcaggarcgcctccccaaggagaaggtgccccggggctccggcaagaaaaggaagtttcaaccccttttcggggactttgcagccgagaaaaagaaccagttggagctgcttcgtrtcatgaacagcaagaagcctcagctggatgtgactagggccaccaataagcagatgagggaggaggaccargaggaggccgccaagaggaggaaaatgagccagaagggcaagagaaagggaggccggcaggggcctggggrcaagaggaaagggggcccgcccagccagggagggaagaggaaagggggcttgggaggcaagatgaattctgggccgcctggcttgggtggcaagagaaaaggaggacagcgcccaggaggaaagaggaggaagtaatagtttctaactgtcggacccgtctgtaaaccaaggactatgaatactaaatgttaagttctaggcaattatacggggactcagaaggacctggccgctgccttcattgagtttaaagggacaggattgcccttccgtcaagaaagtatgtaagtgttggactgcacaaattaatgtttttcccacaaccgagactttggagattaagaacttatttgaggatttaagaattagggaaataatttggtggaaaccgggaatgagttctattcttaaacagcctttttttttctttttaatgttggatatacggcgaggtagagttggccatatttcagagacttagattgacgtatatgtttctgcattatttttacaacaagtttgtgtatcagagcgggagtgcgggggagggaaagaaaacaaacagtttcagaattgaataggcaagtgactgttttaaagattaagtaataaagatgtcttatctagtgtgacttttaactttctgactactgggtagaaattgtacttgaagccggttacctggatacctggtacagattatttttgtttactttctgaaaaacacaaagcaggccgtgcgcagtggctcactcctgtagagtcccagtactttgggaggccggggcgggcggatcacctgaggtcaggagttcgcgaccagcctggccaacacagtgaaaccccatctctactaaaaataaaaaaattagccagacacggtggctggtacctgtagtcccagctacttgggaggctgaggcaggagtatcgtttgaacctgggaggcggaggttgcagtgagcccagatcacgccactgcactccactccagcctgggcaacagaggaaggggccatctcaaaaaaaaaaagcagttcaattataatggtttcagtgataccacttctaaacttatacttcttttggtatcaaatataatattcaaagtagtaaaactgatgtctgttttttaaaaagattttatgcctttcaacactgaacacatggatttcctgtaaatgatcaatttgggcttcattgactaatggtaataatcctcattaatccagaaaacacttaaatctttctctacgtttatatccccagttgtttgtgtgtgtgtgtttgtttttaagcttgacgtcaggtatagttttgtttgggggaagaaagaaacagacccataagatccttaattaggacattattatctttttttaagttccggagtagatgtgcaggatgtgcatgtttgttacataggtaaacgtgtgctgtggtggcttgctgcacctatcaacccatcacctaagtattaagtccctctgcccccttctatcccctgcccccaggccccaatgtgtgttgttcccctccctgtgtacatgtgttctcatagaacattattttttgattcatttgtcaagttggcctgagctggtttgattaggaggtgaaatgtttatatagctgtccttggtcttcctgtccatcaatcttttccagtttgatcgcagtaaattcatttctgtaaaacttaatatctcccataaaggattcagatttcataataacagattactaaaaatgcaaatgtttagttgttactgtctttggatactttctgataaagttgagctttatcgttaatcagcttttccactgggacatggcagatatggcacagccaagccctcccggagcatagtctaatcatggcaagttttaactattgatgtaagagttttaactattgattttgctttcatcaaaagcaaagccattcacacagtatttaacaaaaaccctcgggctctgctaggttcttgtttactgttaaaacagtttaaaggcagggtcttgatcacttaaaatactcttagaagggaaagtaacattttaaaggattaacagtggaaaaagaatatccctgttcctcttccttcccccaagtcctcaacatgtgaaaaatagagttgataagtaaggagatttaaggcagaacccgaggcctacggagcagttaccttctacggcaatttcaagggtggatggtgcgagcgccgctggggcagctggcgttctggttcttactccgtgggaaaatggccctgagcccgactggcttgaggcttagacaggtgaccccgcgaagcgggtgggcaggcgcggccgaggggcgggaggcgggcagcctcygtgattggccggcggagggggcggtgtagcgacccgaggagggaagaggactccaagcgccatggccgctgccgcccgagcccgggtcgcgtacttgctgaggcaactgcaacgcgcagcgtgagtgcggggccggcgggcgggcaggggaccgcagggtgcccacgcagccccctgggtgtgacccgctcagatcctgcgcagtcttctccgcttactttcaagaattcggagaatttggataccgccctgggctcccaccgcgcgccaggcggaacagcgaggtcacagagtgcgcgatgcagcctctcagggcgcagtgaggcagcctttactctgcttgtctaccgttaaagaaactgaggcccagagaggacctggtcccacatcgtagcaggcagtggagagcttggcacggtggccaagacaaattcatgtatgcaattgacacatatttattgggcatatattatgtgccaaaaactattctaggttctggggatacaaagatgaaaggctctggagcagtttgaggtctagtggggaatgggatgaggggacgaggctaaaaccggctatagcagactgggtgtagaagggaaggatggatgtgagaagtcgcagagtcacacttcctggcatgtacagggagtcagggtattcaatgtcatgacacgcctgcctcccagcagaaatgtgaggtacatcctggtcacctgataaatacttgctgactgtgcaagtgcacaagtctgcctgggaaacatggaaaagtttgagctcacaggtgcagatcagtaggaggaaaggcgagggactggcgaggaacgtcaggcagagagaagagcaacaccagcgatggagatgcagtcccaggacacaaaagacaagtagacctacctttataagaggaggtaaagatggagaagayggctgataaaagaccatgaataagaatatagctaatacgatgagcccggcagtgtcttacacactttgaatggactatcagtataatagtaactctaatcctttcactgaccctatgacacacggtattgtcatcctcatagatacggaaataaaggcatggagaagaatttgtccagtgtcacacagctaagcaaatggcacagtcataatttgaacccagatactctggcttcacagtccttgttcttaggcctgtagtaaggaatttgaattgtgtgctgtagataatggaaagccattgaataatatttgtcaccattaaacactgataccttaaaatgtcccatgacaaaagaattacatggccaaataagtttgagaagctccttactgctgtattgccctcttggagaatcaaaatatacattagacatgcagggctccaagaagctacaaaaaatactaaagctgtgttcaaatttttggttgtaaacctgtgtcatcatagaactctttgtcacacaacaccatttatatcccatggaatcagtgtcacacacagaatatgtttttggaatggttgcatgaaaagggagtatggcataatcagaactgtgttagcacattctggtggaaatgtggagtgaagaggaaggactagaggtcattgtcctgctccagcctgaagataatggcttcatgcacggagaggcagttccttgggtagatagaaatgctgagaggttggttagaatccacaggattttgtatctgaatagtgaagagttgagatttctggcttgggcatcaagtaaacagtgggctcakttaccaaggcagggattgtaggagagttagtgttaggaggaaaatggcaacttcagtctagggcattttgagttgagcatgcttctggtacattcagatggagaccccagtaggtgattgaatgtattgttctggggctcaagagtgagttgggaacacatccatccatgcgtatggaggacagttgaagccctaacaaaactctaacctagaaggaaacagctgagggtgaattcctggggagcagcactgccacagcaggagtagcaagatggtgctttcttctgcacatgcttattattctaatagggtaaacattttaaaagtgggagatttccartgaaaatcttggaaaattggaaaatggcatcattgggcacatgtttcatctgggcaaagtgggctagggcacggggtgatgtgtggccatttctattggacagagcatgcactctgggcttctgcccaacacattccatagagcaactgcgctgacaactgaatggaggggaaagaatcagcactgaaggagacagaggcaaggcgtgcactggccagagaggttgtgggaaggccctggagggcaagagtcacattccgtctccagatgtgcagccctgcacagggtggtgggtgcccatagtcccagctactcaggaggctgaggcaggagaatcacttgaayctgggaggcatagtttgcagtgagcagagatcaggccacttcactccagcctgggctacagagcaagactgtgtctcaaaaaaaaaaaaaagatgtgcaatgcagccctgctttgactgtgttatctctggggtacagcagggaacaaaacaacctaaccacaccatgcatggggcacaggggatagatgacaaactagttagtaaaattgagagtacattagctgttgaaagttattacagagaacataaaggaggctgggatgttgaaggaagggatgcaatttttgaggtgttcagagcagccctcactatgttagtttcctacagctgttgtaacaaactaccatgaacctggtggcttaacacacatttgtcttaacagttccagaggtcaaaagtctgaaatgagttttactaggctgaagccaaggtgtgagcagggccacactccctcttgagtaaggctcagaggtgctgcagaatccacttacttgcttttttccagcttctagagctctaccttcggttccttagcttgtggccccttcctccatcttcacagctggcactcatcttgcttcagtgctcacatttctgtcttttgggtcaaatctccctctgcctcccttttataaggctatgagtgattgcatttagggcccacacagatcatccagaataatctcctcatttcaagattttttttttttttttttttttttttttgagacagagtcttgctgtcacttaggctggagtgcagtgatgtgatcacggctcactgcaatctcgaatttctggcctcctcaaagatcctcccaccttagcgtcccaagtagctgggactacagtgcacaacatcatgcgcagctgattttattttttgtagagatggagtctcactatgttgccccagctgttcttgaactcctggccccaagcagtcttcccatcttggcctcccaaagtgctaggattataggtatgcgccacaacacctagcaagattcttttttttttttttttttgagatggagtctcgctctgtcgcccaggctggagtacagtggtgtgatctcggctcactgcaacctccacctcctgggttcgagcgattcttctgcctcagcctgctgagtagctgggattacaggcacacaccaccacacctggctaatttttgtatttttagtagagatggggttttgccatgttagccaggctggtcttgaactcctgacctcaggtgatccaccrgcctcagcctccccaaagtgctgggattacaggtgtgaaccactgtgcccagccaggattyttaatcatatctgcaaagttcctcttactatgtagggtaacattcacagattcccaggattagaaccttatcttcaggagcrattactcaactcagtgattactcactgakaaggtaatggttgcggaaagaccagtggatgcagagagcaaaccctgtggccttcagggaaggtatgcagaggtgaagcatacctgggtatggaacagagtgaataagggggagatgggagtgtggggccaagggtgaccccaagattctccggcacgaacaactggaaggatgaaattgccattagatggggatggggaaggctgtgggaagagcaggcttgagagaacaccaggagctcagtctyccatagggaaaatgttgccacttcatagacatccaagcagagatgccaagtgggcaggtgaacctggacttcgggagagatgcccaagccrgaaagataaatgtggaagtcatcagcatcaaaggtatttgagaccatgagaccaggggaggtcactaagggactgagtgtggaaagaaaagaaaaagttccaggactgacccctgagccgtccagggtcaggagtcaaaatcatgaaaagcaatgaaaagaaatgaagccaagagcagccagtgcgatgagaagaaaactgagtggtgccctggaagccagggaagaacatgtttccaggaaggagggagtgaacaggaggatgccgctgacacatcgggtaccgtgaagacagaactgaactgagcaggctggttagctagtggagggcattagtgagctgggaagctggtcagttgagtcggggtaaaagctgatggcaggaggttccagagggaatgggagaagataaatcggaagaatggctatagcccgctgaagggaaggagagaggtagaagtgggagtgggagaggaaagaggaacaagaggtttctggttttgttatgtaagatggaggaaatgtgcttatgaataagctaaaaaaatgctggtggctgatggataatgtctaatagggagggggattttgatgatttaggggacagaagggagagctgctggcagtccttgagtagatgagaggggctgcgatttagggaatgcaagacagattgggttttgctgagagtgtsgctaagaggtaatcagtgatgtcagcaaggaagccagaataagggggccagagccaggagggcaggtagatgaggtcctgctctccccaagcctcactctgcttctctgaaggagcccaaagaagcccatcagtgccttcaggccatcctaagaaggcgggaacccacagcctgcccccacccccctcccccaggccctctgtcttggcatgccaggaaaagagaagagagggtcaggggaatgaaaatgtctacattcacttatttattcatttactcgctcatttaatcagtacaaaaggcttactttatgcctggcacttacttggtgctagccacaggggataaagttgtgagaaacagtagatcctgcctgggcatcactaaattcacartccacaggcagaaagaagcagaaaaacagcaccagtgtggtacgttttaacacggagggaggctccagaaagggtgtctctctgcagcctcgggcctcagggaaggctgcccaggggaactgacaggaaagaacaaaagttatccagaagaagaggcaaggaaagtatgttacaggcagaggaaataataacggcaaagttctggaggagagagagagactgtggctcattcaaggaaaagaaagatgttaatttttccgggagcccaaacccagagatggagtgagttgaggggccagtcaggcaggggcaggcctgaactgtatgtgagagccatggggagccattgaagcagctttcaacaagggagtgacatcattggaaatatgccccgactacagtgtggggaatagaggtggcagaggtggagccacgagaagccagttgggaatttggtagtcatacacatgagaggtgatactggaaccagagagtagcaggttcccaggaaaactgggtgggcttgagtggagacatgtttgaggccttggtgcataatgagctctaaagggtgagggaggaggaagggtcagaatggctgaaggcagcccaggacagaaatgaacatttaaggaatgggcagagtggaaaaggagccagtaaaagaacaattagaggaagcccagacaagtaggggtcctgggagccaggaaaaagttccacctgcccaaaaaggtgtggccacgcgtttcatgctgctagagtgaggtgctacgaggtctgagaagtgaggacacagccagacagctggacttgcagacacagcagcctgatttcaggggccaaagaatgtgtccgagacccagaaacgaagccagcaaatgtaggtcgggaggagagagagggagagtgagcccgccagagsgggtaggaggtggaaaagtttcaggcgcaaaactcttcaataggctgaaaaagattgagtgagggggaggacyaggaaatacaggacaggtagaggtcccgagaaagcaagaggggacaggatacaaaccacaagtaagaagtagaaataatgaattgagatagcctcagagcttggggaagaaaaaaaaaggtggcggggggtgtagggaggaagcaagggttcccaggagcgttcacgttggaaagttttgagtttggatttttttttccttcccttggctcacttttcttgtcattagagggcataaagcagggaaagtcttccaaccaaagcccaccgtgaagggacaagcctggcctggcccgcgtcctctcccccggcgcgcgcgtcgggaaccactagatggcagccgcgactcgcgccagctctcactcgcccccgcgtctgctttgacttcgcagttcgaatttttgagatctggacggccactgagatcaacccttttccttcctccccaaccttccccctcgggtgttttaattccagatttgaatttttggcggggagaaggaagtgatgcactcaagtatctaccgagacccaaccactggacaaggtcttctgggcaacccaacgaaacataaaaccgtcttcccagcctcgatcagagagcgagcaggagaaagagaagccagaggagagactgggactgtccaggaaataggagacgaccaggacaggaagagggaccacagccaggggagggagggtttccaaaaaggaggacgtgggaaatctgtagagaagtcgaccgagaagtgagatgcggtggcgacctcggarcgcaccgggtgtgcgcgcagctggggcctctggggagcggcgcggcggggacggaggagagctcggagcccggggctgcaactgggcagagaaagatggggaccagggaggtctttgggtccaggaagttctcctggaggctcaggtctagagcctgcctgaagaaaaattagacatcttgaagacactgggaaatatataaggcaagttcccagcatagggtagtaagtaagaagaggcacacagagttaaccttgggccgatttggtcaacgctcctaacccagtaagagctggggcttcatggagaccagagacccccatcttaaacttgcatgtacccccagagcgtttatctcagctgcccgcaggcatttgataggaattgctagagtaaatgaattcgtgaaagaatgatgctacagcgctgggaagacgctgagtcaactttttgtccatcgtgatttctgggtctatatatattttttctattgtacagtgtctgccaagaactaccaatttgatagcatcttagcactagactgcaatgtgagttagcttaaggcttttcattttttggtctctattttcaccttaggttttttttgctgtcgtttttattttccctaggtgccagtgcccaactcattctcatacttactcccaaggtaatacttctgtatttttaaactagccacaattttggtttctgcatttggcattataatacatttgggtagtgtatgtaaagaaaaccaaggcatgtgagagcaaggtccatgaaaacagttaccatttcactgtgaaattgataacacgtaactctatacaaagttagctgaatgtatactactaatcacgtgtttgtttgtctcaaatatctatttaatgctacttacaacgcttttctcttttaattacttgccaagtctaaaaatgcacagataggattttaagaatgtctgagtttgtcaaacagaattaatcaagatgaagtctttggaaggttctaagacatctctaaaaactggaggctaaagaacaagaacaaggtggttcctagaaagaaaaacaaaacttgtttgtatcagtctttaaaataatattgtatttaaaataatattgtatttcctaatacttaaaaataataacaaaccttcagttaccacaacatcttagtcattaccaaacaccaaacactgtggtccacagagcagcaggaaactcaacatagtttcagcatgtcctaagaatgtcacatggattactgacacaaccactgattttgtctcttctaaggtcagatctaaacattaaggcaagagttggaaaggaaagaggctgaccatccaggatcctaagcagaaacccacagagaagcctgttggggagttagaacagagagagtaactcgccaagggctttctcttgcccaaggagtgactcacccttcaggacaagccaagggacctccctgtccatcattaactgycatctatgagacagaaacatatccaacctttaaggcccttctgaacatatacagaattttgtcttcagctgattttctcgaattcttagttggtttcaacaattagttaatttcctatttgagggaataaaattaataayttacagaaagatattctcattgttttycagratcatatttatgtctttaaaatttagtaacagaaatattagatttttatatacagagagagagacagggtcaccctctgtcacccaggctggagtacagcggtacagtcgtagctcactgtaccctcaaactcctgggctatcctaccacctcagcctcccacgatgttgggattataggcttgagcccctgcaccgggacagattattttttttaagcctagaggaatccaataagtttgagttttggttaaggatgcctttgcactcagggagctgaaggtagattgttgtccasttctgatctattttccttaaaaaagaaaaagcataatgaaaattgttctgtagactttatcgtatgactgaccagtattgatataaataagtattgataaaaacaaggataaaaatctttaattaggtccctttcattgttccaatatgacagaaaatcatttttaccataattaaaacctaatcctttgcaaggaaatagcaccttataaaaatgtttattaggccrggcacggtggctcacacccataatcctaggactttcggaggccggggtgggtggatcacgaggtcagcattgtgaaaccccgtccctactaaaaatacaaaaattagccaggcatggtggtacacgcctgtagtcccagctgctaggaaggctgaggcagaagaatcccttgaacctgggaggcggaggttgcagtgagccgagatcccaccactgcactctagcctgggtgacagagcaaaactccatctcaaaaaaaaaaaaaggtttattaaatttcaccaagataaataagttttttatatgcataagcttgagaaatgtaaatatcttactgtgataagttatccctatgaattaaaaaaaacaattcaaacaagttatcacagttgctataagaagtgtaagcaagcctctaattcatgaacttactaatagttgttctgtaatagtaacccaactctaaaccaggggatttttttcctagaggattgttacacattagattttcaaacacatattttaaatataatgcaagaaatgttttattattttcacaaattaggctcaagttagcattacattctatctttttttttttttttttttgagacggggtctcactctgttgtccaggctggagtgcagtggcgcgatctcggctcactgcaagctccacctcccaggttcacaccattctcctgcctcagcctcccgagtagctcggactacaggcgctcgccaccacacctggctaatttttttgtatttttagtagagacagggttctaccatgttagccaggatgatctcgatctcctgacctcgtgatccacccgcctcagcctcccaaagtgctgggattacaggtgtgagccactgtgcttggccgcattacattctatcttaaaatacaggtattgattttaatttgatgtgcaacagtgaaacctggaaaaaatatatttttggtaagacttcaaaggaaatacttatgttcactgctggattttactatcaaataacatttatgcttttttttaaagacccactttgatgctaacttttacatttctagcccctggactttcaccttctgggaaaacaacagattatgcctttgaggtatattcactcaatccattatttcttttatgaatgactagaaaaaaataaaactagaatattttgctaatgaattattattttattttaaatctgttattaattcacattccataatctctatttgatcagaccatatttagcaaagtacctggttggtataatggaatataaaccttctgagatcatggctaatgtctagagtgctgtctttgtagagtcactaaaataggataaattcccaattctacaaattctccagtacatatatgttatgtgttaaatctttagttttttaattataacaatcccaaaagaggtcaaagtaaagtaacaattctggtgcatttttatcacactgtaattacataattacttataattatttgtttaagtccctgtcttctcctagtccaggaatttttttttttttttttggagacagcctcactctgtcacccagactggagtgcagtggtgtgatctcagctcactacaacctcygcctcctgagttcaagcgattctcctgcctcagccttctgagtagctgggattacaggtgcacaccaccacacccagctaatttttgtatttttagtagagacagggttttgccatgttggccaggctggtctcgaactcctgacctcaggtgatctgaccacctcggcctcccaaagtgccaggattacaggcataagccaccgcgcctgccttcaggaatgactaattaaaatgtcaccgggggcctgacagttaaccaagagatgaccaggctgggtgatgccatggtgagctcactgaaggcacagggccccatctaaggtgtgactccactcaaccttataagatcactgccatatgggaatgcattcccagtttgctggattattcaagagaaagtgaaattcagatggtcttattaaattttttatcctgatttttaagcattattagtcaattcaaaaaaaaaaagaaatttaaacrtaacacagatcaaataaaatatatttcaggcgaaacatgacccatcatccatcagtgtaaaagcctttctctcacccgtaaactttatgaggccctgtgtctcttattcatagttgagttaccagagcctacacagtgcctcgaacatagaagacagtagcattgactgggtggcaggtatgcaagggtgggtggatgaatggaaagtaagacatttgagagttattttacaggtggagttggaagaaggtaggcatttgaagctaagggaacagttgagagtttatgatgtgtttgggaaaagacaagtcattcaaatgacaggagctgaagtttgcttaaggaagtgtggtgcgtccacacttctttaagtgagaccaggtgggagatgacctggaagaccatgctaaggagtgtatactttatgctctaggcaacaagaaaccatttcaggtttttagaaatggactggccaactctcaaatactccctacacctaaacctttttatttttttcagatggctgtttcaaatattagatatggagcagcagttacaaaggaagtaggaatggcaagtattcgagatgtctacggtctcctactgtaaatgttacatatctcacaagaccatgctaaatgacaacaatcacatcctctatttttaaaaatgtacaacgtgagtttgccagaagagtctattgcagttctagtggagttgaacctaacttataggttttcttgtaggacctaaaaaacatgggtgctaaaaatgtgtgcttgatgacagacaagaacctctccaagctccctcctgtgcaagtagctatggattccctagtgaagaatggcatcccctttacggtttatgataatgtgagagtggaaccaacggattcaaggtattcttgtattgttgttattgtttctttactttaagcagaagctaactgttgattaaaacttgcccccaaccaggcgtggtggctcaygcctgtaatcccagcactttgggaggctgaggcaggcagattgcttgaggtcaggagttcgagaccagtatggccaacatggtgaaacactgtctctactaaaaatacaaaaattagccagtcatggtggcaggcacctgtaatcccagctacttgggaagctgaggtgggagaatcgcttgaacccargagacataggttgcagtgagcggagatcgtgctactgcactgcagyctgggcaacagaatgagactccgtctcaaaaaaaaaacaaaaacaaaaaaaaccccacaaaacttaccccaagccttagttaatggcatggcaatttatttctgaaaaatataacatactggtttttattttctcttctccaagcttcatggaagctattgagtttgcccaaaagggagcttttgatgcctatgttgctgtcgrtggtggctctaccatggacacctgtaaggctgctaatctgtatgcatccagccctcattctgatttcctagattatgtcagtgcccccattggcaagggaaagcctgtgtctgtgcctcttaagcctctgattgcaggtaaagactgtttatttctttgtttgttttattttgcaatkagcaatagatcttaagaaagaygcaagccagtccttttaacatacacatttcgaaagctttctggtttgttcatttcaaatcaatgccttgtttggagaacaatcattcattttaaaattctgatcttcattattgtatagataaagacaattggggtcagtggaaggaaagtttgcagatttaagctatggggtcaccatgtggaaaagggggaaggtcatcactgacatatgatgagatccctctgtcagcagctttgtcctttaaactgctctctgttttgtcccattttgccagccactgtagagtttaaggagaacattagctgttatttttctggtgttgactcaaccttttcttctacataatggctcttcagctgacctcaggctttgtctcttccctgggacatgtggccagcatggcccatcatgctgggtgacatctgctctgtggctacccagggcacagacgtacaaatccaaatcagaatagctcatttgttccacaggggaccttgagattttctagtcttttcttctctgccatttttatggmtgctagcatattactatttaaagttttatagctaacatgcactaactggtaactgggacatatcctcagtttaaagttttgccctttcttctcccctctcctgccctattgtgaagaggccttgtgatgggatgtgagtaagtcgatggcagatgaactgctgtgttgtgaatgagggatcagcagggagcagcataattggtgtctggcaaatggaaccctctggtgaaactgtgtcagcatcacacagaggggtgattagtaaagtttagaaacttgacagaaccacaaaaccacggagcccagcaaaggcagagcgtcactgtgcttgctgccaagagggaataaagatgtcttttagagacagcaaatatgagttttgttaccagaggtgctgggcagcctgcattgacccagctgcagctgcttaagctctggcccccaaggagcctgaggttcccagagctcactgctattaatacagcacagtcatcacacacgtgcatgattaacatacatacatgttaacaaagacacagaagtcatacatgcatgttaacacaggtacagagatcacatgcacattaaacacacatgtatgttaatacagacagacaccatatatattaacrctcatatttatgcagaagcaggcaatatgcatattaaacrtgaccatgttaatgcagacacatacatgcatattaaacacacatgcatgctaaacatgcacgtatgttaatgcagacatggacatcatacatgcatgctaacacatacagaggtcacacatacatattaaatatacatacatattaatacagacacagacattatgcatattaaacaacataaacattcatccagcagtcatgatacatgtcaaacatgcaagtgcattaattcaggcatagacatcaatgtacatgctaaacatacatgcatgccaatatagatacagacctcatgcatgcctgttaatgcagatacagacatcatacacattggacttacatgcatgataacacagacactgacatcctccatgttagattacatacatattaatgcagacacggacatcatacatgttaggtttccatacatgttaattcatatatatcatgcaaacaagagggtcagcaaagtttccttctctaattttgttcctcagtcctaaggctgaattaggtatctccactaacctttatttagatgctttattaaaattaatattattttgttcaagtgccaactacctcaggaaccgggagtgaaactactggggttgccatttttgactatgaacacttgaaagtaaaaattggtaagaaccatacttttgaattatctcccttacctttcaactccacactcttctttaaatcctaatatttaaaaatcaagcagttatgatacagttagaataagccccaatattctatagaagagcaaggtgacgaaagtcagcaacaaagtattgtatatttcagagtagctagaagagaggacttgaaatattcccaaaaagtactcagagtgatggataccccacagagcctgacttgatcatcacactttctatgtatgtaaccaatactcacatgtaccctgtaaatatgttaaatattttgtatcaagtttaaaaagaaaggaaaaaatcaaggagccaaggaaagggtttgtatatatacacattttctttccttttccaagtacatataaaaatatgaaacaatgtaataaacttcttgagaattactgctgaaagcatattgaaatgccatgaatcttaattggccattctctgcccaagttactgactgtataccaatgataaatggctgtttcctttctctgacatattttttacattttaaatcaattttattgagatatgacttttgtataataaaatgcacacattttaagaatctggtttgatgagccttgacaaacatatatgctcatgtaaccaccaccccaatcaagatacaaaacattcccaccactccagaaagtttcctcatgctccgtcccagccaatccctccagtccttttcccaggtaacctctgttctgctttctgtcttcttagtcatttttatgccgtcttctctgtctcagactcttggctaatgcggtagaaatgtctctctttttagtctggctcaatatcctgctttcagatcttcgtagcagaataaattgacatttaactgcacacttttagtaacttttctttttaaaattaaattgcactatcctttgacatttcttaagttgatgataataatggccaacacttacattctaccttacagtttctaaagacttttacctaatattctctcatttgatccctacaacagctcaatgagagctggaggccctgtgctattattatagtctaatcttacagagaactcagagaggctaagtgacttgcccaaagacacaaagtaagttgcagagygaggaccagtggtgtgctagtaaactggctctctggmatttaataataaacaagtaagccctgacttgtagtgttggcccatttctgtggtgtaaatactctcaccatggccagtgacatcactcatccaggagtaggaaagagatgcatacacatggcccttggaaaccagtaggagccagctccaacacaccactgaaaaccccaggtttctgactctaaatcactttccattgctccttactgcctcactacatgaaaatgaaccttttctcatatttttatttttaggstgatttattatcctgaagtcatttttcttcttaaaatgatgcccatggctttascctytactgaaaatccttatgttttaggcatcamttcgagagccatcaaacccacactgggactgattgatcctctgcacaccctccacatgcctgcccgagtggtcgccaacagtggctttgatgtgctttggtaagtgctggtgcctcctggaggggcttttttagtactgggtctatggatagtatttygttgctcaacgcacatgctaagtattcattgattagcaccccacaacatccctagctttggctgtcattaccccctgtcctaaatcaaacattcaagctttagaggttggtgactaggtgacatctggtgtgggccacaaacctgctcttcaggatggatcccccccagccacagccagggacatagggatgccgctaaaggggcagttggagctggtgtgcagcatctcaggggataaaggggcagttggagctggtgtgcagcatctcaggggataaaggggcagttggagctggtgtgcagcatctcagggacacaccagctacctttatggcctcactaactaggcaatgcccaaggcttcatgtcatggaagagggcagggaacagagctaacacctccagagcacccccagaccatgcacattgtgttagcacctcacatacatcacttcactgcagttctgtgtgatacaggacctttgttttattgaacaagaaaactgggtttgagatgtttagtgacttgcccatagtcttactgtatgttccctcggcttcagctgctttgtgccgatggccccctaatcagtatttctatcacagaccttgctcctgagctccaggcctcatggagaccccacaggcacttcacattcagcatgtgccaaatgacccttgttcatctatgtgcacatgcacatttttttcacattttaacacctctgaaatcaggacataacttaaaatctgtggcatcacagtatgttttcatcctccgtggtacctattttaaaaacggtgcaggctgggcacagtggctcaygcctgtattcccagcactttgggaggccaaggtaggaggatcacttgaggccaggagtttgagaccagcctgggcaacaaagtgacacctcatctccacaaaaaaaagttttacaaattagtcaagcatggtggcacatgcctgcacatccctgtacagtgactgtcacatcctaggtacttgtatactgctagttcacacaagcaggaggtgacagagttagaactcacatccaggtcccccagggccatggtctgcttccctcactatgttatgctgcctkccaagagactgtagaaaattgtgtctaactccattctggtcaatattgtcagaactttgatgagctgttccctaataacctggaaatgaggggaataaggttatccttcctaactgtaaagtacatagtaaatacatcatgacccaaagcagccacccttaagtgggtgactcacaggcccaaaggcttcactgtcaatcaaagtggggagtgggctcagaaggcaggagaataatggcagttgctctttcaagtactgcccaagggaaagaacacctggcctgaggaatctgcccataaggcccagtggcctgttctgaaggtggacaagccatgtattaaatcttcgaggtaactcccctcattaggactccatggacttctggtcataaagtggccatcctagggcttgactgtagggagagaaggtgccatcgggaagactctgatgtctgcttagcagttatatttcttgtcataaagcattaarctgacttccaggctttacacatagtttctgtgagcttagctcagtgagtccacccctgagaaacaaatctgcacttggatctgggatctgatgcagtctaaatgtgctgcaaggcagaggtcacactctgactacagtggcctcaccggccaccccaacttccccatgtggacacctcattcttgcattattcacacattccccgcttagaaccacaaagccttcatatccatctacaaactaatttccaaaacaattttctaatgattggtccaaaaaatattatctgcttctcatatgtagaagagagtaattcctccattctagggaaaacgaaaactgtaattcatgcaaaacatggggtcatctcccttcayagtcaagtgaaaggagagtgtcccagaaacattacagaggcccccatggggaattatactgaaaactataattcatgcaaaatatagttcatgktacactgtgtttccagtgcatcactgatgtagacggtgatgtctgttctcttctgcagttgatgagctagaagtcatggcaggccagcaggtggaggcagctatgaagcttagttcttgaagtagcaaactctgagtttacggtacataagagaaaaagatctgctttttcttcaggccaagaattaataataatagtgaatactaaggtwtacaatgtgccaggtactcttctaaatactttacrtgtgtcaactcatcgaattttcacagccacrtcatgaaccagtactattatttatccctgtcttagagtcagggtagtgcctcacaccaggtccgcagcaggaatatcttgttccaggattgacatctgggcagctgaccccaaagtctatattctcactcattacactgtaattttcatagaaatctggtgtagctatgacccacttttggtaatatggtatttgatcaatgcaaggtataaaatggtaaatatcttccataaggaagtcattttttagattcagtgcttttttgttgctcaaatatataattcgacaccataaaaatgtattgacactagaaaaggtccatatataatcttatacatactactcaaaaatactgtaatgctgttaatgtaaactcaactgtattaatttatattataagtaatgactgttgcaggcaagaggtgggctggtagaatgtactgtgatcatcagtgttagataatatatccacygtgggttgagtgccaaacagctccaagacaggttgtgatctaaatggagggaaggaggaagatgacgctttccatctgtgtactttcaatatttctttttagccatgccctggagtcatacaccaccctgccctaccacctgcggagcccctgcccttcaaatcccatcacacggcctgcgtaccagggcagcaacccaatcagtgacatttgggctatccacgcgctgcggatcgtggctaagtatctgaagaggtatgtcaccccgaaggggatagaaatagaacaggaggcccacattctgccagcacgtgaaacatgacatgcctgagcctgaaatatcctgagcaggtctgttccagaaaagcagtcagtggatgcgcagaagccccagacaccagcagcctctggagggacccaagggacaggcagatgaaaactgggtccttcagtccctaaaaggcaaaggcagccaggggacaaactaggagccaagctaggatgaggggtggtgtcctttgagatttggctccccagggcagaaatgagacccacactggcagatgttggctatgcccatccaggccctgtccgaagacacacagaatccatcctttgagttaactcaaatgaactaaacttaagacataaatgtgggctgggcacaatggctcacaccagtaatcccagcactttgggaggccaaagcaggaggatggcttgaagccaggagttcgaggttgcagttagctatgattgcaccactgcactccagcctgggtgacagagcaagaccctgtctcaatttaaaaaagaaaagaaaagagtagagattgctgtcccaggagatataaaaggcagaaaatgtaaaaagattcctaagaggttgtgacagatttatgaatacaagtatatacatacatgtatagccataggctacaggagagcaaatagcaatcaggtcctgagacagcaaagatatacttaggatgaaagctgatacctgagatattaggacatactcaaagtcagactcacgtttgtatttatacataatggacagaacggccacaggtaggctaggcctagacgtgagcacggtgcttcctctggccttgagctagaagctccactgacaaaggagccttggaattgcatttgtagcagagcagcaggaaggaacccaatactatttcaggtttgtgggggactcccaggacagcacagcagcacttgactagatccaaacagacacgcatcatggggagccagtttgtttgacagggacagaggcttggcagtggcacagcggtggtagataaggagagatggacagaggaaaggctgaaagctccatcacctgctacttcgccttgtcactgggggaataaggaactaacatggggtttcagaaaggaggcaggaacacccaaccattccacatgaaaggaacatttcaaatgaaaggggaaaaaaggctgtgcttttttatttcaccacaggaactcttacgcaaggcaaaattgcaaaaaagcccacatgaaaagtaggttcccttgacagtcttcaggcttcttccctggggcaaggttttagcagtgagtgcaggaaggctgtgcacaatcagaaaggggcttttgagaattgacttttccaaagtggcactggggacacccagagcaagctaaggctcattcgacaataacatccacttcctcaataatgttggcatagaggtgcagcaaccacagatataaagaggcccccagtgggtccagtgggaggcagtgtctcagagagaaagagcgctggccggcaggtagccccgggcatctgagaatgtttacatcccttcacagggccgtcaacagcactgacaaatgaagaagaagaatgagtctcagggcaccttcctggagtggccctcgccatccagggaccagcgcgttgcctcccccggcgcttttacatcacatgagcagctgacagcgtatttattatgcctttgctgaaacagttgatgagaaatatgtttcccttcagttttcatttagaagacaaggcgtcgtttgaataacttgcctgatttttcttcctaccgagtagcatttctttttttttcaccatatctttccctaaggcagctccttattctgtaggaattgccaatgttgatgtgttattgttaggtatttatatcattcacagggctgtcagaaatcccgatgatcttgaagcaaggtctcatatgcacttggcaagtgcttttgctggcatcggctttggaaatgctggtgttcatctgtggtgagcaagtctgagatttcatttctttactcaagctattgctttaaaaaatttttaatgtttataattcaggacaggtggtaaaatttaaatatgctatagaaggaagaaatttaactttatgttcctaaatgtattcttctttttctttttttccttttttcaccaccagctaaagtagaaacctaaatgtattcttaaattgaatgtggttcctaaatgtattcttttgtgttcctaaatgtattctttttctttttttcttttttccaccatcagctataaagtagaaacctaaatgtattcttaaattgaatgtggtttactgggttttttaataacatatttttaaggtataattcacatactatacaattcacccatttaaaatgtacagaacattagtttctaatatattcacaaagttttgccaccatcatcaattttagaacatcttatcaccccaaaaagaaatcccatacctcctagcttcatccaccaatccccccaccttccctaatacttagcaactaccaatttactttttttctttttcttttttctttttttttttaagatggagtctcactctgttgtccagactggagtgcgatggcgcagtcttggctcactgcaacctccacctcccaggttcaagcaattctcctgcctcagcctcctgattagctgggattacagatgtgcaccaccatgcccagctaatttttttatatttcttaagtagagacggggtttcaccatgttggcctggctggtctcaaactcctgaccttagttatccacccgcctccacccctcaaagtgctggaattacaggcatgagccaccacgcccagcctactttctatctctgtagacttccccattctagacatttcatgtaaatggaatcatagaatatgtggtcttttgtgtctagcttttttcttctctatggacataggttttcctttctcttgttatataggtaggagcagaattgctgggtcatatggtaattctgtgtttaaattttaagatactgacagactgttttccacggcatctgcgctgttttacattcccacctgcagtgggtgaagattctgatttctccacatactcaccatgtgttgtggattttttaaacttaaatgtaggatttttcccccaatctgtcacaaaagaaagggatcagaatgcttgtcaatagcccagaattaatctctttgattgaaactttattggtatgttgctttaaattgaaaaccattgaactttaaaaattaagaataggcctttgctagggtgagcgcaaggaatgatcagcctctgatgatctaccactgatgggagcataaattggcaacacctttccaaaaagcaagtgagcaaagtgtacccagagcctgaaaaatatttatgcccctggccccaccaattctcttctaggaatctagcctgaagaaatacccatggctgggcacagtggctcacgcctctaatcccaacaatgggaagccgagttggacggatcccttgagctgagcccaggagttcaagaccaacctggacaacatggtgaaaccccgtctctacaaaagaaaatacaaaaattagccaagtgtggtggtgcatgcctgtagtcccagctactcaaacacctgtagtctcagccaccctgaggcaggaggatcgcttaagccagggaggtcaaggcagcagtgagccagaattgcwccactccagcccaggcaacagagtgggaccctgtctcaaaaaaacccaaataaacaacaacaacaaaaaaaactataatattttcctatttgttcatcaatagttcaagaggatataaaaaatttttcactaagcgtggtggctggatccttcctcacttgagcccaggaagtcgaggctgcattgagctatgatcacaccattgcactttagcctgggtgacagagtgagataccatctctaaaaaaaaaaagaatttttcagtaaaaacaaaaaccataatgccttttcttgatgtcaactaaatctaaacaaatccttaaggtagaatttagcaagagaaatcagtcaaaccagaactgattaacatagcctgtcaggctagaataatcatttctgactggactctgtgagtatgtaacatttgaagggatctgtcagttactggtgggacagatcactgatgggtcaagcttgcacgtcatcaaatacagcacatcctgactcacaaaattcccccgacatcatctgggagcacactgccaaggaactgccagggaaaaacagaaaacacatgcccagagcttattacagaaacttcgaagtgaattaccgagtctttgagatcgtaatgttaactaatgggttcagggagctacttctggatcaatactttttaatgtcatacaattctatgagcatttgaatttgagcattttcagaggttttgttaatgaatgcactacatgtcctagacatcataatatatccttatatccaagaaaacagaacatatcactttttcaggtaatgatactgtctagaggccgtgacaggcatccccataagagtatctttctattgttgacttgaattttgataactgtgtatgaacataaggattttctttcttttctagccatggaatgtcttacccaatttcaggtttagtgaagatgtataaagcaaaggattacaatgtggatcacccactggtggtaaaatcataagaataaattatttaattaaatattataatcatcccaatttcyataaatatatttgccaattctcgcctgcttagagtatggggtaaagtaacttaacatctagaatatgcagggaagaacagctttgtcatctgccggtcaccgcatttcgtttctccccagccccatggcctttctgtggtgctcacgtccccagcggtgttcactttcacsgcccagatgtttccagagcgacacctggagatggcagaaatactgggtatgaaccattactcaaaattctgtgaccggccaggcacggtggctcccatctgtaatcccagcattttgggaggctaagttgggtgcatcacttgagcccaggagttcaagaccagcctgggcaacatggcaaaaccccatctctaccaaaaaaaaaaaaatagccgtgtacagtagtgcaagaccatagtcccagctacttgggaggctgaagtgggaggatcatctgagcccaggaagttgaggctgcagtgagctgttatcatgccactgcactccagcctgggagacagagtgagaytctctctctcaaaaaaaaaaaaaagaaccataaaggacaataccaaaaaatattgctttgcgatagcttaataatgaaatgtcaggctgggcacagtgtaatcctaacactttgggaggctgaggtgggaggatagcttaagctcagacgtttgagaccagcctgggcaacatagtgagatcctgtttctttaaaaacatttttaaaatataaatatatgattaaaaatgtcagtgacttgaccaaagccctatctagcactaaaattctgtcattattatgtttctgagagtattgagagtatttgtagtaatactgtttcctgtttttatctcaagggaaagtataattatttttatatttttaatgttataaatgacttttgctatgttcgataataaaatgaatctgtatcaggaagcaggagtaaattcctaattatagagaatcaaaacaactggaaactttttttcaccaaagcctgcaaaggtcctgatcaattagaaactttataaaaatatcctgaaagaggagtctgtttgccatactgtagaataaataatgtcaataataagatatccacagtaccttttgaatcttaccagaaataaaatgatattcaggatagctttaatggtaagtaaaatgttggtgttttgctaatacaagaactcttttaagtagacttgaatattttattaacttgcaaaacatcttattccgccacttgtgtttagttagggcaagaagggaaaggctaaaaagaaaacttcattatgctctcctagcccagccgttggagagattatttccagggaggtaggaaggaccgcagacatcctcctgcaggagctcccgctgagtcccaggtgctgtgctgggaatgttaatgacacaagcccagggcagagasgggccaggggctccatttcccagagggtgctgaggggaaacagtgcaactttgccaaggatctgtgtcccttttctctttcggactggagatgttgttcagccatattttgggactcagctgcctttgtgtatattcaaagcatgtaaataagaagagagagcgcaaatcataggctacatttatgataaatgggaaaatcttagagaacttaaarttaacactctaggcaactagcaacactactgagaagggagttcctctgttagacaaattccaggctggaagaacccactgattcttccttcttgaatgggaagttttaatgttatctacacttagctatcccacacgatgaaatattttgattctccatgtcatcttagatttcttagcttagaatactgatgtattctttttcctaccatctcttttttttctgtaacacttcataggaaaatgcagagatttcgatggtgttttatggcagtattcccaggaacattaaaacttcataaacttcgtatcatgtgtcaccactccacctaatccatattttagctgccgctgggtaatacagactggtcttgtcaggcaaggtttacctttcatccggctgctctcccagccagccccgtatctggttctattcataccttttcctggattcctaagagttctcactgtcatggaagagaaagctaaaaaccgatttaataatgtgcttcaatatggaggtgaaagtagtcacgatctccttttgaacaatacaagagaaagtggacttagactactgtgggaggcattttgcrtagacttcatataatgctacactctgtagagggctttacttcttggcagtgaatgtgtttggctagaatatatgagaatgtagggtgctaagggttgtgaaatcagttcccttcctctgggaactttctctgtcaccctgcctgagggcagaacctcccgcgtggctcttccagattgccatttccatgattatgtgcattattttttaatttttattatatatatatatatatatatwttttttttttttttaacagagacagggtctcactgctcaggttggtcttgacctccaggactcaagtgattctcctgcctcagccttccaaagtgctgggattacagatgtgagccaccaggccckgcctcttaattactaatcatgtaaaaattctgcccttatgwatcttctttcatcaataccattattatctgcatatgaaacgctgttttctgagagccttcatgttctttggtcctgcccagctggttctataatatttatttagaggaacctaccctgccctttggcaacagaatctaaaattaaaagttttatagctatagaggacaaaaattttcctccctgttcacacataatccatttttatcatgcttattttctttttggtggttaattttagagcttttgtacttctgtaagcttgtctcacagggtgtttgcaaaggatttgtctttttctaagatgttgctgtgggaaaagacgttgaacacatcatacacctctagatgtcagcaaattccaagccttgaaattacataagctgtgtgttcttcaaatattcattcctccatcccagcaccagccgactttcttgccttgttctgcacctctcttcttgtctttgttcctcttcttcctaccacacaaggggcaagtatgtaggacttggcagcccctccgaartgtcagagctaagtgagctcccccagccaacttgggccctcctggggaggcacacgatggccccgtgctgggcgttagggagaccccrtgggtgtgcatggtgtattcactgatcttgtgactgaactccacccagagcccgtttcttcctctctccctacagtcagcactttatgtcttctaggagccgacacccgcactgccaggatccaagatgcagggctggtgttggcagacacgctccggaaattcttattcgatctggatgttgatgatggcctagcagctgttggttactccaaagctgatatccccgcactagtgaaaggaacgctgccccaggtaagagaccggcaggctcctcactccctgcgaaggagcctakcgcctccagaaagacatgctgcattgatggcgggctagcagggatggaaaccagggctccccggtggttctcgggtctcctccacagcagacagcagttctgtcctttcctggtgcaacagggccaggccctcgcctttctgttcatccatacagctgtagctgaggtgaggcttttatgaaaattttcatgaagggatggatcctttatgaaaattcaaggcaaaaacaaccaaactgatcttgaactatggcaaaatttcccttttccccatktctgttctttgaagggctcctataaataactatgtgaagctgttccaaaaggaccaccaatattattttccattgtaaaagagttccaggtctctactattttgtgaagaataggcatrgcctttcaattaacactatcaccaaattgctttcgatgaatgtgggagattgtatacttgatacatatctgtgtcactatgggtctgatttcatttcttaaatttttgtgaagaatgtgaatggagctgcatccctaattcggtagaatcatactaggtgtaaagtttgctcttctgaggttctcatgaagaactctgatccctcagtggacctctcttgagctagcacatcagatcctaataggccaaggtcctgttcattgcaattcaccataaagcagagagctcagagcatgagtgcttggttggtggaccacaccatagtcgccatgcccagaatactcctttagtcctcttggccaatatgggaaaggcagaggtcacctcaatgctatgagggtatgaggataaggatcttctgccacaggctaaggcattccctgaccatggaacagagttagcagctgaaacatccactcacacagcagcctgcttgccacaagtgctggtgcttttccctcaccccactccaagtaggcaagggcctcaaactagcttcttcctccccacttcgctagtgcttagaatgttgacagcctcaccactcacttaagataatatttatatagattgtgttcatagactcatgtgtccacaggagccaggtagagaatagcagtgaacaatgtcatgtaaggccttagggagtggtggggactttggtaagccagaaagcacgtgacccatctaactgggtgagcagctcagctgcagtttatcatcaccaagcagaagatcaggtcccagtgttggtagaactaccaactctcaagaaaaatcagcaatccggatgtttgtgttgaattccctggtttccaatgcacaaatgaaatgtagtccgtgaaccaccagtttccctgatttggattcaggctcagtgaattcaattgcatctacaaatagaaatgaacaagaaacaaaggagtctcaaagtataggagagaccctgggctaacccacaaacccttaattctaacccatacgtccaagggaccaaatcactaaaaaaatcacactctctaacgccctcacagttattttatccaagcctaccagcctgtaagtcctgtgagggcaggaatctgtctgcttggctcatccattttccattgcacctagcacaggctagtaaacatgttaaacgaacacatacctccattcctctcctcctaagtcctctgtctaggtaagctttaatggctgactgaggataactttttgaaaagtttccttagactgactaggactcaaccaaagacaggggagccatgaaagctcagggacaccgtagactgagtggtcatagtgattttttccggagggaggsacagggctggagtgcagtggcataatcacagctcaccacagccttgacctcccaggctcaagtgatcctctgtcctcagcctcccgagtagccagcactataggtgtgtgccaccayaccaggctaatttttttaacttttttgtacacaataggtctcactgtgttacccaggctggtcttgaattcctgagctcaagcaatcctcctgccttggcttcccaaagtcctagggttatagatatgagccacagtgcctggcattcactgcaattttaatgtagcttctggctttatggcatggtcccagtgacactgtccaccctgcaaggggccttccaaaaggttctgtttgtttagcccaggaaagtgttcaggaaaatgtgtgggtccatctctaagaatggtatccatgattttcagatgaaactgtctgatacccttggcgatttgattgctgaccatcagtacacactgacaggtgtttactcttctaattctactgtggtcagactgtcactttcttttgtttgttttgttttttgtttttgagacagagtttcactctcattgcccaggctggagggcagtggtgcaatcttggctcactgcaacctctgcctgccgggttcaagtgattctcctgcctcagcctcccgagtagctggtattacaggcacacaccaccatgcccagctaatttttgtatttttactagagacgaggtttcaccatgttggccaggctggtctcaaactcctgacctcaggtgatccgcccacctcagcctcccaaagtgctgggattacaggcgtgagccaccacaactggcccagactgtcactttcaaaagctattccacgtagcagcagatccagcttaacatttgagaccactaaaatagcactaaattaacactaaaatagcaacttaattaggtatcattctgaatgcctcagtgcacatgcaatactgggaaatcacagatagcaaaaycttaattggacaaaaccaatttcttagttttacaaaaatgggaggtaaatggaatcttttggatataagttctgtcttaaagtaggaagccagattttcctcaggctgtattcataaawcaccccaaggcatctgctgccttttttcctctgatcatgttttcatgattcagagaaatatagttaattttaattaaactagccctaggttcatttggagtctacgtgattgagatatgtgtatattcacagatcgataggactttggtaggaatcttagaaataagcttgtccattttgcagatgaataactactatggaattttgtttgtttgtttgatggcagtgactgttttacaggaatgctgtggccacttcagagttttacacatgcaatagactaatcttcgcttattagtatctccaggatttaaggtagtgagaagaatatactggctcctccaaagaacgtcaccagaaaggttattcaatgtagttgacatttgatgaaggttcttttctgttcagcagtgaaggattggttttctctggaagaaacaaccaggccagtattcttgaccaaacacagcccatactggtggcagctaatagcagccctgtgtacagaggctttcaactgccatagccaggctgcaaggggagcaggcaagaatatattaatcttccaagctggatttctaaaacccctggaaagaaacatttacatttcaaatcaaaacatttcattactgaggagcgctgtctacccaaatgagcacttccactccctggtagacaggccagctgaaatgttgttatttcatgaacgtgctaaaagtagatgtctgaatttatttcgttcccatgttaatgagttgtccttcactcttacatgcctatamataatagcacatcattgcttaacatatcttaattctgagagagtttagcttttttatggcagagctgatatgtatagggacatatcacaaactttatgtccttgtcctgtttaaccaatcactgggggccagaaacgcgaaacagaaactcagctcaggcttggcttcaaatacttctaagagtcctgcaccgctccaccaaagataaacaggatcatgtcaagggcctttgagctcatcagataagactctctcccattatgaacaacgtaacttgccatcatctgcagttacagcaaacactgaacttcagttcttgaccctgcacaaacacatacataatgagaccctctgccttgctatggatttccaaaattccttagggtctcttaaaaatctgctgggatgtgaaactttgtctttacctcacccatactcataggcattgtccctcacccctctctcatctgtccctctatcctttcttcctgctttaacttatcttttaaattgtgataaaatatgtataacataaaatttaccattttaaccatttttaagtgtacaatgccatgccattaaatacatgcacaatgttgtgcaaccatcaccactatccattttcagaactctttttttaatcatgccaaacaagtggtgtgtctgttaaacacgaattccccgttctccccttctcacagcccctgggaacctctgtcctactttctgtctctatgaatttgcctatcctaggtacctcatgtaagtgaaatcatacaatatttgtccttttgtgactggcttatttcacccagcacagtgcctttagtgttcatccacgttgtagcatgtgtcagaattttattccttttttatagctgaataatgttccattgtatggatatactacattttggttatgcatttacctattgatagacacttgggttgtttccaccttttgactattatgaataatgctgcgatgaatattggygtacaagtatctatttgagtccctgctttcaattctttggggtatatacctaggagtagaattgttgtatcatatagtaactctatgtttaactttctgaggaactgctaaactgttttctatagtggctgcaccattttacatttccattaacagtgcaccagggcttcagtttcttcacatcctcaacaacacttgttatttttcttttgtgtgtgtgtaatagccattctaatggtgtgaagtggtatcttattgttttgatttgcatttcccaaatgactaaggatggtgagcatcttttcatgtgcttattggctatgtatatatatatattctttggagaaataactaatcaagtcctatgcccatttttgaattgagctgtttgaggttttttgttggtgagttgcaagaataatttttttctttttttgagacggattcttgctctgtcatcaggctggagtgcagtggtgcaatcttggctcactgcaacctccgcctcctgggttcaagcagttctcctgccttagcctcctgagtaactgggactacaggcgtgcaccaccacacccggctaatttttgtatttttagtagagatggggtttcactgtgttggccaggatggtctcaatctcttgacctcatgatccacccgcctcggcctcccaaagtgctgggattacaggtgtgagccactgtgctcaaccagaataatttttatatcctgaatattaatcccttatcagatatatgatttgcaattttttttaattttgttgtcttttcactctcttgaccatgtcctttgatgcacaaaagttttaaatttttattcagcctagtttatctgtttttttttttcttttttccctgtgctttttcttttttttcttttagagacagagtcttgctctgttggccaggctggagtgcagtggtgcaatctcggctcactgcaayctccacctcccaggctcaagcaattctcctgcctcagcctcctgagtaggtgggattatagctgcccaccaccacacccagctgaatttttttttttttttttttttgtatttttagtagagacagggtttcaccatgttggccaggctggtctcgaactcctgacctcaagtgatccrcctgcctcrgcctcccaaagtgctgggaccaccgcactggactccctgtgcttctggtgttacatccaagaaatcattgccaaagccaatattcctaaagatttttccctaattattcttctaagagttttagggttctagctcttacatttaggtttttgatgcatyttgagyraatttttttaatacatccatccttcttttcattccttttaccagacaaaacwratacctactgtataccatgcattgtacggtatactaaaagaaggaaaataaagtcccttttctcctttgtgaagcttaccttctagtgaggggagacagtgaacatctataaataagatgtaaatgaaatcatttcagataatgattagtgtatgaaggaaaacctgcataaggagatagagagtgatctcacggggaaagtgtggagagatctccagccagggtgttgggaaggtgcatgatgataggccaatgctttctaggcakaggggaagggccctgaggcagggtcaacgttagcatattcaaggaacttaaaagggatggtgggactaagtgaggtgttagagctggggcaggaaacagagccagatcggggtagccttagaggccatggttttgttgtaattgccacaggcatttatctgcgagcattaaacacaggaatggtaggattcagtttatactggaaaaaaatcactttggctgctgtggggagaatgacctctggggggcaagaatggagcaaaagtggaaacagacctttyaggaagcttctcaagctggacaggcgagtgatagcagtgtcctggattccggttgtggtaccacaggaggtgagaagcgctctgactggggcttcattttggaagtaggactgacactcctgctgatgagttgaacttgcagagcaagggaaaggggaatcaagtgtggctcctgggttttgcctgagctactgggtgtcatttctgagatgagaaaatggtaggagcrgtggggtgggagagtcagagttctatcttgtatatgtgaactttgagactccagtatccccctccccaccatcttcactaattcagcagataactgttgagcatctacttactatgtaaagccctctggtaggcgcagggcagagagcagtgcacacagctgagcccctggcctcacaagyttcccttccactagctacactcccaaacacatgccagcaatagaaaacatgcccagagacccatgaaaatggarcctcaaaatggacattcctcagtttcatgcaggtgccaggggagtcatcgctgtacattttagcccctgtccccgagaagctactgaccagagtataaatagaagtaggatgtgctggatgtcttcrctgaattgactcaataatcattggagaaattaacaaatcactggatttgcttgggaacrtagagataaaaccttagttaatagaaaaaaacggagtcacttgttgcacatagcatgaacattaatgttctactgaagtccttttgaatatgccttaagtccaagttgcaaaatacatggtcttagacktcrgggacgacccagttctctctcagagctctgtgtgtacagagaacctggcagaggtggttgactgacctagttttgtcatgataagggtgttttccccaagattggtttcggcagaaggctgttgccagggcgtaaggcaaggggcagtggctttcgaaagctctgtggggaaagaggtatgatgtgataaacctctgagatggggatcaactcatatgaagtatacaagaaataycgtttttaaagatatggcgtttatcaagtcattgattcttatgaccaagttaatttccataactttgtagcttttacaaactgccttttcaaagccctgggtaacttctttcatttactgtttcaggaaagggtcaccaagcttgcacccygtccccagtcagaagaggatctggctgctctgtttgaagcttcaatgaaactgtattaattgtcattttaactgaaagaattaccgctggccattgtagtgctgagagcaagagctgatctagctagggctttgtcttttcatctttgygcataacttacctgttaccagtataggtgggatatacatttatcttgcaggaaattcccmaaagctcagagtccagttccttccataaaacaggctggacaaatgaccactatgttagacccccaggctcgacttcaggggtcagtgttcctgtcccaaaccccacacagaatactctgcctctgyttcatgtagcaaatgagcaaaaactcagtatctatcaaaagtgtaaattatatttcctatgcctagtaattcacttcatgtctaaaaatttatctgatagaaacactagcaccagtacatacagaagcatggcaaggatgtttctggcagcacttttctaataataaaagatttgaaacaaccttaagtattcattattggtatatagatcacttatagtatactagacagtggaatactatggtactgttaataaagatgaagtaaatctcttggaaatgagtccataatatactgggaagttggcagaaagcaagctaccaaataattatatattagtatgatctgatttttactttttcaattatacataaacatatatctacatatacatacaaaagaaagatacacatcaaaatttaaaagttattactggagaaatggaatttggggtgtggagaactaagagaaaatgttcactttatttatttatttattcatttattcatttatttttatttatttttttgaaatggagtcttgccctgtctcccaggctggagtacagtggtacgttctcggctcactgcaaccttcacctcctgggttcaagtgattctcctgcctcagcttcctgagtagctatttatttattttttgagacagggtctcactcctattgcccaggctgaagtgcagtggtacaatcatgactcgctgcagcctccacttcccgggctcaggtgatcctcccacctcaatctgctgagtagccgggactacaggcatgcaccaccatgcctgacttatttatttatttatttatttttgtattttttgtagacacggggtgtcgccatgttgcccaggctggtctcaaactcctgagctccagtgatcctctcgccttggcctcccaaagtcctgggattacaggcatgagccaccactcccagcctcattttttattttataaacttctgtattgtttggatttgttacaacaagcatatattacttttcttttctttttttttttttttaatgtttttttttattattatactctaagttttagggtacatgtgcacattgtgcaggttagttacatatgtatacatgtgccatgctggtgcgctgcacccactaacgtgtcatctagcattaggtatatctcccaatgctatccctcccccctcccccgaccccaccacagtccccagagtgtgatattccccttcctgtgtccatgtgatctcacatttataaaagagaagggaaaggaaagaaaaatgtcattttaatgttttaggtcagattcgttttattttataaaaatactagtaacgtatttaaaaggtaaaaacaaatccacaggggtaaaatattagagaccaatcctctggtgaataagttggtttttttgttttgttttgtttaaaaaaaaaaaaacaaaaacaaaaacaaaaagcaaaaactaacatcctacatggttattccctctggaaaaatgtttctggtgctctgaatacattaatttgaaaagaagcagttttgtaggttacagattacagcatgcaagtagaatccaactagtgtgatactcttcctcccttttattcccaggctacagaaacctggacagctcatttttcctttcaaaagttaacccactgaggttttcttgcccaagctttggcagtatagatctcagagtacttgcagatttactcacattttaaattgaattaaatttttaatcttataaatgagtaatnnnnnnnnnnnnnnnnnnnntttatttatttattcatttattcatttatttttatttatttttttgaaatggagtcttgccctgtctcccaggctggagtacagtggtacgttctcggctcactgcaacctccacctcctgggttcaagtgattctcctgcctcagcttcctgagtagctatttatttattttttgagacagggtctcactcctattgcccaggctgaagtgcagtggtacaatcatgactcgctgcagcctccacttcccgggctcaggtgatcctcccatctcaatctgctgagtagccgggactacaggcatgcaccaccatgcctgacttatttatttatttatttttgtattttttgtagacacggggtgtcgccatgttgcccaggctggtctcaaactcctgagctccagtgatcctctcgccttggcctcccaaagtcctgggattacaggcatgagccaccactcccagcctcattttttattttataaacttctgtattgtttggatttgytacaacaagcatatattacttttctaacatttataaaagagaagggaaaggaaagaaaaatgtcattttaatgttttaggtcagattcgttttattttataaaaatactagtaacgtatttaaaaggtaaaaacaaatccacaggggtaaaatattagagaccaatcctctggtgaataagttggtttttttgttttgttttgtttaaaaaaaaaaaaacaaaaacaaaaacaaaaagcaaaaactaacatcctacatggttattccctctggaaaaatgtttctggtgctctgaatacattaatttgaaaagaagcagttttgtaggttacagattacagcatgcaagtagaatccaactagtgtgatactcttcctcccttttattcccaggctacagaaacctggacagctcatttttcctttcaaaagttaacccactgaggttttcttgcccaagctttggcagtatagatctcagagtacttgcagatttactcacattttaaattgaattaaatttttaatcttataaatgagtaatataattacttcaggatttttttcaaacagatgagaaaagcattactgtgccattcaacttgcctaggccacttgatctccataaaggtctttattttgttgagattttaaaataatgtttattgggggttttctctaactacagacataaaatatattcggtaccaaaaactgttaatacaaagataaacacaaaagaaaatcattgttcatactgcaccatccaaaagatagctatgtaaaaattttgtatatgttattccagtaattttgtatgcataaatatatgttgtataactagctatatatgtgtacattttttacttagaaatggtattattaaggtgtaattttaatttctacagaacattcaaatttttttataccaagtgccccaaacataggcttaagatggtgccagtagaatttcagctacaccttgcagatcatagctagctaaaatttcttctagctcttcaggagaatcctggagatgagggcagaagctgggcatgaatgaggcagagaacagctaaactctgccaatctgagatccttcaggaaacttcagtaaaagttgttaatgagagtctcaaaatatatttagcatggcaaaaacttatatgtatacacatacacatatatttttccctcaccacccccacctcagaagcagtctaggtaagtttgagaacacttataatatattaggcaatgtgatatgacattattagaagagcattaggctagggttcaagggccctggattttgtttcagttttgtctgagtcttagttcattcaactaaggcctcttccagcttgaaaatgctatgaggccgggcacagtggaggctgaggcaggaggattgcttaagtccaggagttttgagaccagcctgggcaacatggcatggtgaaacaccatatctacaaaaaatacaaaaattagctgggcgtagtggtgcatacctgtagtcctagctactcaggaggctgaggcatgagaatcacttgaacctggagggtggaggttgcagtgagctgagaccacatcactgcactctatcctaggcaacagagcaaaactctgtctcaaaaaaaaaaaaaaagaaaagaaaagaaaagaaagaaagaaaatgctatgactaggttttatgtattacctggtccttaatgtgagattttcgaattgggaaaattcgatgtaaaataatttgagatacaaatatgcattctccccccatctctctcaaatgttcagtgcctttgctaacagtagccagacgtctgaatgtgactcaccaagaggagtgtttggtattcatattgatgatgactctgtagaggaagaatttaaaggtcaagcatgaagaaacagatytaggaagacttggtgtttttatctggatacccatcattctggcccttacaattagagattatggaaaaggtgagttttgtgacttactagctattaaaagaggataagctagattaggcccatttctgtaaatcaaacatttcatgtttcagagacaataattaagtgtattttttctgattctgtatcctatttttctatagatgtcctttaagaaaaattcttaagagtcgcagctccatttatgtggattaaaatacctaccaaggcaaggacatttaatagagtggtattcaagagtttggaaaatactatgttcataaaactatcatcatacggtggcattttcacttaaaatacatgcatatccctaatttattttttgatacagaatactgatttgttccaaataggtcatgtttctatttattgttgagtgccacaataaatagctggctcgttttgcactcctgtccctctctatggcattgttcgagtagctgtggacacagctgtggggtgttttcaagtggtcagtgaagtaagtctgctcttgtaaaatacagacaagtacagtatcaaaatagcgcgaacgcgcaaaaattgctttcctggccttttaaccctgagaaagattaatggttgtttggattagaaactgtaccctaatgagggggctgttgcctctggggagtaggtatgagaaaggggactgttcacctccaggtcatcgttgcacaggctgcgagtctctgacgacccgcaacaccactccagacagctgcccgggctctgccagtaagtgcctggtcctccgggagctgttgaggggaccaggccatcaccatcacaatggcctgggggaggcagtctccaggaccaagcgcactttgaatggacagaaattggttcttaaagccctaggttgaattactggcagctgggggtgggagggtctagtttctcgtgctattattctactgtttttccaaccactccaatcactctcagaataaatgcaatcgcctaacaaattgcaataactgttttgagatttcgtcccctctgaaatgcctcatgaagctatgcgcacaacagctaacttcaaagtaaccccacttcattctttctggctttaagtttttgtctttttcagttgggtgctttaaattgattttccaatttataaaattggaaactgattaaaataatcatgagagaaaaggaagaaaaaaacaactaatcatcctattacccaaacacagctgttaacatttgacatatttcctttccatcttttccatttgggtggtgtaatctcttaacacatgacattttaaggattttctatgttgttgcataatcttcataatcatatgcaaatgtatgcaatagtttattaaataagaatttaataatttattcttattataggtcatcaaattgcttccaaatttttattcctaccaataacttagcaatgaatagatgaataatgtttatatggcatctttcacattctaaattaatttggtaggttaggttcccctaaagtcaattttaacattacaatatagattttttttcctttttctttttttaagagataaggtctcattctgtcacccacaatgaagtgcagtacaagatcatagctcactgtaacctcaaactcatgggctcaagagattctcctgtgcctcagcctccccagcagctgggagtatatgcaagcaccatcacacctgactaatttttaaaatttttttgtagagatggggtctcgctatgttgcccaagctgatctcaaactcctggcctcaaatgatcctcccaccttggcctcccaaagtgctggaattacaggcatgagtcaccacacctggcctgatgtagacatttttatgactcttggttcacagtgtcaagttacatataactcagaattg

SEQ ID NO: 94345 - DNA, 44980 bp, Homo sapiens
tgaaaggggtgcaggataattaataataataagcagttttctgtctctaggggtgaagacatcaactttggaacagacctctccttgttttagcagaattatcacaataggtatagtatatgtaacctcattctttcattcaacaaatcttcactgtattcagtacagtaacatgctgtataggcttaggctgtatcatatagcctaggtgtgtgcaggctgtgccatctaggtttgtgtaagcacactctatgatgttcacacaacgatgaaatcgcccaaggatgcatttctcaaaacatatccctgttgttaagcgatgcgtgacggtacttgttgaatgaatgaatctgaacacatctgttgatgttctggtttgggactataatttgttgtctaagtttgagtagaatttgtgactccaaggaggtgggcttaaaaaaattgtttttggagatagttaattgttgtgctgatgagaagcagctttttctttcattttgatatttcatatgaggcgtattcttacgtcattaaaaagtcttcacacacaccctgcttggatatgcctcagatgcacacaccacaacatgctgagccagtcttccctcccctccagctccctcccctcaagccagctgctccccttgcccctgcccagttcgttttgatggttacagaaatgcctctcacccccagcagctttgaattcttgttatttttaattaatctttgctgcctttctatacaagacataagccaaacaatacaattaaatgacagtccctgcttatctctgaggcagtgtgcgtggttctttggagctggcactcagtttgaagcatgagaaaaagaagaggaaaaagcaagacttttcacatcctgaactggcttctgctcccgtcatccctgaattttctctctctgtgctttgccttagtatttcctctggcctcataaagaaaaggaaagaacaaaacaacccacagattattaactctacaaaagtcgttctcaaacagcctggatggttgtctgaaataggcatgtgttgactttgcacaggtggtgaaacgagtggtctgtggctagttttcaggcttccatgtggaacccttctgtgaggcagccctcatgaagagtgctgatcccaaaaatgcacacgcgtatgagcagagccagcggggctgggagtggaaaataccagtgtgtaaacacgttagagatggtgccaggagttgtgcccctttctctaaaaaaaaaaaaaaaaaaaagttaaataaattctgatgctttttccactttgaaatcttttaaggatgtaagaggtagaagcagtgtgcatcccctgtgtaattctgcccactagtccacagagagcgtgcctcttaaataacctctttagggatttcacttgtgcggagcttaaagatcttttaaacatctatactaatctttaaaaataaagcaaaatgaggccaggtgcaatggctcatgcctgtaatcccaggactttgttggaccaaggtgggaggatcacttgagggcaggaattcgagaccatcctgggcaacatagcgagacccctatctctacaaaaaaaaaatgaagcacaatgggtataccttgaagacattatgctaagtgaaataaaccagtcacacaaaagggcaaattcttatgattccacttacaggtggtacttagagtggtcaaattcatacagacaggaagtagaagggtagttgctggagctggggagtggcgggagttatagttcaatgtgtacagagtttcagtgtgggaagatgaaaaggttctggtggtggatggtggtgacgattgcacaaaaatatgactgtacttactgccacttaactgtacacttgaaaatggtaaattttatgttatgcatattttgtcaataaaaaaatgaagcaaagtaggcaaggaaataaactgaggtaaagagagtaggatggatatcttttcctatctgttggggtcagaataaagaaagtaataggactttgacttttggtttctttttgctacataaactatgattactgcctctctcccactttttaaaattgttgtttgtttttgagacagggtctcactctgtcacccaggctggagtccagtggcgcaatcttggcttattgcaacctccgcctcccgggatcaatcattctgtatgactccgcatacaagaggtacttagagtggtcggattcatagagacaggaagtagaatggtggttgctggagctgggggcagcaattctcctccctcagcctcctgagtagctgggactacgggtgcgggacaccatgcaaggctaatttttaattttttttttttttttttttagtagagacggggtttcaccatgttggccagactggtctcaaacttcggacctcaagtgatccgcctgcctaggcttcccaaagtgctgggattataggcgtcagccactgggcccagcttcccttcctcacgttctctgggaataatgataagggaaaaggatctttagctccaactacaaaaagggcagcagaaataatcttgtctcattccaaatagattttctcccctgctcatgttgcctacttctcttctcactgctctctaaacaggatggctgggtctgattggcaatcgcagcagagcccagcatctttcacatatagaagtactcaatgaataatacttgtgaaaattgaatttctgcctttttacgaaatatgtatttcataaagaagcttctttgtacttgctaaatgagaatctactaagagggaaggatccctcccacatgcaggggttcctctggactgtctttttttttttttttttttttgagatggagtctcactctgtctcccaggctagagtgcagtggcgcgatcttggctcactgcaagctccgcctcccgggttcatgccattctcctgcctcagcctcccaagtagctgggactacaggcgcccgccaccatgcccagctaattttttgtatttttagtagagacagggtttcaccgtgttagccaggatggtctcgatctcctgacctcatgatctgcctgcttccgcctcccaaagtgctaggattacaggcgtgagccaccgtgcccggcctggactgtctttatagatcagtgcaaaataggcaagaaggacaaaataatattttgagattaaattatgtttcctcctttgctgctgctttattcaagcacttagctgagggtgttccttgttgaactggaggaaatttgggggcagaacactataaacagtccttcagagagcttgttacctgtaggctcaataaggcctcagataagctggagtttgtccctcaaaatattgatctgtacagtgttttgctgaaatttacatttgtagatgtttaaaaatgagatgtcacataaaaatctgggttcctgggttttctttcaaaacgtgaagacagctcaagcaacttcatttgcctgcttggcaacaaccagctggatctgaacttcagctgttgcatttaggatggcataataatcaggataatgtgagctgctgtaacaaatcgcctctcatatttcagtgacatagcacaaaagaagctgatttctcacttacatatgacaagtctggtgcaggtgattcagggacctggggctccctctttgctgtgtctccactgtccttaggggccagggagttttttgttttcagcctgtggaatgggaaaaaggaagtggagaagcacacccatttctcaaccaccctggcctgaaagtgacacacatccacttggcccacattccactggggggacccagtcatgtggctcacctagatgcaaagggagctgggaaacatgaagccggtttgagcagccacttcctgccatcaaccctatcccatggatgggggaatcataaatgtgcagtggccgcgtgcacctgtgccacaaatggacaggtgaactcaatttgccacagttcccactacttgtttcatatccctgagtggcccctggaggcatttgagtttgtggctctggtttaaggtgtttgtgggcacagtgtgaggaagaaacatggaaaagacagattttctctagactgaaaaggagattgcccaggggcgggaggaagacaaacagaggtcagtgggtcctgaggctgacggtatgtgtgacttgtgtccctgaaataccatcttggaaactgcaggacccccgggaggaatggctgcaggggatgtcttagcagatgagacaatagccaccgccaccccaccccaaattcctgtgcccctagtgggatacagaagtagtaggttgctcatcaacccaagcagccacatcagcttgggcagtggaaacaactcagccatatcttttgggaacagaggaccaaatggatgtgctgtcccttctcccaacccactacatgggactgtgtatagccctggtgttaggaactaactccaggaaggatgaaggctgactcccttagtctccagtagataagctgctaggggcagctactaatatataataactgagttatttacgtaaaataatggatatgtgatgcttcttgcatgcctgagtttctgggctgagatttattctgtcttgaatgtcgcggttttcttaatgaagttgctgaggaacgcaggggccttgttcattttgcctttttctggaaactttgtcctccaattcccagatccagagcagtgcctctgctctcagccccataccgcccacattctcattaggaaaagcaaacaaaagccaaagtcctgtccagttacaagccttctctaaacggggcagttggactgtatatattcctggcgcatcaattttactcagacagggaaaatatttttacattaaaagaaactaggttaaattatggtagagaatgcaaaattcacagtttaaaaatgatgaaattccagacttcaaaggaacttctttcttgcagggtagggggagggtattctgtttcagaaccccatgcgggtctccactggagttcttttgagaaggacacttctgtggaaaagtttgagcagctctggccctgcgcctggcctggctaggggccaccttcttctggtttgggctgcagcgccctatgggtatcgcgttcttgttaatatctcctcacgtttctaaactcacagcttgtcagcgcgggcgcaacctgagagctgtcgcaggtttccagctcactcgtttcccaaaggaggaaatggagaatcagcgactttaaaggacttgcctggcgggcatccacgcttcccaggctatcgctcctccctgcgtccttggccacctccgttctttaatcctgcaggaactcaggacccacgtgcaaatacaaagaaccgtatccacccacccccggcccttcttcatcctgcgcttccaaccttgggggggtcctctctctccactggggtatctgacgcccgtggggggtgcttagaaaagtttggtagattagtgactggtggttctggaacaaatacatcacagcccaaactgggggctggtggtggagaggtgggtggatgggggctacaaatctgctcggcaactgccctttcagccaagagagaggagctgaggtcctctggggttggaggactggaaccggccagattgcgggctcaaggggcgaaggcaggttggcaggggcagcctcttcccgccgcccacaatcctcgggcgggcgcgcagccgagccggctcggctggctggcgcaatctcgcgcgctccttgcattgatcaaaaatgggggttgaaacagtaaacgcgaggaggagcaactgcttcgactcggctcagaagcgcgaccaatggggatgtgagctccttcgcgcgaaccaattagcgcagggcctgcgacagcacgggccaatggggcgccgactcggcgcaggaacaaggcgggggttcggggccggctgcagactctcaccgcagcggccaggaacgccagccgttcacgcgttcggtcctccttggctgactcaccgccctsgccgccgcaccatggacgcccccaggcaggtggtcaactttgggcctggtcccgccaagctgccgcactcagtaagtccccgcgagcgggcgccgggagtgaggttcaggcgggagcacgcacgcgggtgggtttgcatccctgcgtgtggcagtcggattcccgctccctgccttgagtcccctaggcgctttgcatcagcgtgcacagcgggatcagcagctccggcaagcgggcttcgggaagaatgcagttggtgaggaagctcggcgaggcgtgccsgtgcagctgcccctggccctgactgctggtgcgaggcagtgcmcgactcagctggccggggcctgctgtcccgccggtgccacgcacctgcagacgcccgggctgtgccatctcctgggccggtccgggggctggggcggggcgaaaaagaaaaagctctgatctctgccttcgcctcgcgcagctgtgcggcgagcccgggcagtgtggagcggatgcatgaatggacatagtgtgaatgagtgatgaacgggaatgaaccgatgacaggttttgcatatgcagtggatcacgttagctgaaagggattgcaaacttaaaggtccgcgtgtgcgtgcccccctacgccttacaccagtgtttgctttagccagcacttaggaacactgcttttcagaaatgtaaatttgaaaaccttcagtccagctttcccctccttgtcccccatagaacctaccctttcctaaagcctttctccccacccccctcctttttttaacctgcttgtcccctaaaggcgttcgagtattctaactctggtagactttgggctgcttaacccaattccctgttcatttcgttctggagtaaaccgagtgattgaattctctcccgggccacaatcagatcttgctggtggaactcactctctgccttcccaggccccagcccsgctcctcccctcccccgccaaacccaccgtccccagccccacccgcagtgaagaaggcaaagtctccgatgtgccttgagcccattgtcaggcggctgccgccgccgttagatttttatttttctaaccaggatagagctgataatatgttggagcagcatgaggcatagccaagtattttacaattatcaattgttgagcagagtagaaatctccctgggacagagcctcctctgtgttgtggtaagaacagagaatccaattttaaaggggaaaggacttcttacttttctaggggcagcgctcacagtagctgagaggacagggcttattttttctcagtggttacagttcattttaggcgagattccctgctccagctgtggagatgtttcctgtagcctcctcctgcaccccccatgttttggagtgttcccaacgtttgttccctatgtatttcgttattaatttattactataattgtaatggcaattgtcatcagtaatacaattatttgttattaatttttctgggaggatttttgcccttggactgcatgtaacctggggggcaggagggtgagggggcaggcagatgttgctttttatgtatttccttgatttagttgaattgtaaatattagagaagctttcaaacttcttttgactgtaacctacagtgaaaaacatgtttacaaaatgacaaagtatacacattcaattgtaacaaaaataaatgccttatgaaatgatgtgtagcctaattacctgtgacatacactattttgtattctatcctgctctagtctgttctgtttcattaaaaaaattagtcgtgagctgggtgtggtggcgcacgcctgtaatccaagcaactcaggaggctaaggtgggaggatctcttgagcccaggagtttgaggctgtagtgaactgtgattgtcccactgcattccaggctgggtgatagagcaagaccctgtctcttaacaaaaaaaaaaaaaaaaaaaaaaaaaaaattggttatgatccacaaaagcaatgcattcttcaactggaaaaaaaaaaacctactggattagggaggtgtgatttttcagtaggagtctttaaaactstttgtaattattttggttataaacttttatagaactattttcaatgaatgctgtctataagaaagatacagtctcaggagcaagttcaaagattattcacagatgaatgtttctctttactaaaagaaaagattcactctattttatttgatcagctggtgctaacaagcatccaacatttcagaaaacaataacacattcttagacccagtcgtcaaggcagtctttttttttaatctaattctttttttttttttttttttttgagagaagtcaagctctgtcacgaggctggagtgcagtggcttggtctcggctcactgaaacctccgcctcccgggttccagcgattcttctgcctccgcctcctgagtaactgggattacaggcacccaccaccaagcccagctaatttttgtatttttagtagagacggggtttcaccatgttggccaagatggtctcaatctcttgacctcatgatctgcccgccttggcctcccaaagtgctgggattacaggcgtgagccaccacgcccggccttgtctaattctttattgttaaaatactgttttttgagacaagttgcaatccagtttaggttatagctgtgttttaatgatgccctccttagcaagcatcttaaaaaaaaaggtgcctcctatctgtagaccttctctggctggttgcttttgcacttattttgtgttcatttttaaagcttttctttttctctttattttttattaagggaatcctcacatacacaaagataaaagtagtgtaatgaacctccaaggacccatctctgagactcaacaattatcaacattgtgccagtcttgttgcagcaccctgggacgaatcttattcacagcaggctcttccttcttcctgcccaccccacgcttcccagtctagcaccttagaccaaaagagatcggaaaattgagttacctgtataatctgggcataatttttttatcgttgtccctttaacccagaactttatgcattctttactttagctttaggagagtggtgaatgagatttgtgaaggggacattttctagggaatcggtaaattcgggcctttggaaaaagtgtatcaacatcagtcacattgcctaatttcatgcttaccttgtgtgtaagttgcataatcgctggctttgtggacatgggaaggaaggagactggctgtggrtggggatggawgcctggggacctcactgtagacccttccttgtcccctcgtcaggtttgtatgttcagagggaaagcagtgcagaacatatttaaataaccctattttcctttatttttttctaggtgttgttagagatacaaaaggaattattagactacaaaggagttggcattagtgttcttggtaagatttacttttgaattctgtgaatgtccatgtttcaaaggaagctttttttttttttttttttttttagaggcagggtcctgctctgtcacccaggctggagtacagtggcgtgatcatagttcactgcagcctccaactcctgggctcaagtgaccctcctgcctcagcatcctgagtagctaggactataggtacacatcaccacacctggctaattttttttaaatgtttaaaacattttttaaagatcccatgagatgggatctcactttgttgcccaggctgatctgaaactcgtggcctgaagccatcctcccacattggcctcccaaagttttgggattacaggcttgagccactgagccctggcccaaagggaactaatttaaatgcatcaaatatagaattacagggcctatagggtcttcctataggcctttatagatacatttttaaactttaatagcttgggttgcatgtctgatagaaaccattttgaaaatagcataaatgctggtgagaggttctgacatctcagcttaccctgtcataattggtttttgctaatcataggatttaggatcagaagatactgtatatttgcataacartgcctccaaacatttataatattgctttacattcaatttacagtttttattrtacttaaatacaacctcattaaagtttaaaagtacataagccttttatgaagacctcgcacattgataatcttattaagtttcccctatattttttgggaagaggacctctgcattctaaaacttattttcttttrtttttggcggttctgaagactgcatggtattaagagaccatagggttaactatattgcttatttctgttaaattttgctcctgttggtttgggacatatacttagatttctgtgaagtgagatcacagcatggaattttgtgctccagacctaaagggcaactgttgcacatggattcctgtttgtgagaaagagatggtaagaagaatcacagagagcatcacggagtgatraattaataaataacttgctcagtgaatgtaccacttgaaaaatccttctgccatgactataaagctaaaatgtttgcaatttgaaaatcagtttgtatggtcccctaaactaagtgagccttggcccacaatttgaatgcagaataactgaaatttccctgtattgttgtttacttgcaaatttcgtaggtatttctgttcatttggttttgagctggaatatttgttattgttgttyatctttcctttcacagaaatgagtcacaggtcatcagattttgccaagattattaacaatacagagaatcttgtgcgggaattgctgtaagttttaaaaagaccaaatcatgttacttttgttagatacttcctaaatctggatgtcttccagtattttctacactctattgtttgttcagaatatttcataatttaaaataatccttgtaagattytctccaattcactattagtacctaaygctttttatttgttccccatcccgtgtttatatgtttttgtttttattttatgtgatatttccaaagatttgaaatcattgtatctaggaatgatttttcagcactgtggcagttaaactggtgtgaaagagatgtaaatgacacagaaatggtcatctttgtcagcataattgactataaactagttcaggtgttctcgaagtttgagtctcatacgatctgtcagagtcacctggttagggggaatattaaaaaattcaagtggggccgggcaaggtggctcatgcctgtaatcccagcactttgggaggccgaggcgggtggatcgtgagatcaggagatcaagaccatgctggctaccacggtgaaaccccatctactaaaaatacaaaaaaagaaaaaattagctgggcatggtggcgcatacctgtattcccagctattcgggaggctgaggcaggagaatcgcttgaaccagggaggcggagtttgcagtgagccgagaccgtgccactgcattccagcttaggtgacaaagcgagactccgtctcaaaaaaaaaaaaaaaaaaaaaaaaaaaatcaagtggtgggcaccacttagtcctgctgaatcagaatctctggagagactttatttttaacaggctctttgggtaattgtaagagttctgaactgtaggaactactgcttagacgaaatctcctgggttatctgtactgcctttcctatccagagaatcccttattcttaaatagattgctatttaaaggagagatttttatatattatataaacatgttcacataaacctacgaatatagcaagtttgaaagcataccattttttttcctgctcacagaaataatgcacatttatggtaggaaaaacactgtagctcacaactaaactgaaattaactttaaccccactaatcagggataatcactaatatgttaggacccattcttgcattattacattaacaaaattggaattatactgattatttcaagttttctttttcaaattgcttgataaaatgattcagatggggcaggcttggtgatatttctgtgaggagctgtagacgctaattgcaatgtgaatgttcagagctggtagccatctgcttggcttctctcgtccattggcctgctgagtatcatgtcacattcataggacaatcctgtccttcatggagtgggtatttggaacatcagcctgggagagatgrcatttgaccacatggctatgaacttcctctgactggggtcccagttcaatttaagggcctatcttttcttctcctaacctggttccyaccttgtatacctgtacctagacctcggcctggtttctttccakctaattcttggccttgttaactgccctgcatctgaataatgtgaacctggaactctgtcttgggttatcagtcttcccagctgctaagaacctcatggccagagtctcctaagacctgctggttgcttgctatcctactaagcactgaatataggccatacatctttcaggacaagatatttacactcctaccaccccattccccaagaccctgccacattgccctgccctttattaatttacctctgtatctttgctggagctctgttccctggccatctggcttccgtacacctattcccaggctctgaccttactcagtggcttgggtccagtttccatggccttgtccttttggagctgggcttatttctactgcctgtagccattctcatcattatcttactttttcatcctggagtcaaagaattttgctttttattttgatgtataatagatacatgatttcatgggtaggcctaaaacattatcgaaaccccctgcccaacatccacctggttcatagcatgktgcataacacaggattattggttgcaagttataggacccccaactcactggcttaagtaaaaaagaaatgtattatctcacctaacagataaatgcaggagaatttaggtgcttctaaatgactgcaggaaggtgattttcccccatcttctggctctgctttcttatgtgttctcttcattgggtggccaccattggttgcaggattagctcctacaagtttcttctttccctcaatagaaacagctttccttacctagaagtttgagtaaaggtctcagtaccaaattccattggccagcctggggcaggtactcatccccttgagccagggttgaccacagttgaaccatgtcgactgagagtggcagaggggtaatttcctaaaggaacatcaggctgttgtcactaagaagaggaggaagagcttcaggtcaaacagtaaccctaggctttcaacacagtctccagtaaatagttgtccaaggattgcataaataaatgagtgaattagggaagacaaagtagtattrtaacattaccatatttcttgtagtaaatccacccaagttaaagcacttggtagagcatcacttgttctcaatctytgaccacatgagtttatgtattgactgttacctatgcttctgcccagagctgttccagacaactataaggtgatttttctgcaaggaggtgggtgcggccagttcagtgctgtccccttaaacctcattggcttgaaagcaggaaggtgtgckgactatgtggtgacaggagcttggtcagctaaggccgcagaagaagccaagaagtttgggactataaatatcgttcaccctaaacttgggagttatacaagtaagttctgggagctgagctgggtggtgacgtgctcaatggtgggttaccccgacccagggcaatctgtagttttcaattattttctccccttgacagtgttagttcattaccatttagattgggtggctgtactagctaagactagagcctatgcatactcttactttattttattttctattttttttctagacagagttttgctttgtcacccaggctggagtgcagtggtgcaatctcagctcactgcaacctccgcctcccaggttcaggcgattctcctgcctcagcctcccaagtagctgggattacaggtgctggccaccacgcctggctaatttttgtatttttagtagagacagagtttaaccatgttggccaggctgcttttgaactcctgacctcaggtgatccgcctgcctcggcctcccagagtgctgggattacaggcgtgagccactgtgcctggcctatgcatactcttcttgcagaagctagtcagtagttagtagtagtttttcagctaattagctgaaaaagtccaggggctggtttggctttagatatggcttgatcaggggccccaacaatgtctccaggacctggtggctccacaggcagaaaaagctgtccctttcttgaaaggtggctgcagctgctcctgaccttatattctcccaagtttcaatgcctttatggagcattcccagtaacggtctcatgtcctgtgccccattctgaatcagtccctgtggccatgcctgagttgcattctacctctgggctgtaggtttcattggctcccctggaactacgtgggctgagagtaggtgagggctggggttccaagaagaaactactagtccatcaatggatgtaggatagatggatactgggygacaagtaaaaactcagatatctcccatgccttttgaaaaaatttactttattttattttgttgagacagagtctttctgtgttgcccgggttggagtacagtggctcttcacaggcaggatcatagcacactgtagcctccagctcctgggctcaagtgatcctcccaccttagcctcytaaatatctgggactatgggcacataccaccatgcccaccttcccatgccatttttgaagatgatttgttcccagtaaaagtcgaaaggttggatcgctcatcctctcaggatgttgataacgatggtaacaaaggatgaggctgggaggktgctttcactcgtgcaatgctttggagtcagttagtctttccctgctaggggaggcctgtcagtctcctggttgactcccatctatgtaaggaaagaggagagtgaaaagtgcaaagtctcaaacttgtcttctgtgatagaaattccagatccaagcacctggaacctcaacccagatgcctcctacgtgtattattgcgcaaatgagacggtgcatggtgtggagtttgactttatacccgatgtcaagggagcagtactggtttgtgacatgtcctcaaacttcctgtccaagccagtggatgtttccaaggtagagtataaaaggcagggtgaggggaacccactgactcggtktctgcagggacattttaatatatacaagagcgggaagaaccatgggtgtttgaggcctgcagaacccctgagccagtgcagctgccagtgagcaggctgccaggtgcgaattcccagctgttgcagtgcctgagtcctgctgttcccagcctcgtggtgatgtttgcctcacagggtcccactcgagtccttggggaactacctgcttttgagagtggttcttagaaacgtgtttggtcaacagacggggagagacttgtcttcaagagcagatgcagattatccygagcccaggggacctatgtgagggagcttccccttgcctggtacccacctccaaaagcatcaacaggataccgttttatgagtggcttgccaaggcagggcagtgggactggcgctgtaggtacatgccccagggtgcgatgcgggtagagaatctaagaacaacagttgaactgactgagtggtattctgcctttttaattgggataaaatataacaaattttaccatttaatataaaatataccattttaaccatttttaaatatactggtcagtggcattgagagcattcacattgttgtgcaggcatcaccaccatccatctccagaacttttacatcttctcagatgaaatctgtacattaaacactaactccctctctccccaccgtccagcccctggcagcctccattctagtttctgtctctgtgaatttgactactctaggtatctcctagaagtgaatcatgtactatttgtccttttgtgtctggcttattgcacttagcagaatgtcttcaaggttctattgcacttagcagaatgtcttcaaggttcgtccatgttgtactgtgtgtcagarcttcctttctttttaaaggctgaataataattgtttagatatactgtatttggtttatggtctgctttttattatcrccaggcactggcaattttaaataactataaattactttcccccacccccaacttcctgccaacgctcaattttcctaagggtttcatggagagaggcatgggagagggttctgtatcttgcacaacagaattacctaaagtacctttaagcctctgttttctataatttcttctccctcaggcagcttgtcccatcccttctctttgtcataacagtccctttctcagcaccttctgactgttcttttatacaaatgtaaatagattaaaaaatctgttttggccaggcgcagtggctcaggcctgtaatcccagcactttgggaggccgaggagggtggatcatgagatcaggagttcaagaccagcctggccaacatggtgaaaccccgtctttactaaaaatacaaaaattcrctgggcatggtggcacacgctgtaatcccagctactcggcaggctgaggcaggaaaattgcttgaacccgggaggcagaggttgcagtgagccgagattgcgccactgcactccagcctgggtgccagagcaagactccgtctcaaaagaaaaaaaaaatgtttcttctcttggtaaccagggagagttagaggccccacgttaaagactcctttctactttgggggtagaaaggargtgtgcagagcgaatgtgaatatgtgccaggactttgcagtgatgggcttgggttagccccatccaggtgaggaccaggctgacggatcatcctcaggctttggaactctgagtatgrgtttgctgtccacatggagattgctttagagcatgaactgctccctacacaggatagagtcatttccttaaaaaaattgtgcttygggaagagttgggaagtttgcatacatgtatgaaaaatggccaaatccttcttaagcagcatgtctttctctttttaagtttggtgtgatttttgctggtgcccagaagaatgttggctctgctggggtcaccgtggtgattgtccgtgatgacctgctggggtttgccctccgagagtgcccctcggtcctggaatacaaggtgcaggctggaaacagctccttgtacaacacgcctccatgtttcaggtaactctgggagtcagtcttgtggacccagggaggggtctcactatttttcatcaaagcggaggttacattttaaaataaaacatgtaagcctgggcgcggtggctcayrcctgtaatcttagcaattkgggaggctgaggtggatggaccacttgaggtcaggagctagagacyagcctgaccaacatggtgaaaccctgtctttrccaaaaatacaaaattatccaggcgtggtggcacatgcctataatcccagctactaaggaggctgaggcaggagaatctcttgaaccggggaggtggagattgcagtgagcygagatggcaccattgcactccagcctgggtgacagagggagactccatctcaaaataaataaataaataagcaaacaaacaaacaaataataagtaaaataaagtaaagcatgtttccaggagccggtgatcaaatgccccagatatcctatcagattctctgcccagctcacctctccctctgcaccatctctttaccatttgatcagcttttcctcttgttcttttctggggatgttgttttttgtttggtcttggtaatccaggatccggtggttcaccattaacccaaaagctctctatacatgaggtgctgtggcctgcatctcaaacagccagtgcagctttggagaagaactttcaaaagctgggcctcccctgccttcatttctttctctgtcgggcctgcgggaagctggctgcctgacagaacatactggcttaaatacctttctgggttttgttgttgttgttttttgagacggagtctcgctctgttgccagcctggagtgcagtggcatgatctcggctcactgcaacctccacctcccaggttcaagcgattctcctgcctcagcctcccgagtagctgggattacaggtgcgtgccactacgcccagctaatttttgtatttttagtagagatggagtttcaccatgttggtcaggctgctcttgaactcctgacctcaggttatccgccggctttggccttctaaagcgttgggattacaggcatgagccaccacaaccggccaacatctttctgtattttagcctaatctgaaggggtccttttagcctggctctcattcgctgactgggggctgcgttgcagcacttcaggaagagcagggttgccctgcctcaggatcctataactcccaaacttgggtattttgagaaaatcttcatggctcttaagatttacaattgcctaagagagtctagtatttactagctgtgtgaccttaggcaagtcacttaacatgtctgtgtggtaggttctagaagtaataatagtacccctttcactgggttgctgtgaagattaacatacatataaataaatctgtgtatatatataaaaattttaaattttgcactgagtacctggcacttggtgattgataaatattagctgctatgttgttattgttattgtgagttctcagagcctcagcaggagcagacacaagggaagagctggagtttgtagatttatctttctagggccactatgatgcagaatggtgatgctttatgtgtatgaccgtttaatcctcccaactaccctagtaggtagccagtgttatgatcatgattcccattttgcaagtgaggaagccgaggtcatattttaggaagtggcctggctggggtgtgaacccaggccatctgactctagatcctgggtatgtacattctgccattagtgctctctcttcaccagcaaaaggatgagtgtggatttgcgtgtgtttgcaggattctgccttaggagaatagttcactgttggagtccagctcttctctcaacaggattttcttgtcttggtggaagttctcttaaaggagcgtaggaaagagggggctcaggctggtgcagttagtggttccatctgggccaggattttgtcagagcttcccctcctccaggtgctgcttagggaaaatgtcttctacataatttactatggaaaggaaagaattttttttttttttgacagaatctygctctgttgcccaggctggagtgcagtggcgtgatctcagctcgctgcaacctccgcctcccgggttcaagcaattctgtctcagcctcccgmgtagctgggagtacagacgcctgccaccatgcctggctacttttcgtatttttagtagagacggggttccaccatgttggccaggctgctctcaaactcctgacctcaggtgatccacctgcctcggcctcccagagtgttgggattacaggcgtgagccaccgccggaatttttttcaatgttagaattctggtgaaaattctgctgggtttctgcttggtcacacgatgcagagcagcagctcctcacattgtgtctcccactttcctcaggggagtgttctgggatgcactctcctggtcacctctaaaccctactgtcttttaccttggttgaaatgtttctaaaatgcatggtagggatgggagtggggctgagtcttacctcccactcgcctgtcttacctctggggaagcaccagtggtcactggccaactgggacacaagaactgggcaggctgagcggtgagggtgcagctggggacctcaagtgctggcctccgggggaaggggccgagatgtcaggctgcacatggcaggtagaggtacaggaggctgtccttacctgtttggagatggggccagggcctgccttgcagctagaggaggctttcagaggagcccaagaccatcacccatttcagaagtgagaaggtgggagggggcagggaaagagtgctgttcctgaactgtcccacagcctgtaggccagcaagttgcgatcagggtacagcttggggcagggcagacagtcactctctggtaccttcttcaagggttaccttgaagagcatttttttaaaaaggaatgaacacggccgggtgcggtggctcacacctgtaatcccagcactttgggaggccgaggcgagtggatcacaaggtcaggaaatcgagaccagccagaccaacatggtgaaaccccgtctctactaaaaatacaagaattagccaggcatggtggcgggtgcctgtagtcccagctactcaggaggctgaggcaggagaatcccttgaacctgggaggcagaggttgcagtgagccgaaatcacgccagtgcactccagcctgggtgacagagtgagactgtctgaaaacaaaaacaaaaacaaaaacaaaaacaaaacaaaaaccatgcaaggttagaaaatcattgctcacccaatgagaacaagctgcaaatggagacatcaagatgtgtgcaaaatcccctccccagtccgtgatgtgaggctgatggggtacctggagcscttcagaactttgtatcacatagtagagttcttgaaaaggcctcacttttgaaaagaygcctttttttttttttycccacagagtctaatgaccataggccctgggaactttgatttaattgtgctggataaaactgccttcaaatcgttgctccgtagccctgagtgatgaactagagtggaataaagaacacactgctgttctctttaacccttcagtagaacacactaaccccaattagtgcatagagaaaaagatccctaaacttcccttctgactgcacaaaatattttttacttaccatgactaactgaatacacaagcatacgtttgttttagctgcagtatgaggtgaagtaactaataaaaatacaaaacaaatagaccattaatcttaggccacctgttaaaagaatgagaacaggccaggcgcagtggctcatgtctgtaatcccagcactttgggaggtcgaggcaggtggatcacctgaggtcgggagttygagaccaccctgaccaacatggacaaaccccgtctctactaaaaatacaaaaattagccaggcatggtggcacatgcctgtaatccaagctactygggaggctgaagcaggagaatcacttgaatccagggggcagaagttgcagtgagccaagattgtgccattgcactccagcctgggcaataagagcaaaactccatctcaaaaataataataataataaataaataaaagaatgggagcatgcaaattaagtttgtgggcctgtttggaaggcttcactggtcccagactaccttctcccagtgggatggggatgcctggaatcctggaattcacagaggggtgtgtagtggagccagttttgggagctttcctctgggaaaagtgctcaactcagtggctacattcaccgattcctgagaaaactgtgccataacatcaacttcagaacctcatctgcagagctggagtcttagaacagccagggagagttttccaggggactttctggtgtccttttctaagccctggtgcacagggactattttgtattgctttaaaaaatttataacagtgatatactcttaggctgggtgtggtggctcacgcctgtaatcccagcacttcaggaggccaaggcgggcagatcacctgaggtcaggagttcgagaccagcctggccaacatggtgaaaccctgtctctactaaaaatacaaaaattacccgggcgtagtggcgtgcacctgtaatcccagctactctggaagctgaggcgggagatcacttgaacctgggaggcggaagttgcagtgagctgagatcgtgccactgcactccagccggggtgacagcaaaactctgcctcaaaaaacaaacaaagaaacaaagaaacaaacagtaacatactcttagcaaagacttgcaggtgggcagagtcaccagggtagccactgttcactgcttgctttgtatcctaacagactcttaactgggcatatgcaaatatacagagtcatatatttaatcatgcaaatggaacttgaactttaccatacaaattgttctgtgaattctatttttccactccacaatataccatgggcattctgctatgtcagctcaaatgcctatttttattttttacttttaaattttatttttgttagagacagggtcttgctctgttgtgcaggctggagtgcagcagtgtgatgatagctctcagaaaccgcaaactcgtaggctcaagtgatcctcccacctcagcctcctaagtagctaggactacaggcaagtgccaccatgcctggctacattaaaaaaaaaatttatggcgacagggtctcaatatgttgtccaggctggtctcaaactcctggcctcaagctgtcctcccacactggccgtccaaagtgttgggattacaggcatgagccaccacacctggcccttttttgttttaaaatatatatggtgtcctgtagaatggacatacctcgatttatttaatcatttaataggcagagttaggaaccctatcctgtgtgtttgcaggtggcattttagaaatgaaggcataagtcttaaaaatgtcacactggtagtgggaagaattgagaccactctataagctgtgtaagcgttttagagcccttgtgttttcaagattttagacggtatgggagttgaaacatgagttaataaagaactggaagccacgagggtcctgtgttaagtagagccacaggggctagacatcagtgctctgcagagrgctgggtgggaggggaggcaggacctcctatcctgtgttaagtagagtcacaggggctagacatcagtgctctgcagagggctgggtgggaggggaggcaggacctcytatcctgtgttaagtagagccacaggggctagacatcagtgctctgcagagkgctgggtgggaggggaggcaggacctcctatcttgtgttaagtagagtcacaggggctagacatcagtgctctgcagagggctgggtgggaggggaggcaggacctcctatcccagggatgtcttcagtcttcaggacagcttgcttgcttctgagttgtctgcctcttgtttaggcttcatagagccaagttatgggtgctggctccaggcagcccctaaaagtgggtgagctttctgctggccttgcctcctcagatcccattaagaaagccagagatcatgggcggcgagtgtgagcacagcagtcagctaggggttcaggcgtcggtactgaggtctggctaggacggtggacctgacatgggccttgctgcactttggatttagacaaaccaaatccacagtgcagcaagggcccatgtcagctttgaaaccctgggctaacacagagcttcaggcaaaagggaagcttggtcacctggaagtattgttggtgacctgggctctgcttggattcaatcacatggcagggtgtgtttctgtggttctgtgtggaggtggggggtgaacaggctgcaggtgtgggagaggagcagttggaagtgaagtgggaattgcagagcatctgatgaacagagggctgggcagcctcgtgtctggaatgcacacccacgtgcatgtgtgctgtgtgctggacttggccactgtcactggtgtgtggtgatagctctgcagtcccactcgcaggggagctagtggctggagccctgcagcccctggcaaagcagagggcctgcatacttgtgggaagagcttgcattcttggagtcagacaggctagagttggagtcctggctttaagctgcttgccagatgacttgaggcaaagttaacctctctgagcctcagtttcctcatctggaaaatgggatgacggtggctctaacccgaggattattgtgatcaataaagataggctgaggccacagtagacttcaggaagtactcattcccttctcttactttctctcttctgtctcttttgtccctctgacttcttggacgttagccagagagctaccgctgaggctgtggatattctcaggggctgtttcctcttcctccctgccttccctttctgccagcagccactcttgctctttcttcccagtgctgtctggggaggtaggctggggaagcttcaggagaggttgttggatgtttgtggctgctggctgctccctgcctaaggmccctctgggcagcccggtgttggcttttgccaacatgagctggcatgagccactgcacccaggccttgggtcccacttgagacagtgaatgagccagttggtatagggggcttccctgtgacaagctgctggctgttagagcattttccagaccccataatgtcccctcctgttaataaaggaggaagcagctgggtatccccaccctagatcttagctgagcattgactcccagtaaatttttgcacaattcccataggggatctttgattcacacctctggagagggcatagttggcagctgacctccagactcccagctcaagggagatggtgtcttccctgggcgacctctcctcctgtgccctgagcttttactgagtacacgtggagcctttagcaccttcttaaggagaggggttttcagactggggaaaaccatgcaccgctcctcagtgtttcatattttcagcttaagtttgaagggactactgactgccatttgtgtggcccacctgccacgtgccaggccctgtgctaagcgttggtctggcaggaagaagttgaaatacttggttcagaaagggatggtcctgagctgcgggaagggcccaggtgcagctggacttcctggaaccagggacacaaatcctcctccatctgctctccacttctgatcctggcttctctcagcgggaatgttggcttcattttcagatgggccttcttcagatgtttcctagaaacatgatcccctagggctctcatctcctgtctcacagttgcactaatattctgccgctttttctgctctccccactctttctccccacacccaattcagaaaatctcagggaaggccctgattggcccagttaggtcctatgccgaactctgagaccagggagccaaggggccttgctggacctgcatactggctggagggtggagttgggaagagcagggtggataaaatgccaggtgtccaccacaggtaggtggatctcccggttccagatgggaaaaccgaggtgactaattctgggtagtctgttagtgagtggctgccctacaatgggagtcaggactgggagggggagcccgtccttttaacccctcggccacagtgctctctgctggctggaaggcactgtgctaaggctgtgggtagaaaagatgaacagcgtgggcttctagccttccaagaccacagaggccaaacaacaggcacacagaaacttaaaagagcaagtggaaaaaaactatgcaggtaatatgggcaaggcgctctgggagttcaggaagtgaagagctcgctctgggtaggggtgggattggggtctgctgatgccttctggtggagataaggaagtgtgttctggctctcaagaagagtttacattagggcttaagctggacaaggagggactgatatgatgtttagtgaaaaatctgattaaacctttttctgaatggccctcagggatctagaattgggttgaccctagtccttgcttgatgacatgctcttgttcacatgggccctgcttttgtcttgtgtattttctttctttattttttttggagacaggrtctygctctgtcacccaggctagagtgcattggtgtgatcatagctcactgcagcctcgaacccctgggctcaagcattcctccctgctctgcctcccaagtagctgggactataggcacatgctatcacacccaactaatttttcaatttttatggagacgggtcttgctatgttgcctaggctgctttccaactcctggcttcaagcgatccttcggcctcggccttccaaagtgttgggattacgggcgtgagccactgcatttgactatcttgtctatttcaaataatgtgtttaagtctgttttaatgcaccttmaacagcagtttgcttgaatatagttctacttttgcaaagatgagctaaacggatttttwaaaaatcttcattttagcatctacgtcatgggcttggttctggagtggattaaaaacaatggaggtgccgcggccatggagaagcttagctccatcaaatctcaaacaatttatgagattattgataattctcaaggattctacgtgtaagtcaatggattttatctcctattttgcctcttgtgaatttaaaactgtgtatatactgtgtacckttgaaaagtggacatattcacctttctctgagacattaaaatactggtgagtgtgtgtggtcctgggccccatgagcaggggagtgggtggtgagttyttccctcctgtacctcaccctggggctctcaggctttgggacctgtgtcccagtgggtggtgatgtttctcacaccaaagacatcgccctggggaagaatctcagttcacyccctggggtaggtcccgtctaytccctcctttgtatatcttctgggaaaaaaacaaatgtactttctgaaatgtgtcaatttaaggactcctgttagcgatctttgggacaaatactcctgtcctcctcttctgcgttatttccctttttaagaaaattcactcctttccttattataagacagatgctgttatcccagagtctgtgaatggaattggctttggcatgggctgactccagtttaaatattcccatgaacaaatgattaatgagtatgtcttaaccactgcccctgcacctgggaattctgcagaaaatgtctgggtcttgtattagtttcctggggctggtgtaacaaagtactacagacttagtggctcaaaacatcagaaaactgattctcactcttctggggccagaagttcraaatcaaaatgtcagcagggttttggtccctccagagagccatgccttgcctcctttagattctagtggctcagggtggtccttgatttgtggctgcatcactccagcctccacatctgtcttcacatggcctyctttctgccgtgtcttcccttctgtctcttaaaaagagaggtctttggatttagggcctgtccagataatccaggatcatctcatctcgagatccttcacataatgacatctgcaaagtcctttttttccaaataggtcatattcacagattctgggggttaggacatgcgcataccttttcagggtcaccattcaatccacaacaataggcccttcaccaaaatgccagatgggaagcacctagtgcggtgccttggatgcagagaagtgtaacaggtggtatcttcatttgcttttccctttcccttaaggtggttacaggtatacaaagaccagacttcctgctgtgtacatgtatgtgcgcctacacatatacataaatgcttaaactcaccaaactgagaacccccttcttagtggccattgctctttggggttcagtctatagtaacaaaaatatctgcttgatggtaagttggaaatttgccctctctcagataattcagtggccacatgggaccgacaaaacgatgcctctgtcctaacttaggattgtactttttagccaagacttaactaacacatctccataaccacccatgggcgggcagtgctggtgtactttttggatggcatgctgctgtcacctttgttcttgcaatgcttgttgcctgtttctgtgagctcttgacatgcagtggccctcctccagctgcaagcccagggggagttaggcttggcgggatgccttggcctttgggctcctttcccaggcaccatctcagggaaggggtacacactctgcattactgcctgttctctggttctgtgcaacagagaagcaagtgcaggctgggggctcagtgctggggaagcttccacactagaccttgatgtgtgagtttggaggccaggataccctgcctgtgctcactgaagccatttaaagtgcacgatcagcagtaggtatccaaagatttcatagccaagggctaaagaatgtggcatgagcctggaaaagggggatactctttggttggagtgaagagagggcttttgcatgagcttattatgagccctggtcatgagtggaattaggcagagaagagggcagaagtacttttagaaaggttagaatcatccccgcaaaggcactgagggaagagtgtacagtgtgtttggggagcagaacatgggctgcttgaagggcatggtttatgctgggattgggaagaaggtccgtggaagtgtgtgagggcgtgtttagtccacctatttattcattcattcatctactcacccacccatccacccacctacccatctatccatccactcattcactcattcattcattcatccatctgtctacccattcatctatacattcatccactcatccactcatccatccaccattgacccacccatccatctattcatctaccacctgcctacctatccatccatctacccactcactcatccatctatccatccattacccacccatccttccacccacctattcacccatctacccattcacccatccacccatctatccacccgcccattcattcacccatccactcatccagacatccatctgtccacccattcatccatccatccattcatccatccactcacctacccatccactcatccatcaatcttccatccatccatctatccatccatccatccatccatctgcccacccatccatccattcacccacccatccacacacccacctatctatccatctacctacacacccacccatccatctatccatccatcacccacccatctattcattcacccttccacctatctacccatctatctatccatccatccatccatccactcattcatccacccgcccacccactcatctgtccattcacccttccacctatccgcccatctatctacccacttgtccatccatccatccatccactcatccattctcccacccacccatccacccacccacccatccatctatccatctgtccatccatccaaccgtccatccatccataaaatggctcctgaggacctgctctgtacactagccttgttctaggctcctggaagaccgagaagaataaatcatcttccctggctccctaaaaagtgctgagaacctgaatgtgagtaaaagcacttggtgggtatagtggacgggagaccaatttttctattagcttttagctctatacatttctcaggagatgtgtagacatgatgttagaggacagaaagaacggtgataccactgggaaaaaaattaagggcatcaggaacaaaataagaaagcatagaaggaattctgggactctcctgaatccccccccgccacgcctaggtcctttaactccaagcactaaacctgggcctctcccagaaggcagcctgccaaactaatgtggcaggcaggtcatctcctgggcaggtcatctcctggggaatctggtcatccttcacacccagagctcttcactcatttctgaactgccttgacccaggacttccagtccttttaagaataaacctctttctaggaactcccaccaccccctcagttgcctgcctggaaagcgtcatcccaggcacttggtgttctgtgggaccttgttactggagtagagaggaggctgtactctgtctctcctctgtttatagctggagactcccaggctgtgcctgaactcacttagattttcaggaaattcttcttttctttggaactatggaaatagttgagcaacatggccccatgggaggtggccacttttaaagaggaatacctagaattagaatttgcaatttaccaccacctttgctcctcatttttgtctctgagaagatgcaccccctccccacttccatgccccctgactcgtaaaccagctccttaacatagttccaggttgtttgctgggggtttcaccagccctgccagtgaccttggcagggaattctgggactagataagacaaccatcgaagcctccaagttgattccatagcccagtcacccacactgtgctgactgaccccatgttgagcccacgtgggccgtttagcaccttgggcttagaagccccattttgccacggtggtgcgtgtgacctcgtgcaaatgacctaactgctctaagccacagttttctcatctgtacaatggaggtaatgatacatacttcttaaaattgtcaagagaattaaaaggaaatgcttctgaatcaagartatataatataaggattgagagcatttttacattaaggattgaggactcttgtgctggttaatttgtataaagtgctagaaacagtggttggcacacaggaagcattccttgcatgttagctcttaatatcattatttgtggttattgttatataaagcaattatgatattcctgacacacagtgcttatataagcttatgtaatataattaattatataagtatataatatatattaattttattatataaggatgtccaagtgacagattccatgtctggatctgaggtcacctttatcaccttatgtgggtaccaggccttaggaaagagaaggaggcacgtgatgggtctagcgaagaccctaaaataaaatgaagcaggcagagtcctaggcaccttacacatgtgaatgcattttgttgtcatcacaaccctgtgaagtagacattgagcctatgcagcagaagcacagataggacaaggatgcagctggaaagtgggaccagccaggctacgaacatgggggtggaaggctcattccagaacctctgctgctgtctatgtccaggagtgcagaaggccttaaacatacaactcaagctataaagtaaaagaatgacgtatttaattacatgaaaattttaaaattttatatggcttaagacatcataaacagaatcaaaaatgacagaatgagaaagattttgtagtatattaaacataaaggttactatccttaatttaggcaagaacccacagatgaatgaaaaaggataaggaaataaaagtgggggtgtggtggttgctaacagtatgaggaaacaactcagaagaaatgcaagctgcctcatagacaaatggaaagatgccaccttcattagttccttaggaaatgcagattaaacccatgagatatgttttgcctttcatctgcatacattaaaaggattgataacatctggtgccagcaagggcatgcacttttggtgagagtataaatctggacaaatttggagcaaagattgcagcgctcattataattcaaaacttacatgggctttgaccaaggattttgatgtctacagatttacccttccccagcactctgcctgggtacagtggtgtgcacaaaattagggaccagcaagtccaatgtaagatgtaatgrtggaaatatgcagttgtgcccatcagtaggggtctgatgaaaacaatgaggatctgtgggtaatatggaatgactgcattgagaaggatgaagcgggtctcttagcagacatgggaagatgactgtgttatgtcatcagaccaaaaggagcaagagcaagtgtaggaaaagacaaatctattagtctttaaaaactacaacaaggccagggacagtggctgatgcttgtaatcctagcactttgggaggccaaggtgggagaattgtttgaccccaaggagtttgagaccagcctgggcaacatagtgagacctcgtctctacaaataataataataataaaaaattagccgggtgtggtggtacatgcctgtagtgccagctgcttgggaagctgaggcgggaggatygcttgatcccaggaggtcaaggctgcagtaagctgagattggaccactgcactccagcctgggtgacagagtgagaccctgtctcaaacaaaaacaaaaacaaaactacaagagttatatatacatacatatttacacatagacacacatacatgtatacatgcatatgcacacagacgtacatgtgtatatctaaaatgatcttcaggaatgcacagcagaccattagggtagccacctcttgtgggaagaggggtggcagatcttcatatttttattctagattttcataatcatgtacaaatttaaaattaattttttgttgacaaaaccaggcagtaaggagaggcctacatagggttgcatttggtaggcttctcttcacatactcttctttctcattccctgtgtatctgacacatcctttcagaggggcctgactgtggagtgatgtttcttcactgcctgctcatctcctgtgactttcttgcgttcccttctgagccttaccaccttcgtgggatgggtgtccctggctgaaggtgtacctctgccatgttcccctcctccagtaccttggaaagtcccrgtgtgtccctgagcagcrtgtctccgaggggactgtctggaactctcatccccacaataggaagggtttttcagtcatgggggaacactgcgttcctgtctgacctcctggggttcctcatttacgtggtcrgtgagctgttgagaggcttcaggaagtcaggagtgaggaggyctgcctagctctgtgaatgcagctttcctaagtttctctggccatggaaccactttcccagaatgcctgttgacatcttcgtgctccaccaagatgttgggaagtgcggctctttccctggttcccacttggactttctccttaaatctttgcagcccwgggatttccagctggttccatgcccatccatagcccacatagcctctcagtctgccttggccccttctcctacctcggccctcaacccattcaaacaacagacctggtcacctctgaaatttggtgttaactccagggattgattgctcactggggagcaggggctagatccagcccacagtggtgcttgacggggtcacccatgtttaaaaacacaacttgagccaatattgggctcttggaagatacttagagatctggtttcttattccataatccatgtgcctgtgaaaatgggaaaaagaaactttgacagggatagccatatgtttcaggaaaaaaaaaagggagagcctctttttcagactagtcctccacgtttaaaatgtgagagagcttgtttgcaccttccacaccggcccgtcctactcatttatgtgagtggtgcggggacatgctggcttagagtttgccgcccatgcttgaagctcctcggtgccggcaccttggtacaggccctagttcttttgacctagaaagctttttktttgtttgtttccagccatttcctttttttaatttacagtttgcgttcagtgcaaacccatagcatgagacattactatgaatcaaaatgtaaatacacaaacacaatatagaatccaaaacagaggtgcagcwttcaggaatgaagcagaagacaggttcattcacatgcacagtagcttcagggctgtgtgatctggttgttcccatgtagcttcctaaagatggaaaaaaatgattttggtcatcaagactactgtggccatattagatactggaaccgtagaaagttcttcataagagctttccagcaggtctgtgcgttcccagtttcttcaccccccagtctctcctctgtgtgctgtaattatttttctaaaacacagaccgcattttgttgtggattactcctcaytgctcaaggatccagtccagttcccagcagggcactccacagccccggccctgtaggtcttccagccaccccagccaggaagccagtgctccagttaagtcagcagacttgccggaagcctttgtgcctttgcagatgcagctgtctgccagatgccctttcttctcatctgttggaaccatgccttgtcccctcccctgaaacctgtcaaccttgccgctgctgaattccttatctggcttctctgcctttgcagcccttggctgttacagcacttcctacrtataattgtgattccctccggagccatctctctgtagattggaagcagttaatttcccttaatctttttttctycccccagccccatactagagacactctcccatgggtagtgcataaatatttgttgcatgacaatttagtctttaatttctcacttttatgacattattgctttgtgatatcttctactttcatgataggatgggtaaattgcagggagaggaactgtaaatacggatgcttaattcttcctgctttcaatttttttctsttaagttaaatgtgctttttgttgctccacctctctgattggagcctcacattgggagsctgaggcagtggaatatcaaaagagggtagccgttgaatgtttattttcaatgtcagccgtgaaacctaccacttcgaatagtggggcctggaattcaggctcaaagtcttttccccatatttgtttccccctttggcctctcttttgcttgaagctgtgtactagactctcattaactttaacaagaattacagatgtgccctcagggggcctctcacactgcctttatttgctgtaattttaatgaattccacccgtagaagtgtaagaataaaagaggatatacttgagcaaagggaaagagagggttattacacattgtacctttttttaaaaaaattgcagagtaatgtcagctattcttccatttgtctcctttggttgccagtgaaaaataattttggctgcttattttccaaagcagaaactgaagtcaaacacgaacctttcctagacaaaaattcactcataatcatttttgagagtcgatatgtaccttatgcaaagtgctgggaataaaaagatgaatttattcccataaatatgtacacctactatgtacccagaaaaatttaaaataaaaatttttaaaaagatagatgtattaacaggtacttatatagcatttaatatgttgcagacatagttttaaattgtgtcagttatttgtttctgcatcatagaacaccttaaaacttaagtgactgaaaacaaccaccattcacttgctcgtagttttttgggtcagcaggttgggctgagctcagctagggggttcttctgctggtcttgggatgcctsattctactgaagtcgtcatctggttattcatttggagccagatggtctacwgtggtttcacatatctggcagttggtgctggctgttggctgggacacttatctccagcactctagctcaaacatgcttaagtgacagcaatatatatatatatatatatattttttttttttttttttgagacagagtcttgctctgttgcccaggctagagtgctgtggcacaatcttggctcactgcaatctccrcctcccgagttcaagcaattctcctgcctcagcctcctgagtagctgggattacaggtgtgtgccagcacgcccagctaatttttgtatttttttttttcagtcgagatggggtttcaccatgttaatcaggctgatctcaaactcctgacctygtgatccacctgcctcggcttcccaaagtgctgggattataggtgtgagccaccgcgcttggccatgacagcaatattttaagagagcgggaggagaggctgtaaggtcttttgagacctaggcttggaaggtgcaaagagtctgttgtaawctcttggccaaagccagtcaaaaggccagcccagattcaaaagatggaaaactagattccacctcttcttatttttaaatgggccacaaaaattctctataaagactgacttatttaatgcttacaacaacttgaggtggttgaggtaggttcctctattattcccactgttcagatgaggaaggtgaggcatagcagagaggttaagtaacttgctcagggtcacacagcttggggcaatacaccatggtaagtcctttggaagttgctgctcattatttttgccttacagccactataggaccaacttattatttctctgcagccttgcagagaaagaggtcactcacatttgccgtgcagctgccatgtgttggaagcttcatatatgtagtaccactaaaccgtcacaactagtctgaaatggagatattattattcccagtattcaggtgaggaaactgaggctgatggaaattaagtacaagtcatacaaggggatgataacccactgttccatatgcaagagtttgttttccctaagtaaacaataaatgtgctggsrcagattttttgttttttgttttttaaaaaatcttctgcttgcatctaggaagtgttaagaaaaaaaaatctgttgatttgtttatgacaacccatacatttcagaaaagtagctggaataataaacatgtttttcagttgtccagtggagccccaaaatagaagcaagatgaatattccattccgcattggcaatgccaaaggagatgatgctttagaaaaaagatttcttgataaagctcttgaactcaatatgttgtccttgaaagggcataggtgagtacatctgcaatgcacgagcttggcaaagaattagcttagtttttcaaatgcagaataaaacaaatctataggagcctgcttagcttggagtagcagttatgtaatttgttgggccaacccagctgttataaggatgtgccttcttcctgttgtttatggamccctttgcataattccccagctgagagtataatggagctccatcttccatgagggttttggcaaaattacctttgaaaatctcttacactgctcgtatagcacagaggttgccattccatctctgatgaggccagcaccactctgttctggaggtagagaatcattattattccaactgaacatcaaattagtagctagtcttgcatgctctatgaaaaataaatgtcctcacatgagaatagcagcagggaatgtcctcacatgagaatagcccagccccgatcttgctggcactgtcacgacaggctcatgaatgttgaacagaatcgctatcttcttccaacttaccttttcttccccacatcttgcttgctttctttgccaagagtgaatagttcgaatgactctaaatgtgagcatggtgaaccttcacagcttaagggagaattttctgatgactgagacgtgtgaagctctgtgccaggtgtcgggagtttttaggtaggagaccggaaatgatggtctcaggtgctgcaactctcaggagccagtggctagaaaaaggtgttttgatgcgaaattagacgttkttgttctcaatgcctggatctttggtcattctaggtctgtgggaggcatccgggcctctctgtataatgctgtcacaattgaagacgttcagaagctggccgccttcatgaaaaaatttttggagatgcatcagctatgaacacatcctaaccaggatatactctgttcttgaacaacatacaaagtttaaagtaacttggggatggctacaaaaagttaacacagtatttttctcaaatgaacatgtttattgcagattcttcttttttgaaagaacaacagcaaaacatccacaactctgtaaagctggtgggacctaatgtcaccttaattctgacttgaactggaagcattttaagaaatcttgttgcttttctaacaaattcccgcgtattttgcctttgctgctactttttctagttagatttcaaacttgcctgtggacttaataatgcaagttgcgattaattatttctggagtcatgggaacacacagcacagagggtaggggggccctctaggtgctgaatctacacatctgtggggtctcctgggttcagyggctgttgattcaaggtcaacattgaccattggaggagtggtttaagagtgccaggcgaagggcaaactgtagatcgatctttatgctgttattacaggagaagtgacatactttatatatgtttatattagcaaggtctgtttttaataccatatactttatatttctatacatttatatttctaataatacagttatcactgatatatgtagacacttttagaatttattaaatccttgaccttgtgcattatagcattccattagcaagagttgtaccccctccccagtcttcgccttcctctttttaagctgttttatgaaaaagacctagaagttcttgattcatttttaccattctttccataggtagaagagaaagttgattggttggttgtttttcaattatgccattaaactaaacatttctgttaaattaccctatcctttgttctctactgttttctttgtaatgtatgactacgagagtgatactttgctgaaaagtctttcccctattgtttatctattgtcagtattttatgttgaatatgtaaagaacattaaagtcctaaaacatctaagcccttgtcaatgaatttctctacctgctttttagacaaattgttctttatgatgggaaagcttgaggtctaaaaatagcacctgctaagggtaatttagttcaaccaaagatctaagacttaattcttgtgcatccatttaaaaaaattcaacacggtgtgggagctttccatttgcttttggaatgggcattatcagcaaaccaccttccattgcagctgaaggtgtaaagttctttttttttagatggaggctcgctttgtcgcccaggctggagagtgtggtggcgcaatctcgactcactgaaacctcccctcccaggttcaagcaattctcctgcctcagcctcccgtgtagctgggactacaggtgccagccaccatgcatggctaatttttgtatttttagtagagacggggtttcaccatgttggtcaggctggtctcgaactcccgaccttaggtgatccgcccacctcagcctcccaaagtgctgggattacaggcgtgagccaccgtgcccagctctgaaggtgtaaagttctatgagytttgtcccatttgccccagaaacatgccactaggactgttttgagctatcttcctggtttatttgattgcataatgaggactccaccagtgtcttgtcccatctctgcactggttagttggctcccctgttcaggtcacaggctccaaggcttggttctgtcatctgtaacaggagggttgaaataactcccccaccacttaccttaaggatgtttaaaagtttaaaacaagggctcgatgcaggatgtgaataataaccacaatgaagttttaagtagcaaaagccaggcagtccatggattccaactaagtgttcacacataaaagtcatgctcagagtcagcctcccctccttcctcaccctttcatatgtggttgcacatccctgtcatctgtatcagacctgtgcttctcaaatatctgctaattttcattccattgccatgtcagctctgctatgtcagccctcagtggattattcagcagtctcttctctgcccccatattcccctcccaccacagccagttgaactatgacttccccttgtgctctttgttgatgcatacaaagtccagtactcccagcctggcagtcaggactttgtagcatgggacatggcctcttgcacctctcctgcatttgtgattcttggaaagtggcatgcatttgcccacactatgacataagcctggagtttctgtgcccactcaggaagaccagatgacaccygccaacctcttcctaaactcatttgtgtcctttccattgggacaatgttcttttcctttgttttcaccagggggatccttttctcccattataccatctctgttttgttctttactatgccaaggtggctgcatatgtgccttccccatacagcagcatggaaagaacgatggttctctacctcaagcacctagtgtcctgccttgcccttcgaggtgcccagtgaagtctgttctttttagacacagggtctcgctttgtcacccagactggagtacagtggcgtgatactagctcactgcagcttcgacctcctaggctgaagttatcctcctgcctcagcctccccagtagctaggactacaggtgtatgttactgtgcctggctaactttttaaatttttttgtagagacagggtctcgctatgttgcccagactagtcttgaattcctggctgcaagtgatccttttgtcttggcctcccaaagtgctgggattgcaggcaagagccactgcgtctggctgaatgaaaaatcttaatgtaggtcacgttggtctttctgagtaccataaactgagcttggagtaaaggcagagaggtatgatctgtcacataacatggaccttttgttttttttgatggagtctgtctctgttgtgcaggctagagtacagtggtgtgatcttggctcactgcaacctctgcctcctaggctcaagtgattctcctgcctcagcctcccaagtagctaggattacaggcacttgccaccacgcctggctaacttttatatttctagtagagacagggttttaccatgttggccaggctggtctcgaactcctgacctcaagtgatccacctgccttgtgctcccaaagtgctgtgattacaggcatgagccaccaccacatacgtggacttttaatatatatattttttcaagagcttagtatccaatttcgttttctactaaaatggtcaaatatgattctgtggttgaatgaggaaatttagtgtcttgtgagttcccccagaaccatctttataaatctgaaagcttttggaaaatggttaactaccacatacggacaaggggtaatcactggtgtctggccaaacagggaggttctggaatagatattgctggaaaatattcatcagagcaaaaaacttgacctttgtatgtctcgagggaatgaactgatgccaacctgctgatcacgcagagaggggtgaaaaggggagataaagatacaggcttctgggtcagcaagctgcaggagtcagaactggttggtctttccttgaagattaaaatggaaagcaaggtagattgacaggtgtctttgcagccttgcagaggctgggagaggggctgcctcatattcctttggagcctctaaattgtacttcttccccaaatggaacttggaacttttttttttcttttaaaattggttaaggccgggtgcagtggcccatgcctgtaatcccagcactttgggaggctgaggtgggcggatcacctgaggtcaggagttcgagaccagcctgaccaacatggtgaaaccccgtctctactaaaaatacaaaatcagttgggtgtggtggcacatgcctataatcccagctactcaggaggctgagacaggagaatcacttgaacttgggaggcagaggttgcagtgagtcaagattgtgccattacactctagcctgagcaacaagagcaaaactctgtctcaaaaaaaataaattaattaaataaaatacaattatttacaacatgtaatcattataatgccatacaaccaagaaaaaccaaatttttttcttgtgttccttgtgtttacctctatgccctgctttgtctccaatactacaattctgttctttgcatgagaaataaaatcatgttctgtccctaaggcctaaatcccctgctagagcccattgattgaaatgcctaatgctgtctcatcataacttacctgaagctggcaggtttggcatgcacttaagtgaattatgtgaggtaacaaagaagtagtccctcctccctcctcttagagctgaaggggctctacaagctgaagacacataaaaatggacaaaacattagatgttgtccaattctaccaaaggcattaccaggtctggccttgccctccatgattaatgtttgttgtatcacgttctttggaaggaaaataaaacgaggaagaattttttcacatttgatgggaatgagtataattaaaaagtgaaatgctactgagtctgctaagaaatcgatcattttaattggaaggaagattcctggtttctgtcagtaattgggctcttggtaatttaaagatggaattcctgacagtttgtgataaattggcttcttttgggctaaagaaggtaagaagttctaattacccctggattattattccagagtggacagaatcttggtcttgatcctgatcaaagagattggaagagagatagaaaagctagcaatgagcaaaggcttattgaatttattttaagaagctaaagaataaaattgttcatttgatgtgacagaaataagagcttgtggtatctgaaatcctagagatgtcgattggattttctaagaaaataggaaataaggcatattagaagaagtttatgtttgcaaaagttaggttatgcagaaagctctgcttatttgttagcacacacgagaatattaacaaacttagacctcacttagggacaagtatggaatttgtgctttgagtgtttaaacatataagaaatctgcattaggtttaaggaagtgtaaaatgttttagtctagtgacaaaataagttaataggaatataggcagggccctgattaatgtatccactgaccctgtctctgtgggtagcctgcctttgtttctatatatattgcctaagaatacctgaacctgggaggtgttccaagatggcctaatggggacagctctggtctgctgctcccggtatgattgacgcagaagacgggtgatttctgcatttccaactgaggtacttggttcatctcattgggactggttggacatgggtgcagcccatggagggcgagctgaagcagggcggggcgtcacctcacccgggaagtgcaagaggtcaggggatttccctttcctagccaagggaagccatgacagactacctgggaaaatgagacactccccacccaaatactgcacttttcccaaggtcttagcaaccagcagacaaagtgattctctcccatgcctggctcagtgggtcccatgcccacagagccttgctcactgctagtgcagcagtctgagatcaatctgtgaggcggcagcctggctaggggaggggcgtccaccattgctgaggcttgagtaggtaaaaatgtggccaggaagctcaaactgggcggagatcaccgcagctcaacaaggcctactgcctctagactccacctccatgggcagggcatagctgaacaaaaggcagcagacaacttctgcagacttaaacatccctgtctgacagctctaaagagagcagtggctctcccagcacagcatttgagctctgagaacagacagactgcctcctcaagtgggtccctgaaccctgtgtagcctaacagggagacacctcccagtagggaacaacagacacctcatataggtggctccccctctgggatgaagcttccagaggaaggatcaggcagcaatatttgctctctgcaatatttgctgttctgcagcctccgctggtgatacccaggcaaacagggtctggagtggaactcaagcaaactccaacagacctgcagctgagggacctgactgttagaagggaaactaacaaacagaaaggaatagcatcaacatcaacaaaaaggtcatctgcaccaaaaaccgatctgtaggtcaccaacatcaaagaccaaaggtagataaaaatcacaaagatggggagaaatcaagcagaaaagctgaaaattctaaaaatcagagcaccacttctcctccaaaggatcgcagctccttgccagcaacagaacaaagctggatggagaatgaatttgacgagttgacagaagtaggtcagaaggtcggtaaattacaaacttctctgagctaaaggaggatgtttgaacccattgcaaggaagctaaaaaccttgaaaaaagattagatgaaatggctaactggaataaacaatgtagagaagaccttaaatgatctgatggagctgaaaaccatggcatgagaacttcgtgatgcacgcaaaagcttcaatagctgattggatcaggtggaagaaaggatatcagtgactgaagatcaaattaatgaaataaagtgagaagacaaggttagagaaaaaagagtaaaaagaaacgaacgaagcctccaagaaatattggactatgtgaaaataccaaatctacgtttgattggtgtacctgaaattgatggggagaatggaaccaagttggaagacactcttcaggatattatgcaggaaaacttccccaagctagcaaggcaggacaacattcaaattcaggaaatacagagaacaccagaaagatactcctcgagaagagcaaccccaagacacataattatcagattcactaaggttgaaatgaaggaaaaagtgttaagggcagccagagagaaaggtca

SEQ ID NO: 94346 - DNA, 276821 bp, Homo sapiens
  misc_feature (1)...(276821): n = A,T,C or G
tgtggtgatggtgcaactgtgaaatatcaccactccatcacccaactacaggtataaccacatggctcaggggggacaatcaaagtgcttcatccctttagccatagagacttttcagagataagaaactaatctgagcaaggccattcagagacatattatgagatttgatatgagcatgtcagagaaaagggattttctaactttttgagggaagctgtaagataggctaatggctgcttcagtggccaaggaagaataaacatgaagccaaaacacaaaagaaagcactgtaaagggaaggaaagagagttatatctaagtccttggatctgtccatgcctgaagcaatagccactggtggacttcctagctgtatgagctaattattttcccttttttcttaaatagtatgagttaagtttcttaaaattaaaatatttttgattaaaatggaggtaattctttctgctcacagggttattgtaaagatcagatttataagaatctggcaaggctggtggcccatacctgtagtcccagctactctggaggctggggcaagaggatcgtttgagcccaggagtttgagcctgcagtgagctatgatcatcccactgtacttcagcctgggtgacacagtgagaccctgtctcaaaaaaaaaaaaaaaaaaaaaaaaaaaagaaggaaagaaaagaaaaagaagaataaatatataattcattgtaagctgtaaagagcacctgagtcattatttgacttttaacaaattcctttggccacagagaaaataataaaaacaattattctcatgaaatagtggtaagttatacttttcatgaaataaactacagtaatagatttttgcatatgctgtgatttggaatcataaatgatcctaattgcctctgtgttgggctttgtctaaatactatactttgtttttactggtatttgaagccagcaagtaatatgtttattcaaacacttgtggccaaatatccttaattactttctgaaacagtttctgaatagggagactggtcaattatttttctttaatatgattattataataaagctatggacatgtttttgcagtcaagcttcctcagagatgtttataatgattcaatcacaaactaaatctctatgtttcctgctttgttgttgttgttgttagggaattaggggattccctggtatagcagtgtctttgttacatccacttcctatcttacctcttttctgaaatatttcaagttctccctgccagtgcaccaggagtaaaaagtcctatttatattgttcctcactgtgtatgtcattgcttctatcatattctggaacgcttatggtaccatacttagattcaggatggccagcatttccagccattgatgacattattaagaaacagaatgataaactatggctgaatcatttacaatgctaggtgttcctggcaataaatctcttatgacaatgtatctgaggctgggcacgatgtctcacacctgtaatcccagcattttgggaggcccaggcaggtggatcacttgaggtcaggagttcgagaccagccacaccaacatggtgaaacctcatctctactaaaaatacaaattagctgggtgtggtggcacatgcctgtaataccggttacttgggcggctacgtcaggagaatcgcttgaacccgggaggcggaggttgcagttagccgagatcacaccattgcactccagcctgggcaacaagagtgaaactctgtctcaaaaaaaagaaaaaaaagaaaatatatctgatatattccagaaatgaaaactaccctcaatctgtctgtatccgatgtgtttttccctggtatttccttagtaagctgcctggatggaatgcgtaaaacaataacagcattgctttttcacgtaaaagtttgaaatcttcccttcaaatacaaaaatatttttcacagtcttttttattagaaagtcaccactgcagtgaggcgaaaacatacattctgagaagttacagtagaaatgacaatttacaaaacaaactgtgctatgatttgcataatgtgtaaactatactaaaccatggcatgcaacacaaactatttaagctcaaaatgttttaatgtcatcttattcagacccacactttccaagataaaaccatagataagtggctataccctcagtctgaactcatgtgtttcagagaaaagactattacctgttctactaatttccctgtttatcgattctgaacaacacctgcccagaccatgctcactaactttattctaaaaccactttgtctgccttctcccgaccaaaaaacctagcagtacctttccctaaattttccccatgagaactatgggtactctggtaaatgttctgttttcccttgttcagtcaacttaataaactaagttttgtgtggttagcagatccctgatgatcttttcatggaagcttgtgtcattcacacatgatgacattgctttcttcatcatccatcatggtacccacactgtgttctttgctcctagaacttaaatacttggccctagggatatatttgtctcctgttagatgttgaacaggtatctgagaagagataaagactaggtacttattcttgttcaaactcagtatttattggctgactttatatctatctaaggacagtcaaaaccgggtggtagccaaccactttgcttttgagtgatgactctggttctgcagaatctatgaaattgagtcacaaaagacaatgatgtgcttatattctcaatcactagactctggtttttctttttcttatatgatgctaccaatgccagaggctgaaacaaggacaaatgtgcagaggttgcatatcgccacacagctggaaaatggctttgacaagcacacaaagtattcttgctgtggataatttcctttcaacataagtaatatgtgtcctccatcatgacctgtgtgaggttggactacatgattgttaggtctcttcaaacccaagactactttatgttataaaaatttcaaagtaggtaaactttggccttagtcattattcagcccatcttttttccctgctcttctgacattgcttctgtttgctacctttcactagtgttcattgatggttttagtgtattcatgttgtcctcatttacccaagatctttattttaggcctgttgccaagagccaaacttcattctcacacatgtgattttatttcctgtgttagaaccaaaacaatcagaattcagtttttaatagatgaaagttacaactccaaaagaaatttgacttcatcaggaccttcctgaaagaaataatcactgaaccaaaaaatggatgtccatgtatcatttatatagcagttgcctaccttacatatacagtatatcaggttagagctgtgcaatagtattttataatttacattatgagcatggatcaatggtagagtcaacaatcctacctttcaatctgttgcctcacaggcatttgttggacacatttaaaaactagctgacttatattaaacataattgtgtgctaaactatatatttggccttcttatctcattgaattgaatgagataaatctagaaagaaagattttataactcccattttgtaggttttaagaagttaagtaacttactctatatcacatatttggtaaatgttagactttgctctcaagctttcaatttggctgagtaaataacaatattcacggaacagttataaaataacatgaaaacacaaagcaagtcacaaggcactattaattgcacccacgtaatttgggaactctattatcaattttctgaattaaaataaaggaggtattattgtgagatggactgtatttagaaagcttcctaaaagagatggataattacactgggttgtgaaatatgtacaatggcagaatgtttgtcgaagggaggaatttcagagaacacaggaacaatacattattggaaagagaaactagtaggagcactgacagattatcaaattaccgagaaaattttcaatggctagtgaggccttgaatgagggataggggagggagaaatcaaaactaaatagctattagtgttgagggagctgtgaggtggaatttgtggccacactcccctttccctccatgagccacttggtctataaaaagactggcaactaaggtttattcaagcggaattcattggtatccacactaagagttttaaaagccacattgtgacatacagagaatttggatggatggcctgacaacaggcaaacatcaaggaaatttatttgtttattagttggtcagttagtttgtttgtttgaaagttgcctttctctgtcttttgacagataaaaagatgggaacatatataactgagagtaagagaaagaaaaaattaaaattcgcctacaatgtggatgtggtaaatgagaaggaaactgatatgttttaagtacctaatgtgagccagaaactgtactatttttttttttacacattgattcacttaatccccataacaaccataagaagtagatgttacttaaagagggggcactaaaatttaagggattttttttttttttttttttttagttatacttcaagttgaagaaagaatttacagaagtttaatacctggcctaaagtcatatagttaataaaaaataaagtatttaaaccagttctcactgatatcaaagtccattgtctctcattaaatgaatctcatatttaaaaaaaaaaaccttaataatttactgagatgaagcattcttaggaaatttaataagcaaaatattcagataaaaattagtatttaagtcaagcatttctgtgcaacacatcaacccaataaagtggtttaaaacaacaaattttctttttttttcttttttttttcttgaaatgaggtcttattttgtctcccaggctggagtgcagtggcwctattaccagaaaggggtcctgagccagaccccaagagagggttcttggatctcacacactctatgactccatagagtaaagtgaaagcaagtttattaggaaagtaaaggaagagagaggggctactccataggctaggcagcagcataggctgctcagctgcttatacttactgttactttttgacatatgctaaactagcagtggattatttatgagttttccaggaaaggggtgggcaattcccagaactgagggttccacccctttttagaccatacagggtgacttcctcatgttgccatggcatttataaactgttatggtgctagtgggagtgtcttttagcacgctaatgcattataattagcacataatgaggagtgaggacaaccagaggtcacatttgttgccctcgtgattttggctggcttgggctggcttctttacaatatgctgtttcatcagcaaggtctttgtgctctgtaccktgtgcggacctcctaactcatctgcaactaagaataccttaacctcctgggaacgcagctggcttcagccctattttacccatcccctattcaagatagagtagctttggtttgatcgcctctgacagcatgattttggctcattgcagctttgacttctccccggctcaagtgatcctcctgcctcagccccccaagcagttgggacaataggcacatgccaccacacccagctaatttttgtattcttcttgtgtgtagagatggggtttgccacattgcccaggctggtcttgaactcctgggcacaagctatctgcctgcctcggcctcccaaagtgctggattactcgtgtcagtcacagtgccctgcccaacaacttttaattatctctcatgcttctctatcaattaggtcctcagctgagtcgttctgctatattgcatcagatgtcagctggttctgcagtcatctggaggctctgctggtagaactcccagcacacttcactcaaatggctggctgcagctggtgctagttatggtctgggatctcagatgaggctgctaagcygaatgtgttgttactcctttacatcgtctctccacatggcttgaacttctcacagcatgcctgctggattcgaagagatggcattcaagtgcttaaaaatgtaagcaaatctcttaatattcagycttagtattacatagggcttctactgccatattctctggttgaaaacaatcmttggatcagcccaaactaaaggggtagagaaagaaattccacttctcaaggaaggaatgacaagttttgggccctttttaatcaacatccaagtaagctgcttgtgatgaaagtgaaggtggggaacggaaaaagtgggaaggtaaagatcaaagcaaaatgctccagagtccttaaaaagctaaccgtgtaagcttggattccaagagagagactccagatggagctaggaatagaaagatttcctagtaattgggagcaaggtagatgaacatttacagtttctcctaatttctgtagtcaggcttcaggtacaaacttaggctaatatgttgtctgttaattatatgtatttcttaatcatatattggctgaggagataccttgggagggttgagagggaagataactgagagatggtgatattgctaatactaccgatatacgggacccctctgcaattacatcttttagttaatttcatgtgtatatattcagccattgacagtataatctgtatcctctgtgggtaggagccacagcactgtatttatttcgcattctcaatcacgcctacagattcagttcattcagactgttgtaaaaataaatgcggctcaaaaatgcagctcccccatgtaacctcctaggcaaaaagagacagaataaaatcagccaaccattttttcacaaagattgctgcctagtaatttcagggaataaacttttagttaataccgtaagtgcagaggcctgcagcatacacccaggtgaaaagtttcaccccacattgacctgtcttagggagaggcaagcacttgctgaagaagcaagttctcattactaattagtaattcattattgcatggtttcaagggaaacttatgacctgttaagactaaaaatgaacacaatcattaatgtttccatcactttggaataggaaacaatttcagtctaaagtgcatgatttctggaatgtatttctcgatgcttctgttttttgttataatatttcttgaaagcctggttaaaaaaataaaaatagctatgtttagcctaaaatgattacttttctctgccattgacaatgaggtagcatttactacaaaattggcattacatgttctttgctatgaacataactttatttgaatcaaaaaagtcaagcaacaaaagtttaaactcatttctttgaattttgacaagggtgtaaaactgggataattttcattaaatgtgttatacatttagcagagtaaaagcaaataagtatttattcactactgagaaaattacaaattataatcatgtgggatcctaacaccggaatagaaaacaagagaatagattataagaaataataagaaaaacaattgggattttttcccccagaaatctgggggcaagtgttgcaatgagaaaacataaagttactgattattgtattttattgtcaaatatcatcttaagtcatattgaaaatgtggccatctgttctccagtgtcttcaaaatctaagaatagcccaatcccaatcctttcaaaaacattctaaaaacaaaggatgaaaattatttatattggtagagatagatattttaattgaaatcagtttataaatatataacatttgataaatctgaacacataaaccatttttaactattataaaattattgatttctgcctccaaaattccagtgaaattgtccctaagccactaatcccatggttctattggtttatggcctgtttgagacattttgcttctcttttccactccctcttacaattttttattcccttggctttgtgggcacctctatgccctggtagttttcctcccctctgattgygttcatctggaacgcaatcctttccctctcccrcctttgttccacatgtctgtttcaaatcacccattcctattaataaactcattataacttttgaatctcagaatctccatccctggactatctgaaactcgccattttaaaattyagtacattatcttcttacaaaaaatgttttccatctccttawttaatgtacctatatagyggcatcaccattttaatagtctccttggaaagaaatctaagccatcgaggtgcctctatcctctcccttctatgttactgcatccaatatattaaactctcacaattcagtttctggcatttgtcttgaattcattctttcttctctgaccccatagggtgccagccctccattcagtctttttcctcaacaattctgattattttttctgtgtctttgctcccaaaagttgccttttttatcatcttgggagcttcctctttataatatgtacactaggacataaaactaaataaaatctctccattttctaagaaaaaacatacagattccatagaatccgtgcaatagctatcagtcacctaattgctagtttcctctcctaacactcccagtcctttcacctttgttatctaacattagaggaccatgccaactgaagcctatctccatgtcaatgtacatgatttttcttcctcctgaaatattctaaaattttcccacctggtaaatttcagattactctttaagacccaggtgaagtgttgttttatctgcaaagagtctcttaaggaagttcattctctcctatttgctataatattaatttgaacatttctttattattacmtgatgttgcattgtatttatgaaggatgaytgtatgcatgaaggattataccactaaacttcagcttcttgaagaagtagtccatttcttcttgatctttatattaccagtgccacaaataagcrctaagaatacttaaatgagttacttgcattattttgcataatgcactttagtgtttggcaggcctatactcaaagctcactctgamacttarttgggtgattcaattacctaatttctcaaaatcacatttgcctcatctgaagacattggtacctacctcacagrgttgttgtgagaactaacattatataatgcatgtgaaatacttagcatagtgtctgacacttaataagtactcaataaattctgactgctactattatarggcttcagttgaatagaaaaggaagtagagacagatgaaatagaatggtttgggataaaattgagaagtcaaaggaatgaaagcttaattaatttgwgtgatcattttggtagagataaaggaatgagaataactggaataaaaggaggttgtagtgagagagtgttataaattattatattctgtcagcagtttaatgttctgctctagagcactgcattttgatgacatgatccaaaatactgtcataagtaagggtagacaagatggattgtaagataatcagagttgaggtgaacaagaaattaaatgttgtgaaatattattgttsaatttggaaatgtttatattyrgtgattgycatagaaatttcagatagtagataggccttgagttaagaggaatagtgtgaatcagtcascagattctttaaaatatgttcaggagtgaccaagaaattggtaaagaacagtgacgtgaatgggataaaggatgacttatacaaggatgggagtacaatgaactggaaagttagatttgtgactcaatcgtttgcttttgtgaaacaaggcatatgggaggatggacactctytactgtaaagcaggggctgatcaccaaggcccttaaatctggcctgctgcttgttttgtaaatgaagtttcattgaaacacagcaacactcattaatttatacattgtctgtggctgtttttgtgctgcagtgtcagagttgattaattgcagcaaaaaccatatggcccatgaagcctaaaatatttactatgtggccttttatagggaaagcttgcttaaccatgttctagaagtttgcagccaaatcagtgtcttctaatatatgctagggtataattaatgcaaggaattagaaaagaattttgtgtctagttgagaacatgaagaggagtttaccacaaacagtggatttcagaaggtctggtgaattttaagagaggtaagaaaggaagcaggagaaattgaatgtgtccaggaggagcagcattgagcaatatgagagtggctcctagaaggtggtcaaactgaaaagcttatctttggggcagtgactaagaatttctaagcataactaaagaggcctaatgacacctaaagaatcatggtgtcaggttctataagcgccggtgtaagctaatgcctcaggtgatgccagatacctgacaatacaaaattcgcccacccaataatggtgaggccctggttgggatcctaagcctggggacattactgcataaatagaagtaattataccaaaaacaacttaacacccctaggctacaagtccttgtatatcccaaggattgctagaccacaaaccaaaaatgaagacaatcattgtatatgagcaatctatcatttcatttcacagtatagcatctagatagatagatgagtgatagaatgatctctctctacatgcagaaatatatatcaatatatgtatatacattatcttatctatctttagtcattctttttcaggtagagaattctatatgggggaatttcaatgctcaattcttgaactacacatttttacttaggacaaaggaaaataggctgtactttttagaatataaaatattcatcgtttcccaataagcattatagttaccacagcctgcttaaagttgttcattgttaactgacattcaaactgtttggatttcaagtgaattaaactgtcaaagctcagcagtatatttatcatctgtgctacacacacaaatttatttaccacacacttcaaacatctgttactacattttaatagtagttgttgacatgacagagtaaaaaagtaaaatgagtccatttaaaaggttgattatggtgcaaaactggtaaaaatgtcatgcatgtgtatatccttcaaagatatctatgagcacagggaatgtgatcaggggcagcaaatttaaatccagaggtacagaaacacagtgagcaaccttcggtgatatataaagactcatatttagttttcatttaaggcctagataattcctgaggagaaaatgacaatacaatgtaattctcttrttgcaaagtaataagagaaatgaatataaagttctgcctgagggaatgagaaatacttcacaaagaatcaaatttttatcctaagaagaatgagtaggaattcactacccaagaggagagactgtgtttggcttgccttactgttacgatagtaacagaaggaaagtaagaatgtgaaagtcaggtaatttttcaaaggcatcattgattttaaccattactcaatttcagatatacattcagttgtgtgttgatacaaataattatttacctatcttttattggttgcattcatttatccattccttttaaaaaatatttattgaaccactgccatgtgcgaagtgcagtagtagtcctgggtaaacaaagatgtgaaccttggaacgtttactcaggtaaaaagacagaccttagagggatcagtgcaattcctggagtaatgttaccacagagatgtggtaatgttgtaatgtgtaatgttatcacagggatagtaatgacagaagtttttcccattgctaggtgggaaagtcttaattaaggggataacttattatagcaaatccacaaaagtataatttttgtaagaaaattttttatgctctttttaggataaatctttgatagtaaccaggctgacagacaaggcaaggaaaactttctgtttgttgccactggaatggaagcaataaagatttttcaaatatgttgcatagcatttcaatgtggaaagggaattagtttagctaatccattttacttttaaagagttataagattactgcacttatcccattcaagaaagaaatyattgctgacctctaaagtctcttccaacactgacagtctgttagttaataaccattggaaatgttaaaaataaacaatattaagtttcacctgagtttatgcagtgctgaggacaacgctttttttttctcagacatyagaatgggttgtggcagaaattcctctcttatttctccaagacatcttatcatatttgtaaaagtaattaacttcaagtacatattttctgatcattttggccattgtttgtaatgtaaaaagataaattatactgctatgctagtttgataaggcagaataaaagaagtggtgttattktgattgtgtatttttaattttaaaatgtagattattttaatgttatattcagtaatatttttgaagtygcttgtatgtgaytcagttatttatagcaggctrggaccagacctagaacaaaatcttcctrtataggaggaacaggcgctgcttatagaaactgaatagcagatgctgaggggaaggacagtctgaaggacagaatgcagtattcagagcagtgtcctgataaggaggtttgaggagggcatagagacaaattccaacagcagcattcaggattccaggagaaacgcctgaaggacacctgtcagcaggtagctcactggattgcaggcactggcctgagtttcaaggttaaactttaagcagggaacctggagaagcaaaataagccacagtcttagagaagctggggtcacagacatgtcacaaagactttttaggcacaagaaacaatctaaatatccagttaccaggtctagtatattgggaggacagtgagttcaaagaaaagcagtagttcaaagacaagttttgtggggaatagataatccttgcacactcttggtgggaatgtaaattagtgcagctactatggaaaacagtatggagattcctcagaaagttaaaaatagaattatttgatccaacaatcccacttctgggtatatattcaatgaaattgaagtcaggatcttggagagatatctgtactttcatgttcattgyagcattattcacaatagccacaatatggaaamaacctaaatatccctcaacagatgaatggataaagaaaatatggaatatatagtgtgtgtwtacatgtatatrtatataaaatggaatattactcagccttaaaaagaaaggaaatttgctatttgtgacaacatgtttgaatctagaggacattctaagtgaaataagccaagacaaacactgaatgaccccaacttttatgaggaatctaaaatagtcaacctaatagaacaagagactagaatagcrgctgacaggagctggagggagggagaaatggggaagtattggtcaaagggtacaaaattgttttagtcatgcaagatgaataagttttggatatctactgtacagtgtatggcctgtggttaacaatgctgtattgtatacttaaaagtttgctttcatggatagatcttatgtcaagtactcctgcaaaagaaataaaaaataaataaaggaaacttatggagatgatagataagtttatggcatagattgtggtcatgattttatgggtgtatagttacctccaaacttatcaagttatatgcattaaatatgtacagcattttgtatgtagattatacctcaataatgtgggtattttttaaaaaaagcagtaatatatttattaggggcttagtctctttgaaccatgacatttcaattccttcccttgtcccttccctatcaacaccagatgtctgacgtggagggttagaagagtccaatcagaggtaggaagtcagtggttattagaattgactcagatttgagtattttcaaaccaatatttctaagttctcaaaattatattaaaagtgtttaagaaaaacgaaattcaattattcattaataagcatttatagttcttacactgtgtaccagttatatattaagtgctgaaaataacaagatgaataaaacatgacatctgtccttgagaatctcacagtctagaggacaaaaggacctgataaagtgtaatgcagtaaggtaagttctattatcacaaaactgaagaataaccttgagttttttaagggctagctcttgctcagaaactcttaatcgttttactatctccccatctattgctaactgaaaaaggactatgctttatcttgctgtcaatccagcacatgcattatccacatctaccatttccataagaattctcccctccacttcatactcagattcttgtgatctaaccaaattactggcttacctgtcaaccctcagacacaatttattattttctgcacttttatttgtgcttaaggaatttctttcaacctaaaattttcatcttttcctctccatttttcaaatccactgaaggtcatcaaaaatattgttttctccttggagtgtttactgaattctccagacaaggcaatttctccttcctttagactggcataataaattccatgtttcacaggaactgttcatagacattgagcagtgactagagttacacttcaattatttccattcaaaccctatcatagaatcataatttagggactctgtgcaggaaccatatcttggtgattattttgtatctgccttacaatacctaacccagagcctaatatatgayaagcacttaaaaaataccatgaatgcttcaatataatataattccccaaatagagtgagcctccatattcccaatgagaattttactaattaaatgattttgcccaagaataatatacattcacttatcagtttratgtttrtgaggttatctaataactagttttaattcttagtttattaaattagttacatttacatatttaaaccgcatattttaggctgagctcagtagctcacacatgcaatacttgcacttcaggaagtctagggaggaggatcacttgcatgcacaagttcgagactagcctgggcaacatagtgagacctcatctctacaaaaaataaaattagcaaggtgtggtggtgcgcacctgtagtcccagctctttaggacgatgaggtaggaggatcacttgagcccaggaggtcaaggcttcagtgagctataatcatgccactgcactcagtctgggtgacagagtgagaccctatctcaaaactrcaaaaataaataaatagtatatcttttcaaataacaaaattattaagaaatggcatgttttttcatctcactcttaatacatgatacaacttactcaagctcttacacaaaacccgctcatcaagatctttatcttctctagagctacatttaaagtcctcgtgatcatttcccaggatgcaatctaagcgttttttgaatatgtgattcttatagtctttggaaattttatttcacagacataatcaatttacatatcttctaaatggtctttttttttttcatttgaccttggagcatttactgaattctccagacaaaggcaatttctataggtgtatactcataatatcaacatcatatacatctacttcatttttgaattaattggttttatttcttaaagcagcttttgttttacagaaaaagcgagtaggaagtacaaagttccctataacccctcactccctacagtttcccctattattaatctcttacattagtatgataaatttgttacagttgataaaccaattttatatattattattaactaaggtccttagtttacaggtaggttcactcttttatgttgtatattctatggctattttgttctttaaatagacttttttttttaaagcagttttaggttcatagcaaaattgagcagaaggtacagagatttcccacacactctctgtccccacacgtgcataacctccccaattatcaacatcccccaccagagtggtacattcactacaattgatgaacatacacagacacaccattatcacccaaagcccatagtttacatcaggatttactcttggtgttgtgcattctatgagtttttgataaatgaataatggcatgtattcatcacagtatcctacaaaataattttaccatcctaaaacttccccgtgctccacctactcctccatccctttcttccatgaactctagaaaactaattatctttttagtatctccattgtttgggctttcccagaatgtnnnnnnnnnnnnnnnnnnnntttcccctattattaatctcttacattagtatgataaatttgttacagttgataaaccaattttatatattattattaactaaggtccttagtttacaggtaggttcactctatatgttgtatattctatggctattttacaggtagattcactctttatgttgtatattctatggctattttacaggtagattcactctttatgttgtatattctatggctattttgttctttaaatagacttttttttttaaagcagttttaggttcatagcaaaattgagcagaaggtacagagatttcccacacactctctgtccccacacatgcataacctccccaattatcaacatcccccaccagagtggtacattcactacaattgatgaacatacacagacacaccattatcacccaaagcccatagtttacatcaggatttactcttggtgttgtgcattctatgagtttttgataaatgaataatggcatgtattcatcacagtatcctacaaaataattttaccatcctaaaacttccccgtgctccacctactcctccatccctttcttccatgaactctagaaaactaattatctttttagtatctccattgtttggtctttcccagaatgtcatacagttgtaatcatatggtatgtaggtttttcagattggcttctttcacwtaaaaatatgaaattaaggttctgtgtcttttcatgactggagagttcatttrttttattgctaaataatatttcattgyatgtaagtgctgcaatttgtttatccattcacccattgaagtgaacactcttgactgtttctaagtcttggcaatcaggaataaagctgctaaagatactcatgtgaagttccttgtatgggcatagtttttcaaagaaatacatttcatattacaatgtaatatatacaattgctagattatacccacaggaatagttatgaaatctgatttaatgtgtttgcatcttttttacacatttttcctgttgacctcaatatatctttgaattcaacattaattgaggttgtttgtggctatggaatcttcaccttggagtcagaaagtttgtcttattaactgattgtaccatttacaagctatattatctcatgtagaataatctttccatatattagtttatctatatgtaaagtgactatattttagggttgttgagagtattaatggtaaattgtagctatatctattagaaatgatttaaataggccaggtgcagtggttcatgcctgtaatccgagggaggcctccttagagaggctgaggcaggaggatcacgaggtcaagagatagggaccatcctggccaacatggtgaaatcatttctctactaaaactacaaaaattagctgggcgtggtggcatgcacctgtagtcccggctactcaggaagctgaggcaggtgaattgcttgaacccgggaggcagaggttgcagtaagccgtgatcacgccacggcactccagcctggcaacagagcgagactctgtttcaaaaaaaaaaaaaaagatttaaataataacttggaaaatgatgcacatgtaaaaattccaagcatatacttccaaaagagcaagcttggattgtctaactcaaaaaaattgacatgagccacaaaaactcacctcctagggccctaagaaaacatacggtattggatacctaaaaaatccaaacctcaccatgcagagttccacaaaattgacagatgtgcattaatatataattttaaactttgccttagaaatatgcaatgtactaattacaaaatcatacacactcctcaattctcagagtattgtaaaatctttggaaaagtaaaatttactggatttgtttttatatactttattaatatataaattaatttatgtacatatgaattctttcattaattatttcactcatgtactccaaaagaaattataaactaattgcagaggataagacatagctggtgacgtctagagaagcagttctgtgttgcagaatagaaaaaagtttttctctgtagccataatgagctggagaggagctgaatcccaggtcagtgattaactagctatataaatttggcacatgatttaatctttctaatctcaatttccttctgtgtgaagttgagataatatttcttatctttctgggttatttgtcaaatggcaagcaatatttgtaaagttcctgattcataataaaagatcttcaaatagtaactcttgtttggatttccttacctaaatcctttatctgagccctttccagcattctatttttcagcaagatatgtaaatggcttaagaaaattggctcatacattagatatttttaaatcaagttttcctgtgtatcctgtgacttaatcttctagatctatcttatatatcatcattgagaatgaaatatataagaatagattatcaaaactacagaattgtttttatattattgaaatttaaaatatttgggtaattctctatgctagtaaaaaattaataatataaatcttccatcatatcccactgctgcttgagctcttttacaaaaagtttttgaaggagataaggtgatattattaataccaccttgcagaagaaaagaaattgggacccttaacaggtaaaaggatttaatctaagttacataatcagtactggatgtgctgacaagacatctcagcctctggcattcttcacatgttatataaatggcatagtattgggtctctaacttttaaatttaccaatagcataattttgtgtatatatgaagttaaagaatttgttttgaaacaaattactggtgttactgtgattgcagagttgctactttttaatcatatatagctccattacataaccaaatgttcaggaaatatttgtaaaactaaaaaaaaattcttactctgtatattaatagaaatgaatatgagattatatgaatgtgacattaaagattgaaggaatgtcctataagccaaaagctttttgagaaatactcaccatttgcctggaaattgaataatgtcacactaaagacaaagctggattgtgtccccttggcattaactatatggcgttaatggcagatagcatgtgaaaatgtgagcagacagttatcataagggatataaaaatataagaagaagctagatttaaataacatttctcaagaaaaatatagccacgattaaaatatagcttttttatygtatgatttttaagatttctcaagtttaaagacacagaaatacaatttaaatgatctcagggaaaaaagtaatttattggaaggattctaggtcatgttatggaaaccaaaccagaaaaaagagagggctatatttgtaccccagggacactrgatctagtgayaggtagtgaacactagaactcacatgacatcargracttgggctttcatctctgctgcttcttgaatgctcacattgtttttcccttccttttcaaactttctcaacttagcagtaaagttgactacaagcagttttaaagttgtacacctttcaatttaacctccaaagagaaaacattactaactgctgctatctctggttccaagtccaaaaactgcagagaaggkaatcatttgttcagcttggatyrtgtgcccaaaactggacaaacarttgtggccagagaaatacagtcttgttagcaacatggagcattcatagacttatggactgttataactaggagacacattaaacatcacttttctaataattttgttttagakattaatgaactgtgacaacaaatgttcagagacttgaccaagtgacaaaacttgaatttgaataagtatctagtgtttttgtaatgcttaaagttattaaaaggaaaataaaaataaatgaagtaggaagagaaggaaatgaagtagaagaaagaagaaggaggaagagagggagaaggaaaaagaaggaaagaaggaaggaaggttgaaatggagaaagaaagtaaaagggaaagaaaggaagtaaaaaacagaaacaaaaaggggcagctcctactgtaattttattgatggagtgagtgggagaagaggttatattataaagtggctggaaaacaatgccatacttgcccattatagtctatgaaccatgacttacgtagtatatatagcaagtagaataaatcaatgattatatttggmttaaattgtcagattattttactcaatttctctcattttgcaatagatgtgctttcccattttgatttttcactcatcttcccttttatctacagatctgtaggctgtttcttataaaacagattcctgggtgaaaaaatttcttggcatcatcacacaaaaaaataattatttggttctgcctagtttaaaatatcagtgtaaaattaaacacttactacaatgtacctccatttcttaataggcactaagcttcattagaaatgtaaattgagcttttacaagcaatatcttttttttttttttagatggagttctgctcttgctgctcagtcgggagtgcaaaggcacaatcttggctcactgcaacctctgactcctgggtttaagcaattctcctgcctcagcctccagagtagtggggattacaggcacgtgccaccacggttggctaatctttgtatttttagtagagacggggttttaccatgttggtcaggctggtcccaaactcctgaccttaagtgatcatccacctctgcctcccaaagtgctgggattatgggcgtgagccaccgcgcctggcctcactagcaatatctttaatgacgccttggtatactaggtaactacataaattattaaaacacagccataggaaaatgtgtctgtcttcatccagattcatctctaaatgtatgaatgtttgagatagcactattgatgtattgtagtattttctttggggctatctgagtaaagtgaataatttgtttaacaatgttgactatttgcctactaagtgccacgcaggtacttagaagtggaacagaaaataagataattcttagagatctagtccagttgagagaaaaagccttgtaaaaggtcattatagacttctggtaatggcaaactgaatattttgaaccagacttcctgaagagcataacaaagagctaaacaaaatatatgaatcattttccttatgtcatcttataactaataaagtaggaaataattatggcttcaatacctggaagaaaccagaaatctagagagaagagcctgctttttggaatccttctgctctgtaggcattggcagcccagaataggtatccgacagattgggcagtactttgggaagattcctgggtccatggaaaattgccttggaaataaatgtcaccaaatagtgtggctctggtaaatcccttgwgaatgggttggaatcagacaagcgtactctaggtctgttacaggtagttagacaggcatgagcatggcaggagagggctgttcacccctacccactagcaatgtcaagtgatggtttgacaattatcacactgcctctctaaaaatgataatttggcagcctgtgccagggcatcagggagagacaacctccttaccatccaaagctattaacattaaagtgttaaaattatgcagcagccaggaagaagcaacttcccaggcatatgcattaagaggcaaaatatcagagtatgaccttctggggcgactccaccggaaaagggaaggaatcctcagatgggcatgtgtaccacttcctaaagacagtgcacgtgctcacttcccaagcgtaaagagggcactgcgcatgagggcagctccccctaagggaagaatcacaaaaaggggcataagatgccagcctacaaagtcctaggatgacagctgaatgcgacacttgttcttcaagtcgcccacttggatctcttccaagtgatctttcctttttttcctgttctaaagcctttttaataaacttccactcctgctctgaaacttcctctttttctgccttatgcccctaaattgaattctttcttctgaggaggtaagaattcaggttgctgcagacccgtacagattcgcagctggtaactcagatatctgccaccagtaacaggtctaagagtgcatcagaagcaaaacagctattaaaagtttgagtcatgtgggcgatctcggctcactgcaagctccgcctcccgggtttgcaccactctcctgcctcagcctcctgagtagcagagactacaggcgtccgccaccacgcctggctaattttttgtactttttttagtagagacagggtttcactgtgttagctaggatggtctcgatctcctgagcttgtgatctgctgcctcagcctcccaaagtgctgggattacaggcatgagccaccatgcccagccaaaagcatcagttcttaaagttgggttaaagcaaaataaatgataaaatatgcaggtaaatttaaatgaataccgactgcaaaaaataataatatattgtctcaggggtcttataatatgtacataattaaaataaattttaaaatgcatatactttgaaggaaaaggtgttctgcagtgcttgcattgtctgggaagagagtatcaattaattctagtacatgtttctcaggaaaaccagtgaactatagtaaaagaggaataaatgctgagttaatttgggggaaaagagaaaagaattttaatatgaaagaaggcaagaaaagagattataaagtataagactacataagacaaatagaaaatgtagagcaagattgtagatttaaagccaaatactaaaaatatttaatgtaaataaagacagttgttatctgcctagacaaaaaacgaaactcgattttacactatttaagagatatatgtaaaaagaaaatacagaaaggttggaaagaaaaaagataagaaagaagatggggaaaaagacgggaaaaaagatgctcctgtagtcccagctacttgggaggttgaggcaggagaatggcgtgaacccgggaggtggagcttgcagtgagcctagattgtgccactgcactccagcctgggcgacagagtgagactccgtctcaaaaaaacagaaaaacaaaamaaacaaacaaacaaacaaaaaaacatataattctgcagaatgcacatcatttttattgtctcaagragaacttaatagcaattagccaaacactagtcataatgtatattcataaaattcaaaggactgaaatcatacagaatgtttcttgaccacaatttagttgagctagaggtcgatagcaaaaacgagccaaaataagaaaaaataaaattaaaactgaaaaatgctcatgtatatacagaaatcatttccaggtggattgcagatctgaatatgaggttgtaaaccaaaaggtatttgagacaggtctcaatcaatttagaaagtttattttgccaaggttaaggacatggcccctgacagagcctcaggaggtcctgaagacatgtgcccaaggtggtcagggttcaagtgtgcttttatacattttarggagacatgagacatcaattaatatgtgtaacattgccttargtacagtaaatcaggactacttgaggggggcggaggcaaaagactgtattcttttgagtccttgatcagccttccactgaatacaccaatacacaatttggtctggctcagtgaatctacatttttacataaacaatgcagtggagaaagcaatcagacatgcatttgtctcaggtgagcctcagagggatgactttgarttccgtctgtcctttgtccacaaggaaattccctgtgggggaggtatgtagctttttatctttgtagctaccttatttaggaatacaatggraggcaggtttgggtgacatagttcccagcttgaattttcccttggcttagtaatttgggggtcctgaggtttatttttttttttttcacaaaagtaaacaatgcatgttttacaaagaaaacataacaaaacatcttattgctcttagagtaggcagtaattttgcttatttaaaaaggtatagcctgggtgcggtagctcacgcctgtaatcccagcactttgggaggcccaggcgggcagatcacgaggtcaggagtttgaggccagcctggccaatgtggtgaaatgccgtctctactacaaatacaaaaaccagccaggcatggtggtgtgcgcctgtagtcccagttactcrggaagctgaggcagaagaatcacttgaacccaggaggcggaggttggagtgagtcgacatcatgccactgcactccagccaagtaagactccgtctcgaaaaaaaaaaaagtataaatcagagaagaaaaaataataaatcagactattttaaaatgtagaactactgtttatcaaaaatatgccatcaagagagtaaaaatgctgccaataaagtgggaaaatatccaattayttagatcaagagcacgtaagaaatgatgcttaacatccttagtcactgtggaaatgtaaattaaagccactatgccagaatggctaaactgaatactcttcagaaatgagaataaacaatgtacagttacaagtaaaaatatggattaatttcatgaacrtaactgagcaaaagaagttacattaaaaagtatacatattctatgattaaattgcataaagtataaaattaagtgaacctaatctatggttttggaggtcaagatagagattaattctccttcccatagggtgtggcatgttgacaagataaagtattgagccatacacaataaaccatactatttgtttgtttaattttgagatagggtcttgctgtctttcccaggctgcagtgcaatggcataatcatggctcactgcaggaccaacctcctaggctccagtgatcctccacttcagcctcctctctgcaactacaggtatgcaccaccacacctgatgaatttcttgtctttcatagagacaaggtctccctatgttgcccagggtggccttgaactctggggtcaagtgatcctttcaccttagcctctcaaagtgttgggattagtcataagccacagtatttggccttttaaaaatacatacatatatwttgaaaatcacttttttttctttccaactttttttaggttcgaggggtacatatacaggtttgttacatgggtaaattgcatgttgcaggggtttcttacacagattatttcatcacccaggtaataaacacagtacctgagaggtggtttttcacacctcactctccttcaaccctccaccctcaagtaggccctagtgtccattatttataaccatgtatactcaatatttagctcccacttataagtgagaacatgtggtgtttggttttcttttcttgcattaactaatttaggataatggcctccaattccacatgtgttgctgcaaaggacatgacttcgttcttttttatgactgcgtaatattccatggtacatgtctaccacatttcctttatccagttcagcactgatgagtgtctaccttgattccacatctttgctattgtgctttaataaacatatgcattaatgtgtctttctggcagaacagttatattcttttttcttttttttttttttttgagacagagtctcgctctgtcgcccatgctggagtgcagtggcatgatcttggctcgctgcaagctccgcctcccaggttcgtgccattctcctgcctcagcctcccgagtagctggaattacaggcgcccgccaccacgcctggctgattttttgtatttttaatagaggcgggtttcaccatgttagccaagatggtctcgatctcctgaccttgtgatccgcccgcctcagcctcccaaagtactgggattacaggtgtgagccactgcacccggccagaacatttgtatcttttagatatatacccagaaatggaattcctgggatgaccgataattccattttaagttctttgagaaatctccaaactgctttcctcaggggctgaactaatttacattcctgctagcagtgtataagcattccattttctccttaatctcatcagcatcaactttttaataagctattctaactggtatgagatagtatctcattgtggttctgatttgcmtttctctaatgattagtgatgttgagcattttttcatatgcttgttggctgagtgtatatcttttcttgagaaacgcctattcatatcctttgcccatttttttaatagggttattttggttttgtttgtttgtttaagttccttatagattctggatattagacctctgtcagatgcatagtttgcaaatattttttctttcaatttaggtttctttcaatttactctgtggatagcttcttctgctgtgtataaattctttaattagatcctacttgtccatttttgttttttttttttcaattttggaatctttgtcatgaaatctttgacaggacctatgtccagaatgtttattcctaggtgttattctagggttttatagttaaaagttttacatttaagtctttagccctcaagatgagttacattttacatttttcatttaactcattaagtctttaacccatcctgacttttgtttatagtaaagagaaggggtccagcttcaatcctctgcatatrgctagccagttacccagcaccattcattaaatagggagtccatttaccattgcttgtttttgttaactttgtcaaaagttgtttgttgtaggtgtgtgaccttattcctgggttctctatcctgttgcattggtctatgtgtctgtttttatacttgtaccatgctgctttggttactgttgccttgtagtagagtgtgatgcctctggcttagttctttttgcttaggattgttttggctattcagactatattttggttccctataaattttggaatatatttttctaattctgtggaaaatgtttttgatagtttgataggaacagcattgtatctataaattgctttgggcagtatgaccatttgaacaatattgattcttcctacagatgaccatggattatttttccatgtttgcttaatctctgattactttcaatagtgtttcataattcttattgtagagatctttcccttctctggttagctgtcttcctaggtatttttgtatgtgtgtggctattgtggatgggattgtgttttaatttgcctctcagcttggatgttgttggtaaattgtgtttatttcgatcttcagttttctttattactccaacttgtggtctatcaatcttattctttcaaagaacccactttttgtttcgttaatctattgtatttattttaatctcaatttcattcagttcagctcggattttagtatttcttttcttctgctagytttccggttgatttgctgtaagttgggttcagctgagtggctttgtttctggatgatttcacggggggccaggctcagctgagcactcttgagctgcatgctctatccataaggtgtggtgtccaggcccataacttcgttctctgtccccgtgaggttaagcagctgctgtgctggaggtgctagagatgttcccagtccacaagcaccagtactctgataaggggtgctggaaaaagcacttcatcaggatagtggcatcagggtccacacatgcacacacactgacaacagtgtgatggcagtgtgatggagtctgtgtacacatgctcatgctagtgatggtggagtggctgggtctccatgcacataggcaccagcaggggctgggttatggtggtgagttccacatgcatgcatctgtggtactgggtgatatgttttggctgtgtccccacccaaatctcatattgaattrtaatccccactggttgggggagggacctcatgggaggtgattagatcatgggartggttcccccatgctgttcttgtgatagtgagtgagttctcatgagatctgatggttttataagaggcttcccccttccctctgcactcattctctcttctgccaccatgtgaagaaagatatgtttgcttcttcttccatcatgattgtaagtttcctgaggcctccccagccattcaaaactgtgagtcaactaaacctcttttctttataatttacccagtctcaggtatgtccttatagtagcgtgagaatgaacgaatagactggggttgtgagaggttcacagagtgcacaccatagcatagtagtaggaagaggccataggcaggtgcttgggggcaaagcagtggtaggaggctgctggcaggtgcatgtcatccgggcctgtctgctaaagctctccgatggttaggtagagtccacaccaagtagctatggtggcagctgctgcaaaatgcctctgttggggatctcaggctgcagtgcaaatgggtrtggccggggaggtgccccagagaaggaccagcaaacaggggtgtgttcagatcagactggccccgtcccatggaccagatagctctgctctgttcaggtctgatagtcaacaaaggccaaagccacctaggggagtgtggtaagccttggaggatgtgcatccctggctatgctctactgtagtcatgctgtgccaacaccccccagttcccagccccaaaggctgacacttctccaagcagctctccatgccagctcggatgtatatggaggtcacggggattcctacggttaatactctagaggtccatggtaagtccatgggccacttctcacctatttaactcactccttccaaggagtcactgggggctgggaacaagtcctggtgcttggcagtctcatgcagggttcccagcttcctcccccttcagcccagtgtctgcatgctccctttttccactcttaatgatttccttctaaagatctccttagagtatactggacttcatgatggtctgttttcaccatgggagatgcttttccttgctgtttctagctagccatcttggctcctctcgcttttttgcatgtgtatttttatgtatatgtcttctacagagaaagcaccaaatttagatgacttcactgataagtcctaccaaatattyaagaaagaaatcctaaactaataaatcctaccaaatattcaagagaactattatataaaacctcctagagaatagaaaaacttagaaatattttcaatttattttataagagcagcataaacataatgctaaaagcaaacaagtatattatgtggaaagaaagtattaataggctgggcatggtggctcacacctgtaatcccagcactttgggaggcaaagggsggggagcacaaggtcaggagatcaagaccatcctggccaacatggtgaaacccagtctctactaaaaaatacaraaaattagctgggcgttgtggctggcgcctgtagtcccagctactcaggaggctgaggcaggagaatggcgtgaacccggtaggcagagcttgcagtgagccgagattgcaccactacactccagcctaggcgacagagcgcaactctgtctcaaaaaaaaaaaaaaaaagaaaaaaagaattagtaataagttaatttcatttatatacagagatgcagctgtcttaaatcattagtgcasaaatccagcaatacataaaaagtacagtattatcacaaccatgcaagatctattccagaagtggaaggttggcttaataatgaaaaatcaattaatgtaatttacttttatattaaagcagaaaaaatcatgtrcagaaaaggctattgataataaaaatcaaaagctagtgataaaatgcaataatcatttatggtacagtatttagcaaagtaggaatagatgaaatttttctttttttttttattatactttaagttttagggtacatgcgcacattgtgcaggttagttacatatgtatacatgtgccatgctggtgcaaaaatttttcttatctaatagaaggattttgcaaaaacttgtagcaaatgttattatgaattgttaaaatattatccaatgagattagaaattagaaaaaaagttcctaatattatttccctttcaaattatactgtacattcttgtcaaaacaggaaggcaagaggaaaaaagttataaggttgaaagaaagcaataaaatgctcattagctgcaaaatacatgattatgtatctataatatccaatgaatgtacagatgagttatctggattattaagaagtttagcaaggatgttggtgcaaggtaatacatcaaaactttatgtataaaccagtggtaaacaattgaaagtaaaatttaaaacataatattataatattattgatatatcatatatcaaaaaatagtcctgcaagaatcttaacagaggaaactgtaaatcattattgagaaatcttttatacatgttcatagttaaggaagagttaaataaagagaagagaatatatgttcatgaataggaagactcaatattttaagatgtaaattctcctcaaattgagctatatgttcactggctaaatcccagtcaaaatcccagcaggtatttttagatatcagtaagcagacttttaagttatcctgcttttatttcagaatatggccaagaaaactgagggaaaaattttcacttcacacaactgagccaagttacaggatatttccatgactggatcttccaagttccagaacagaaatattaagctgcaattgtaagatctggttctagatgagtggctattaatgctggttgaagaatctgcaaaactgctacaaagggaagaatgagcccactatgcacattgggatgggaaactattaaaaaaaaaacaaaaaacaaacaacaacaacaacaacaaaaaactcctccaaaattagaaaaccaaaattcccatttccctgaagaaatgtaatgttgatcttttggcaagtgtgtcaagttctgtgttgcaaacaaacaagctccaccttatttttatgaaaaggctacccagttacccactttgtcactactcttagattcaaggttcatgatgtggtttggatttgtgtccctgcccaaatctcatgtttaattataatctcccatgttgaaggaggggcctgctaggagctgattgaaccctggggccgaattttcccccttgctgttcttgtgatagtgcatgagatgggaagacagtatctgagtgtttaaaaatgtatagcaccttcccctttgctctcttcctcctgctcctgtcatgtaagacatgcctgctttcacttcacccctccatcgtgattgtaattttcctgaggcctccccagccacgctccttgtatagcctgcagaactgcaagccaatcaaaccccttttctttataaattacccagtttcaggtagttctttatagcattgtgagaatggactaatacagttcaggatttgcaatttaaggaaacatgcggtgcattctatcatattctctattattagtagatcttttataatacggtacatttcaaatgtgttcctccccaaccacaaagccatttatttatctaaacggccttgccatgtcaaaggcaaggctactgttcagtaaacccctctaaatcagaatgtcattagaagaaatttaaattatatgtaaaggaataaaagctgaaaattgaagrcttttgttttgaaaagttgaacttacaaatttgcaagtgtcattttctgtatttccgaaatactgtaaaatttatttatcataaagtttaatattagaaataaaagcttattactaaaaaaagtaatgttaagaaagacaaataatatagcaaacactcaaaattgtaatttcactcatataaattcattttctacaataatcagaggaaaattaaaattacatgttcaaaatttggaggtgaaagcagggatcaactgtctattaaagttactaaatttgtcataaaaaatttaaagactctggaagatttggtttcatttaatgagttcagggaattaaaaaaacatgtttttctgtatttttttgcaagttcttgtcagaaagcatttggaaaggcaaaaatatatagcagagagatcaaatacggttggagttgagattcagaggcagagataagtgatatggttggagtatatcaatctcccaaggagccacttcccaggttcggaatgtagaaaccaagccagaagtaagagtggcataaaatcatctccctaccacctgcaaactacctctcycatctatctaaacagtggaaatttctggtaatttaacaaaaagtatttatgagttgttaacaaagatatgaaaagctaaaccattgtttcaggtaccatgcaaattgacaatgaagtgttgaaaatgaaacatagggcctcttttcygaatattattatgtattagtccattctcacactgctacaaagatactacctgagacttggtaatttataaacaaaagaggttaaattgacttacagttctgcatggctggagaggcctcaggaaacttacaatcatggcagaaggtgaaggggaagcaggcacctttttcacaaggcagcaggagagacagaaagagcgtgagcggaggggaagtgcccactttcaaaccatcagatctcatgagaactcactcactatcaggagaacagcatgggggaaaatcccctcaataatccaattacctcccaccaggtccctccctcaacatgtggggattacaattcaagataagatttggttggagacacagagccaaatggtatcatatgatctaattgttagacagaatcataaatacacaaagcataggtgaaaagtctcataatagcattaacaccataaaattatgaaagaaggaggagcccattcttcaaggaatgtcaggaacagtttcagaaaagaatctttgagctaggtcttgacagatgacaaatacatagtctcatatggttaactcttgagccttatgaggatgaaaaaccagtatcagaaataaagaccaagttttgatttatcttatgtgccatgttaagtactttaggctgaaggcagtaggaataaatcagctgatttttaaacaggagagagagatacgggcaggttacttatatcggaatcagtgggtgggatagattggataaaaggggcggggaggagaagaaggggcagagaagggaagggagaggagaggataaaccatagttttattatctaacaaaaagcttccagggaatttaggcagacgatagtttttcttaaggctcctttttttcattgactcctttctaattcccccaagtctcaattctgttttctcatttttaatttctatatctcatgtgaacttacatctgcattgatatgattttcattagatattataaagaagaatatttataattaatctaatgttaggaatatttagcatgcaacaagtgaatataggtgcttactaattaatgccttggattacagtgtcctaatgcctggaggtttttggaagtaactctgatctcagtaacacttaccctattgctgtttatctaacaaaacaggcattgcctcagctcacagcatttgtacttgctgttccctttccctgggatgtactttcctcaaacatctacagggcatattcatgtatgatctctgaaatcaccttgcttctgactgcagtatataacatagcaaaggccgctgctcaatttcccaccacctccaattctgtttttccaattctgctccccttttttccacagtatttattgccatctgacattctatggatttgcttgtttgcggccagcctcccccacgagaaaggaagcwcctcaagagcaagaattttgttttgttcactgttgtatgtccccggcaccaacaacagtgtctggcacagtgtagatgcctaggtgatatttgttgaatgaattagtaaataatattcctataaaatgtggtgaaaagaattccacatgaggaaattaaagtctagagaaatacaacaacttgctgaatataacttaacattagcaattattatcactgtcattttagtactatttttacaaacctatgctttgacatataaattagctccagtcatcacagcagcgctgtaagatagatgttgcagacagttgtatagattgttcaaggtcagctagctaatggatagaagaataattttctgaccaaatggtgatttgttatatttggatggaatctatgtttcctagcaatttacctgctgggttgcacttcatctgccttatatcccttagctttcttccaccttctgcttacatattgaagaattacaggcttatcattatatatttgcctactgattaaatgtattgtaatcctttatggaattaccataagagatactatggataggctagaacaaactttgaaagagaggtggtgtattcgtttcctagagctgctgtgttagggttcttcagggagatagaactgataggatatatatatatatatatatatatatatatatatatgtatgatatatgtgtatgtgtgtgtgtatgtatatatatatatatatatatatagagagagagagagagagagagagagagagagagacgagatgagatgggaattttttaggggaattagctcccatgacaggctttctgcaacctgaaaacactgaaatgctgatagcatcgcttagtccaactctgaaaacctcagaacmaggtaaacaaatggtgtaactcaatctgaggctaaaggcctgagaactcagggagttgctggtgtaagttctggagtccaaaggccagagagcttagagttctgatgtccaaaggcaggagaagaagggtgtcccagctccagaagagagagagaaagaaggagagcaaatttgcctttcttctcgctttttgttctacctgggtccacagccatttggatgttaaccacacacattgagggcagatctttccccattcagtcaaccaactcacaattcatgaaccaatctcctcagaaacaccctcacagacatacctcatggaaataatgctttatcagttctctaagtactccttaatccagtcaagttgacatctaaaattaaccatcacaattgctgtcacaaaataccacaaaactacagacataaaactcacgtaaaactacagaatttttgtttgtttcacagttctgggggctaaaaaatcaaaggtgccagaatcaaaggcccaaaatcaagatattgggagggccatgctccctgtgaaacctgtaggagaaaatcttccttgtctcytcctagcttctgacggaggtcattgatccttggcattccttgggttacaaatgcatcgctccaatctctgtctctgtcatcacatggcattctccctgtgtgtttttatcttcatgtgttcatcttttatgtacgtgtgtgtgtgtgtctgtgtccaaatttctcttttcttatgaagacaacagtcatactggatttgagcaatccctaactgacctcatcttaactcgattatacctgcaaagacccaacttccaaatgaggtcrcattcatagatgccagggtataggacttcaacatatatttctgcaggacacaatgcaacccatagcagatggagagcatcagcatgatgggattgctaataatgggtttaacgtatcaagctttttctcaattcagagacttctcatgtattgtctcctctgtctgcattacttttctgcccactctttgctcaagttctggtrttgtactggagccatctcacaccagctcctgagggtcaattgttaaattatcagaagccagttgccaaacacagcaattattaaaaattaaatatataaacataattaattacatttaaagcaatggtaatacattctaaaaactcatccatttctagctattttgctacatttgattattatctatctatactctttagattatttgcatctattatatttacatagcagaaatataaaatacttgtattcatatgtctccctaaatmcatattcagtgacctcaccttggtagtttgaaattggccacagagtggatatatttataatacagaaatcagctaccagtacaaatcaggtctttttttatccttggaaaagcagctgttaaatatttaccagatatactggttaattctcgtacttcctttaggcctcatcttcatctcctcagaccagctttccatagcatccatttaaaatagactccttcctctcattattctctttctgaattcctttttctattcttcttgaaactcttttttgtaattgtgcagttatacatgcatttattgaatatctgtttttctcactaaattaagtttcttgagagcaggacccatgatttttttatttctgcttatttctagcacagaaatacagcatttagcatatgacaggcacttaataaatatttgttaaatatttatgatgcatttgaggatcaaatggaaaatcaaaattatgagatagtatgttaagtttggtgatcaggcaaagttaaagcatggccaaaaggcactgagtttccagttacctgctaagatgtgtaattaaatttaggtgaaaattgagagtgttaattccttggtatctatttttcctgcctctttgcacttatgatttgtgatggtaaacattaataatcagatgcatgggacaactgaagtaaagagagatgtgtatggcrtatacccagtgagaggttcctagaaygtagtaaatttrttctrataaaagaatctgwcaattgaagaaaggaatgcaaactggcctatggcatagttaccgacttaccatttgtgccaacgaatccttgggtgacctcactgtaaggagctacatgagataaagatgggctcaatgtagaaatgaaaataataaatgccttcaatgggaggataggtcaacatatttgaagtattctggggtactactaagcctgggaaataatctagggacagaagaggtgggcactagtcttggcttccaggctttaattaaacacctatatatgggcagcatcagctgtagttaggaagcagttcattccatccagagacttggttaccgaaggcccagacttatcaagcatggccaaatggtaagagtaagagtcttgaaagtagacatactgagatattaaaattaactcttagtttattaaatgactttcagtaatgtaattaatctttctgcagttggtttctttatgtcttaaattggggtaacagtacaaacatgttggagaaaggagaccaccactaaagtttaaggaagttttgcatgaattagtaaagggcatcgactctgagctaatgcagtccctctagctaatggcttggcaagaaaatgactcttttgcataagtaaaaagatagtttcttgtttctggtgctcatactcagggtacaagactactggcctccaaatgcaggaagcaagagatctgtacaatcattctgggtcctggggctgaggtaaagattaaacaagatcttatattaaaacactgagctgtatttgaaaacttaaccctgtcacaaatgtcagtttccttcccaaaaatctctcctccttttcttctctttcctgtctccctgacaccactatcaagttggatttccttgcccttggagacaagttagttcaactttaattttctacaagtatctttgtttcagaccctgaatagataacagagagtcatttaccctgttctcattgctctaccccatgtaacccccatcccatgtaattaatcgtaaagtatattttgttttatgaggtatcctgagtaagtgctaatggagactaagtttagggagcatgaaatactgctacctttctccatgtgccaataaacctgctcagtctcagctgtaaaaaaacaaacaagtaaaacctgtttttctcttgttccttaaattatgtcagtacctggcagttgtttatgtttaaaaagtcaacagaaggcagtcaagggaccaggaacatgataagtgtttaaagggtgtgatttactactcagcagtgtgccagtgatgtggcatgaattaaaaacaagaagtcttccaggagaaaagatttctttagagatgtaattaattgacctggcttgggtccctcctttcccggaggaaaaacttctccttttccggagtagttgtcagtgaagtgtttcaaatactgccctggttgtaattattrttcaagttcatgctgcaaaatcatcttcacttaataattctagcattcaccacccaaaaactcataarcaaggcttttgtattgccacacagtttggrattttttttctcagaattaggaagcaaatgtagccagcaattattttagatattgctttcagaaatgaatttttcccatatctgtcagatttggctcagagttctttttcaatttaatcattgttagcagcatgaaaaactgttaagttaaatgttcaggcataagcaagtcattactccatatttgaactctagagagctactggttgtcatggtaatatgactgcacgtgtgaagttagcattggcaacatcacattttcattaaaacatcatgcatatttgcatgaacttytgcccagaccattgttgcaggattggctcctccaccccatctcataatggtgccaagagatttcatatttcagatccaaacttgttagagtttacagcattcattattcatccctcagagatagaagttgacctgtattcaaggcttaacatatatgaatagagagctcactatatatctctatggttaatcctactaattaccgttcccctgaattgaggtaaccctcccatttcttttagtgaatagttttaattactttctttgacttgcctcttcccaaattagggtatgtttcttcaaataactccccatggatttgtagtgttgctattactcctgaagatgtaggtttccccctcccctcccctcccttcccctcccttccccttgatggagtttcaccctttcacccaggctggaatgaagtggtgtgatctcagttcactgcaatctctgcctcccaggttcaagccattctcctgcctaagcctcctgagtagctgagattacaggcacatgccaccatgcccagctaatttttgtatttttagtagagatgaggtttcgccatgttggccaggctggtctcgaactcctgagttcaggtaatccactcgccttgtgctagaattttttttctccttatgccttcttcccagaacctctattatgtttcctttggtttagggctgtgattatacttatttgcccatatgatcatttatttattcaattaataaatatttattatggtttactatgttgtagggtagatgttagatcccaagtaagccagggcaacaattagttgattagagatgtaagctcttgctgtctaccctgttcttggccaaattgtctgtatttcaatgcagcagatatcttcacaaaggtttttttagcacacaaactgtttgttaagtcctataaattagcaaacaatgctagtttactttttgtttccatgtcattgtttaaacattcttttgttgagctaaaggtttgaatgaataaaccaacaatgaggaagtgccagaacagttcctgtatataccctgcatatatttatttgcagattttactagctattaaatatcatataatacatatcggctctctcctttctctgcttacacatacatggttcctgattgatcaataatttaagtgttgcatttggagattactataggagtttcaaatggtgtccatggtacttctgtttgtgcctctgttcatattgctccttacacttagcctgcctttcccgtcccaaattcccactgaagacctggagaaggcctcatctttcaaaattcaattcaagtatcatttcgtttatgaagtgttatataacaataagaggataaattaataacaggataaataaagaataagaaagcacactaaaaactcttttttttttkaaacaaattcttactctgttgtccaggtagagtgtagtggtgcaatcatggttcattgcagcctcaacatcccgggttcaagtgatcttcctgctttggcctgccaataactgagactataggtgttcactaccacacctgtctaatttttgtgtgtgtgtgtggagatgaggtcttgccatgttgcctaggctggtcctcaaattcctrggctcaagcaatcctcctgccttggccttccaaagtgttaggatttacaatccagagtcactgctcccagactaaaagcatttttttttttaacaactctggaagtgaattccagcagaaccagcaaaragaatggaattaattacctctggggaaagtgcctaagggtaaggagaactggggcaggaaactattataagtcttgtaccactattaagcttctaaaatcatgtacatgccattttaatttttaaaaagataaatttttaaaactctatatgcttacattaaaagtatactagttattctgtagtatttctcatcaaattattttaatttggatttttttttcactaaatttaaatggacagcagacccagatgaataataaagcataaagtttgatttcagtaaattgataacttgataactttgatcatttgtgtatttatgccttctaattacagccctctaaaaatacatcagattggtttttaaaaatgtaatctgtaaaagcctttctaccgattgctaactaaatgtcaacatctaccatgtactcttaggaatcattaagaatacaactgagggtcatagatttagaaagatatttaatccaccctaaagatgagatacygaattaggtaatatctagaagtctcttgcatgcctccttccaagatatttataactayaccygaatatctatttagawacagatatctaaaattctggggattgttggatctagrcaagttgcttttaaatgaattatgtgaaaataaaagatctcagaatatctgggaatcttcagtaagagaagaataatgagaaagaatagcattctaaaatattaaagcatattatgcagctgaaatttaaaaaatattattggtttatcaatgaatttgatagagctaggatggaatataaaactcaaaaatacatatgtgaaggtagtttatgataaatgyggaatttcagatcatggtgaaaagaatttttcaatagtggtaggaccacagttttacagccatttagaaaaataaataaaatgcaattttaaaamgctagatccatgytttatgaaaataagagattcccctcccccccttttattttgagcatttactttagaaaacttgtaattatacatacttgatactatttctgaaaaaaaaaatacatccttttgaaacctaggaaagacttttttcagcttaatcatccaggaatatctttctcaaggacctggaagctgtctctttgaaatgtaaacatcaaaggagttagtaccctgcctgccagtttccgtgagcggataggagtctaacttgggtaggcacttccctccaagtggcaaaactacctcttgtcattaaaaaaaaaaaaaaaagatgtttgtttctcttctaagtaaagccaattccagttagctaaaataaatggtcaccccagttatctggtaaagataaaatggtgctgtcaagccctcttactcgaagactagttattatttatcttgataatatgtgtgtaatgggctgtatctgcttggctatataaaatttctttctgtctttgcaatctctttgtggattgcctgtgatatgctcacattctagattaattcttattcaataatgaatttttttttgtctctctactacttttataggaaagatttctagattgagagattattttatcaccaatattgctaatgcagatttcctctgctgtaaatagcctttgtattagtttgttttcacactgctataaagaatacctgaaactgggtaatttataaagaaaagaggtttaattgactcacagttccacatggctgggaaggcctcaggaaacttacrataatagcagaaggggaagcaagacagcaggagagagagtgaggcaggggaaactgccagaaacttatcaaacaaccagatcctgtgagaaatcactcaccatcatgagaatggcatggggaaactgtccccacgatccaatcacctcccaccaggacaacccctaccctgcccttgacatgtagggattacaatttggattacagctggagatgagatttgggtggggacacagccaaaccatatcagccctgtttttatattggttctcttgtctgtgttggaattctgactaggaccctgtgtggggtaaaacactgtgggatagagatggggcaggttaactagcctggttttctctggggtgagtggcaggaggtatctttcagctgggattaaaaccaagcacattgcttcaagaatttcttactgcttgacttgaatgaaaatgttattactgatgataattttggggcataatctcatgcctaactggtattggaataatagtaagatgtgtaataaacacatgtgagtcttgagaattccgctctgattttgactcacagtaagttacttgataaagtttgtcctacagtctcactacttctcagcaaamttcttactgtgtgatcagatactaaatttctttcagtttattcccagtaaatctgatggaatgtctagattctgcagactttgatcyaaagactgaactaaatccaatgaactcaagagaacaacttttaagtagttattaagctgatattctgtgttcagacctgtgcctgggactgaaagaacataaataaatgtaactgaggaagtgttctttctctttgatctagatggtaacttacctaggggacaaatgggagtgggcagatctgaagaaaggaagaatctgttgtaatagtctaaatgtgaggcaatgaattataaggtttccataatagagatgaaaagagacagaaagataaactaccaaaagaattaaaggagcttgataagttcctctgmaaaggctaaattaaaatgagacgtaaatgatcaatgattgacacaagatagtacagcagataaaaatatggatttcggtgtctatgagaactgaattcaagtcccagatctgacattggaattcaacagttacatgattcttctcagtttcagtttccttttgtgtaaaatataacaaacagtacttccttcagaaatgtattataaagttagtgtttttaaaactacaggttatgcctttttcttgagaaattaactttrcagtttaatgaggaacagataacattttaataagaaagatctggaaaagaaaagtagaatgcgttactcatggtaaaaataagtatttttgtaacacttttttatagtgattgtatatatgtgtgtgagtgtgtgtgtgtaagagaatcattggattaaaaattaaaataaaaataatagctatttatgacaaatccacagccaatatcatactgaatgggcaaaagctggaagcattccttttgaaaatcatcacaagacaaggatgccctctcttaccacttctattcaacatagtattgaaagttctggccagggcaatcaggcaagagaaaaaaaaatggtattcaaacaggaagagaggaaatcaaattgtctctgtttgcagatracatgattgtatatttagaaaaccccatcatctcagccccaaaactccttaagctgataagcaacttcagcaaagtctcaggacacaaatcaatgtgcaaaaatcacaagcattcttatacaccaatgatagagagccaaatcatgtgtgaactcccattcacaattgctacaaagagaacaaaatacctaggaatccaacctacaagggatgtgaaggacctcttcaaggagaactacaaaccactgctcaaggaaataagagaggacacaaacaaatggaaaaacatttcatgctcatggataggaagaatcagtactgtgaaaatggccatactgcccaaagtaatttatagattcaatgctatccccatcaagctaccattgactttcttcacagaatgagaaaaaaactactttaaatttcatatggaatcaaaaaagagcccatatagccaagacaatcctaagcaaaaagaatgaagttggaggcatcacgctacctgtcttcaaactatactacaaggctataactaaactatactacaagtcaccaaaacagaatggtatgggtaccaaaacaaatatatagaccaatggaacagaaaggaggcctcagaaataacaccacacatctacaaccatctgatctttgacaaacctgacaccaacaagcaatggggaaaggattccctatttaataaatgactttgggaaaactggctagccatatgcagaaaactgaaactggagcccttctttataccttatacaaaaattaactcaagatggattaaatacataaacataagacctaaaaccataaaacctgtagaagagaacctaggcaataccatgggcatgggcaaagtcttcatgactaaaacaccaaaagcaatggcaacaaaagccaaaactgacaaatgggatctaattaaactaaagagcttctgcacagcaaaagaaactatcatcagagtgaacaggcaacccacagattgggagaaaaattttgcaatctctccatctgacaaagggttaatatacacagtctacaaagaacttaaacaaatttacaagaaaaaaacaaccccatcaaaaagtgagtgaaggatatgaacacacacttctcaaaagaagacatttatgtggccaagaaacatatgaaaaaaagctcatcatcactggtaattagggaagtgcacatcaaaaccacaatgagatagkatctcatgccagttagaataggtaccattatggcttacacctgtaatcccagcattatgggaagccagggttggcagatcacctgaggtcaggagttcaagaccaacctggccaacatggtgaaaacccatctctaataaaaatacataaattagctggacgtggtggctggtgcctgtaatcccagctactcgagaggctgaggcaggagaattgcttgaacccaggaggcagaggttgcagtgagccaagatcatgccactgcactacagcctgggcaacagagcaagactctgtctcaaaaaaaaaaaagactagctatcattaaaaaatcaggaaacaaccgatactggcgaggctgtggagaaatagggacacttttacactgttggtgggagtgtaaattagttccagcattgtgaaagatggtgtggcgattcctcaaggatctagaaaaagaaatatcatttgacccagcaatcccattaccgggcatatacccaaaggattataaatcattctactaaaaagacacatacacacatatgtttattgcagcactattcacaacagcaaagacttggaatgaatccaaatgcccatcaatgatagactggataaagaaaatgtggcacatatacaccatggaatactatgcagccgtaaaaaagaatgagttcatgagttcatgtcttttgcaggggcatggatgaagctggaaaccatcagtctctgcaaactaacccaggaacagaaaaccaaacactgcatgttctgactcataagtaggagttgaatagtgagaacacatagacacagggaggggaacatcacacactggggcctgtttggggatgtgggaaaaggggagggatagtattaagagaaatacctactgtagatgacgggttgatgggtgcagcaaaccaccatggcacatgtatacctatgtaacaaacctgcatgccctgcacatgtatcccagaacataaagtataataaawaaattaaaatgtacttattgttatggattgtctttaaacaagtttgaaaaagcagcactctataatacataaaaagtgttttatgtgatactaacacatttgaaggaaacaagacgtgtcacaaaaatcaagggaggagagcttcaaggatgggctgattaatgctgttaaatatagtagagaacaagggggataaaatctgagaaaaggttggttttaagaataattagcttatagaaaattaaacgtgaatttagtctgcaactattagtaataacacacagtgacattttttataatgctaaatgatagtaaataatctaaaaaatctagtgaaagaaagaaatatgcaagatgatttccacacaagaattacaataaataatgaaaagcagttctgggccttttggtttgctccctggaaggagataaaatagttaattaaagttttattgcttttgaaacattctccaatttaagaaaaggtttgagatttgttatatatggtgcttacatggaacacatgaaacctttatgagacttttttccctgtttgatagggaatgaaactttggttgaatttccagtgggatggggtgagtctggagataagctttatggtttctcctgctggtgtctccagatagcaaacacagcagcggcttccagtctgtggtgcaaasaaagaaatactattctctagtgcagataccatttcacctatctttttataaaataccagattttggtgaaggttcttaagatattcaaataattatctccaagtatctgctgggtggcatggcaggtgaaagcaaggagaattgagacaaatagatagacaggaagtcaaatatctcacttctttttaccccattagaggaaaggcctcamtgtctaggcctcattttgagggtcccagtacaccttcctcattctccaagtttctgatcccttctccataccctgcagtctttagatctttttttgctatcaaatgtccacatgtctcagtcagtctagattactacaacaaagtatcattgacttagtgtgttgtaaatgatagaaatttatttctcacagttctggaagtggcagtcccatcaggctgccagcattgctggcttctggtgagggttctcattcagtttgcagatgacyaacttctcatgtatcctcatgtggtcgaagcagagctagttagcattctggtcttttcctataaagacactaattccattaatgagggctcaactcttattacctaattactttccaaagacacctcctcctaaatgccatcgcactgggagtagggcttccacatatgaattttaagaagacacaaacgttcagtccattgcactgtatgttttcattttctctagatcagtcacttttttcctacaaaatttatacatatttagtcttcctccatctcatctagtatctcctaaaattatcaattttaattaaatttccaaggtttttcttttttctttttagttactgttgctctgcagaagagtggccatgtctctttgttcataactcctgtcatgtggggatagaatgtggtgagagggtccataaattattgggtctatgcataaagtgctctagggaaatactggggttctattgctgcatgatatagctatacgttcccagcgctgattctcaaccacagctatactttagaattacctgaaaagctttaaacaatacctatccttaaactcttctcaattaaagtagagcctctgagtttggatcctgaaaatcgtgtgtgttgtgtttatgagctgctcaattgattctactgtgtggccaagtttggcaaccactgtcccagacagtatttcttctcaatctttaatgttgtattaatcacttgaatatcatgttaaaatgcagattaaattcagtagatttagggtgagacatgaaattgtgatttctaataagcctctatgagaagtagatattgtagtttcagggactacactttgaagagcaaggtcctagaatatttaaaattaattatatctcaccagtttattgtcttctgaaatatgctctttcctactcaagcttcaagaaggagaaattattattccatgagtatattctagttttagatgctgacaaagagcatcttgccatgtccgaaaatttactgtacctcattaatctttgcttactgttgtttatcaagtaactgattcaattaactaaattaatggtatcaattgtccccccccatgtgattctatggcaatatatagggcatgagggactctgtatgttaattctacaagtaatttggtatagtcagtagtaggggtcatttggggaaaggatgagaggaaaggctgcagagagaaggacaagttcattaaatgacaataatgttgaacattcattgcacacttactgtttttcagacactttgttatgtgctttatatacattatttaatttaatccccacaccaagtctacaagaagaaaatacttattaaaatgacaaatgagcttagaaactgckatggtttgaacgtttcctccaaagtttgtgtgttggaaacaattcattatgcaactatgttgagagktgagaccttgaataggtgattagttcatgaggtctctgcccttgtaattgggtgaatgctgttatcatgggagtgggttagttggcacaggagtgggttccttacaaaaaaattacttccgcctctttcctctctcatgtgcatgctttgttgcctttctgccttctgccatgagatgttgcagcaagaagaccctcaccaggtgccagcgtctagacattggattttccagcctccagaactgtgagaaattatttttttctttataaactacccagtgcgtggtattatgttatagcaatgcaaaacagactaagacagaaaccataagaaactgaaaagtttatataaatggattcagatcacatagctaataagtggtaagagccaagcctctatctctctcctgagtcccagctcttatcctgcaacaagcttaaatgggaagtcaaagacagcttttaaacacaaaagaaagatgatccagcagcatgaaggatataggcagggtaagaatggaggcttagatcccacttaggattcctcctctaagaggctgaaatttcatargcttatcaatataatttaagaactggaaacatgtctttttttaattactatcaccaaacacagtgcctggaatatagtagttataaatagttattaagtgaataaatgattgctattataattatgcagaagagtaattttgagagcctgaactaaggcagtgacagtgggaacagtggttgaaatgaaataaagaactagttgaaaagaaattttcagtaggttaataactaatgttacttttaacagccacaatgcttaaaatgcagagaaatttttaaatatttttcaactcaatggactaactctaatatttaccacaggaagaccaaaaatgaagtaataggcgtacaggggctgatgggtgtgccataagtcatacaatgcaggcagactcattttccatatcagacaggtgctgtacagactaaggaatgtggggtcaaactccgaagtcagaggactgtcgtcaagtctctttttcagtagtaggtatatgacattggttaaatctgacactctgctttttcatcatgacaatggaataatgctgcaggaaagagagaaaataatgatggtgagagctttttttttttttttttaagcagtacttctgctatccaaatttgagtatttatccaactattttcagttcaggggctacaatgcctcaaccatatttacatttgaggtatctaaatgtaattctggtgatgtattgtcatctgtaaatttctctattgtgacattattaatacttacattgaaggttattaaaaacttactaaaggtgtatttgtaaaaccactgaaaatttacttatattttttgtgtattgtaagttttttacaatgatcatatattatttttataatctgcagaggttagaaatgttatttcgaaggatttttatttaggagtcatggccgagaaaaaggtttctaaattaaaaaccagaaaagtcatttttactgttttaacaggtagattgtcaagtttagactcataacacagtctttcaaaggtttctactggacagaaacagcctcattttcayaatcgtagtcaaagcagaaaaacatacacagaactaaatgcctagcatctgataagatgaccttttgctgaaaaatcatttggaacagcacttgttctgcagtaactgtcatggtaagtacagacagaaatgggacaaaaaatgaaagctattttggtttccttctattcaacttacagaccacaacagcaagagcacaaattactagctaatctaaatataaaagttcatgagactttgctaaataagtatcctgttactcaaaggagactgagcatctggacttggttatggctgctaccgagttttttgtttgtttgtttgttgtttggtacattcagtaattgggtcgggtcataggatatatattttctttaagggcaaattttagggtgttataaaataatatgagttttaaaagtttaagggcaatgtggctttgaaataaggtacatgtgaattgaaaataagactgtaaattttttttgctgtatgacatacagcaaattactgagccactctcagcccagcatgaccttactacaaaattggaaaagttacacgtaactaaccgtgttgtaaagatgaagaaagactctaagattcatcttttctaaaacttcttaggtattcagtatacattgcttcagtgcaggaatccttaaaagatrtccatctagactatgttattattgtcagtatgttaagatacaatgctgcctataccacttttaaatgcctcttttacttcatgactttcaccttcttttgctaaagcactctgaatctctgagtcactcgccagtgttcagttctgcctttatttgatgctgcacttcagaagatgatttaattctattgtggagcaggataaaactaaataaaagtggtggtacctacctttacagagcttaaagtctaggagggaatgcaggcaataaataaacacgtaaaatgggaacagagattaggaaaatataacctaaactaaaaagctagaaatagcctcttggaggaaaaaaacatttaagcagagatttcaagaagaatggaataggcttagcagagtagaaacttaacaaatattggttgaaatgtattgagataaatcagaccaaatcattgcccatgcctgagcctgaaattttaccaacacagggtttaatattatgagtctacagtattagaaaaatggcttctattacttctattttttcagaataatatatttatatagttacaaaaaagagcacaggattacataaatgaaaaggaacaggttccccttttcttttcttccccacttttactccccagcaatatacttataagcatatctaattttatttctttcagtggtcacctcgactattaataaaatgtgtataattctatttcttgatctatcaaattcagacaatatctatttactttccacaatgatctatcaaattcagacaatatctatttactttccacaatgacaattgaggagttaatgttagttgacttacactatctgtcatcctcatacttttgctggttttgatgattctattagaactatacttcttatataaatttataatatactaaattttttgttgcatcaattttagacagcgtcctcgactccctattatgtaaaatgaagatatttgcatatttatcattctatcacttttcctcctcacaccctcctttaaaattgtcaggaatatatattgcttttttgttttgagggtagagaatacttacatttttctgtagctaaaatccagtcttctctaattcgtagccatgttaaatctgtaaatgaaaaactgataaatataatcaacatgttgtttattgaggaaccaattaatatgtagaacaataggggaaattgtaacatatatgtgattctatatcaccaaatcctttccatttgaacaacaacttctaactgtcaagattgatcacataaaatgtctttcttccatcttgtcaattcttgacaagcagattcactaatttgcttatttattttttctttaaaaatttttttatatagatttaggcagtacaagtgaagttttgttacatgggtatattgtgtagcggtgatgtctaggtttttagtgtagccgtcacccaaataatgtacattgctttcatcctatcacatagctttcctatcttatttatagtgttgaaattatggaatctattttctacatgatggcatttctaaagagctttaattttctacataagggcatttctgtagagctcctacttcagtgaaggtctgctcctccaacagaatttcaatatacttccctaccacaaagttagctgttagcattcttaaatcccctatcttccttgaattatttttcctattttgttggagtgcgtctcttgctatttttctcaggagtatgagagaagaaaaaattttcagtcttaaattgaaaatgcttttattttgcctcaacactttaattagaaacctgagttcctgcccccaggatgcgatgctcattgcatggagcaaggtgatgatgtccttgttccaggcagtgaagaaagggataaaaagggagagaacaaagaacaccactaaaagctgccctatgaaacatggactagttcttattctcatggccacatccagctttagggcatgctggggaacaggatttgtattccggacagaatctkcctggcttaatattttattactttgcaactaagaagaatgcatattggctcacaatcaacaaggtttgccatagccttaattaataaagcctaaaaaaaatcacataacttctaactttaaacagggtaaattctaagtaggttatagtaaattagttgagcagagtgccctgaggtatctgaatgattgaccagttatatagaactgttggctaaaagccagacaaatattagaagacatataatagatataatattttcgttttataattattttgaatcattcttagacaataattaggaagcagaatcaatcttcagttgtgcacaaactcaatgtattacaaaaacattgtgttttcagtaaaaagagaaatatttacccttcttttagtagatgaagagcaaccatgaggtgttaaacagtagtttggcccaagtgtggtggctcatgcctgtaatcccagccctctgggaggctgaggcaggaggattgcatgcatccaggagttagagaccagcctggaaaacatggtgagactctgtatctacaaaaaaaaaactacaaaaattagctgggtatggtggtgtgcacctctactccctgctacttgggaggctgaggtgggaggattgcttgaggctgcagtgagtcttgattgcactactgcattctagcctgggtgacatagtgagaacttatcttaataataaagaaataaatgaatagtataatttgaagactcttgctacagagatttttgtcttttatcaaatgacgtttacttattctttttctggtttagaaacatgcttttattttatagtgaaaacttctcaagaaattttttaaagtgcattttctgtacatttaataaaaatttgatattaaatgttcatttctgaataaagctaatgatgagtatatcacttataactaataaaatatttgtctgcattcagcatcaactatgctgaaaaccagaagatacatatcttctgaaaaaaaaatcagtatatggtttaaaagttatttgttaacttaaaaagaatctaatacctggtagtgtattgctgctataattaaaatctaaaacatatgttggcattgagacctggttgttggaagagactgaaaggactttgaggaagtagttggtaaaacttgaaggaaagtgagaaaaatattattggaggctggggaaaaaaactcttcttagggagtggtggaaatttcgacagcmctgttgtctgagataaggtagaaaataggaaatgtacccactaagtcaaggatctagctatagacaattccaggcagaattttaaaagttttaactgcttcttctaactttctataataaaatataatatggagaaatgaactacagaagaataaactattagttttcaaagagaatttaagaggattttgagggcctaaggcagagtttccagtcaacaaaagtttctctaagtaaaacactgcctcggggtaaagatggagtaaacaactataaaacaccttggtaagtcctcagaaaaatgtaaagtactttgttgactcttcaagtaaaaggctgttattagtgtcttaagagtttaccttttggattctgtttgttaaacaatagaactcctcagaaaggacctcaggtagagagggatctatcttagaaagaaacatggtcttggtgggccaagctttcaattttttttttttttttttttttttttttttttttttttttttttttagacggagtcttgctctgtcgcccaggctggagtgcagtgtcgcgatctcggctcactgcaagctgcgcctcccgcgttcacrccattctcctgcctcagcctcccgagtagctgggactacaggtgcccgccaccaygcccggctaatttttttgtatttttagtagagacgggatttcaccgtgttagccaggatggtctggatctcctgacctcgtggtccacccatctcggtctcccaaagtactgggattacaggcgtgagccactgtgcccggccgaagctttcaaaatttttaaagaaattaggatcatggcacaaaaaggggcagcaagagttcaaaatgaaaaaaaaatggcttttgaacacctaatatatgagcaataaacatgctgaaaaactacttagctgtaagtacaggcaatttcttatagaaatggaagaatgactcggaggatgaaagaagtacccagctggcaaagctaagagacatgaagaatcattcccagggaacaaaaccatagcctaataaaagaactgataacatgtactagctaggtttcagaattgttmtggactaagtatttctatatggcttctttttctcttttttgaataggagcatttactgtggatttcccatgattgtcttggcattttatgttgcatgtatgaggacacgggtattacgttcctttagttcacaaattttcacagtgagaagaatgacaattgaggtgcctaatctgttcttagrctagatttaaacgatgagatcttgaaactcaagcctgagtctgcttccataattagttgagaatctggggagacttgggagggagagggtatattctgcaggagaagatgtaagtaatttatgaccagagggtagattaaggtgaattaaaatggctgaaaattctttgacgctcttccaatggggagattgggtacatgactgctccccttgtcctgggtgggatctatggctgttttgaccaaaagaatactccagaatactactatgccagttctggtatcaggacttaggagtctatcagcctctatttcctgtctcttaaaagactcttggagccctgagtcaccttgtaaaacatgaaacttaaggcactcattctctaagaaagttagagaaagaaagagaaagagggtgggtgaggaagaagggaaagagagagaggggaaggcaaaaaaggagagagaaagggacacagagccaatgggaaaagagaaatgtctgtcagtcagtttggtctgccataacaaaaatcccataaacttggtggcttaaacaacaacagtttatttatttattatattaattttttttttgagacagagtcttgctctgttgcccaagctggagtgcagtggtgtaatctcagctcactgcaacctcctactcctgggttcaggcgattttcctgcctcagcctcccaagtagctgggactacaggtgcatgccaccacgcctggataattttgtattttttagtagggatgggttttcatcgtgttagccaggatcgtctcgatctcctgacctcatgatctgcccgtcttggcctcccaaagtgctgggattacaggcgtgagccaccgcatcctgcccaaaaatttattattttttttatttgtgactgctgggaagtccaagatcaatgtgtcaggcgctttagtttctggtgagagctctcttcttggcctgcagaaggcagtcttcttgctgtattttcaagtgttggggttgggagttggggaaaagagagagtgcaagctctctggcctcttatagagcacttgtgtcatcaggttgacctcatccccagcatgacatcatctaactctaatttctcccagaggtccaacctcataacaccatcacattgggagttagggtgtcagtatatgaaattgagggggacacaaacattgagtccataacatctggcccccatatatcatggagcagagataagctctccctgctacactttattcttaacttatgatctaggaaattgtgaaataaaaaaaaaaaatagtggggtgttttaagccactaagcactgagttttggagaaatttattacttagtaatacataatgaaaccccaaacagaagatgtagaaaggtcatttccrtatcattctgtgaagcatccttttctatttagatcaaatragtgttccaaattcatttaattctatttcaattccaagttttgctgggcatgtatgaaaagtgaaggtctagctgttaacatgttgcctccattatcagaagcagaatttcaaaaacaattttatatcagtgttaccagatgcttcaaataaataattattaaggtaattcaattttaaattttaaagaagattgtcagaaatttgatttttaaaaagtgaaaattaaaaccatattgtggagatttctattcaggacacgaacaatagctcttatcagattaacctgcttatagatgaaagttttaaattctatacaaaatattgaaataaacaactacatgtaggctgtgaagagcaaacaaatgcagccaggttttggaagttgtttggcacatagatgaatggaactgcagttgggtgcatttccccatgttgatggttttcagcatgaagacagattccagtccatgctaagagacatgttaacttgttaaaacaaaacaagacaccagaaaaatagaacaaaatgaaaaacagcagagagccagggactggagaaatagggcaaaaaagcactagttgttccaaccatattctggtttaagattggatgaggaaagtaaaagagaggttatcaaagtaggtggttggtgtaggaaaactcaaaaggaagacggagtagagatttgagttagagctggagatgaaaaacagacatgctacagccatcttttatgtcgtatgtgcttgcttgcctggaattagtgttaaaaatctggacaaagtgtgagtctagcagagaacatcatagtgttgtacaaagtcaactccaggattgagaactggccttcaaatggaagagttaatatgtgatcgattttttttcaattcgatagtacaggtaaacattagataagtgacattactagatctaaaaataagcagtttagcctcgggggggccctgagtgtctatgctttgctttttcttaatacttgcattttgaaatttaactatcttatgataaacttgagcagaacaaatgaaatatgtctgtttttagtacaatttttatataccatatataaaagggtgtttacaagcactgtataataactatatgagagatacttatgtataactatacatattatataatatgtatatataactatacataaaactgtagatatgtataactattgagagagattataaaaagatataaatatgctttttaaattaaaacaccttattatatattttaatgaccaatatgaaaaaatcaaataatatactcagtaggtcataatgtttgcttaacatcattttagaacattataaaaataaagcaattcctagttttgactaaggacgttggctgacattttacttccaacatgttacattctgtctttatatttttaaacaatggcaaaaactcaaaatatgaagagccaagctgctctccttggctctggatatgccttgctttttggatttcagtcaaaaatttcacaccagtgcagcttacttttagattgttactttcagaagtgggcataatcccatttgtgtagttcagatgtacaacctgaagttctccaataactatgtagttgtttttgaaatgaatattcacacaacacacacttctcattggaaatgattctggtatggaagaaagagtggaagttttgaatcagtgtggacttgaattttggcttcatacattgggcaattgacttaacctctccaaatcttattttcttgagtaaaaagtgggaatggtaatgttcaccttacgccagacatagtatctagctgttcataatcataaccataaccatagccataatcataataatgaggaggaggagaaaaaggagtagccacagcaaaagaagaagtagtaataatagtgctactggcaatggaagtagtgttaataatatttacagtaatatttattgagtcactcctgatgaaccagcactatttgaagtataagaacatataaatcaatttaattcttgcagcggctctacaacactttagataactaaagtagaacttggaaaaggaagcagaaggatcatatggaactgcagaggtagaaaaggaccagatcgctgggcaaggtggctcacgcctgtaatcccagcactttgggagactgaggcgggcggatcacgaagtcaggagatcgagaccatcctggctaacatggtgaaaccccatctctgctaaaaatacaagaaattacccgggcatggtggcgggcgcctatagtcccagctactcggaagactgaggcaggagaatggcgtgaacccgggaggcggagcttgcagtgagccgagatcgcgccactgcacaccagcctgagcaacagagcgagactccgtctcaaaaaaaaaaaaaaaaaaaaaaaaaagaaaaggaccagatcaagaaagattgctgagaaccctgagctttactgaataggtgacagggatctaccaaaggtaattaaataaaaaaactaacatgatcagaaagaaaaccccgggagcatattgaaggcagcggttagtaaagttttccgggtaagaaaaagtgcaggactgaactaaagcagagaccgtgggatttcctttttactcagtgcttctatctttggaaatttacctttctccatggctgaaataaatagactgctttattttcaattgctttttaaattaggttttaggagaataattaatctgtaatatattatgacagtgtggctataattaatttttatatttgttatctaatttcaaaaagtttataattattaatttggaatctgtatatatgctacactctttagttaaaagtttgtatacagtcctttttttttaaactctgtatcccagagcacagtgcctatgtctggaagatgagagacacagaggaagacagagaaaaagagtagagaaaggaaaggagagagagacagaagagggaaagcaaaaagcagaaaggaggagaggctgatcaaaataaattacatgatgcagagttttgctacaacatctggcgttctttggattattttttgagggaggtagaaaattcctttagtgtgtaaattaatgctgtttcttggacagttatttggccttggatgccactgaaaaatcagtgagagtcccatagggaacacgtttacgtgtctcttgactgaaacgttagagtgaaartcagttaaagagcatagtcaaataactaaacaccaaatggggttggatgattagttaaaattatatttaagaagaatattaagtgtaatcacaaatatgtctgtaacacatattcataaaaagtgactggaggacagtagaaaaatgctaacttttttttatcttaggggactgagatttaatggttcttttatattcttcctttttttccttgtaatgtgtttgtattactctgataagaaaaaaatgtaacaagaacaaaaaatttaaaaattctcagattgcggagacagattaacctcttgtaatgaataaagctctattttaagttgcttttcagttttatgaaattaagcttcaaattcaaggctttaaaattgcgggaaaaaagttcaggcttttagagaattcttcctcagaatcgatagttatccactactagacacaagcagtcacaatgtaaacagccctatgtgcaaactattgtggatatgaacagtaaaaccaaaagactgaaatgagaatccagtacgacagccaagcttgccaaagcatcacatcccagtagttcatcaaggtcaggtatggtttcaggcaagactccagggcagtccagtctactgggtaaggacatctgatagaggagaatctggcagaactctgagaccattctaagctgattttctttgctgacagcactctcactcacttagagaagtggactcagtccccgggataaggccctggcaagagctgtacagaagaacctgaaccttgcccagtgggatgtgatatgggacaaaacacgattctgtgggaaattcaactattatgagaatgaatcatgttagttatgatatgtggtgagcaggtaatgtatattgaagaggaggagaggtggagagagaagatgtggagtaaagacaagggtcaagcctatagatcatgccaaccaggtagagagaaaaaatattgtgactcagaaatgtctacaaggatattcagggtttatccttggcatacaacatctggataaatctcttgtttctgacattacctgaggccagctcataaacttcaggtgtgacctgtcaaggccaatctcaaagtatcaggaagcacaaaggcaggaacacaaagtctgtgcttatccgcacaacaaaagccattcttcagaatgtctaggcatcttcctgccttgtctaatcacagaacggtgccactgagagtgagcatgactgatgccccaatggagaataaggagaaggattaaaacagaaatttgagacttggagtaagtgggaaaggaattaaagctatccttttgtaataggaactttgttctatttgacctttcaacatatttatgtattagacaagacagaggcttgagacaagcctgagacaagcttaagacaatgctctacttcaaagcatcatcaccatagtcgtctgtttcaggggaaggatgtgggtagtggtgagcagagacaacctgggatagatgcagaagaaaaaattcaggacaagctgtgtagaatcaacagtctttacagaaaacaataggcagaggtctgtgcaggaaaatgttcctgagtctactgcagatagccgtagcctggggtcttttgttcagagatggggctctagttcttgggatctaagttatttgacataattactttagctgttatctataacaaagaactcacaaatcttaaaggcttaacagaaaagaattttagttctcactcaaaatgcatgtgaagcaaatttagcagccctctagagcagctttttttcaagcagcaacacagggaactatggcacaagtaatttcttctgaacctgcagtccaagttagatgaccttatgtcatgtaaccctaaactgtcctctattattacatctggcttgtgctgttgtattgctgtgagatttctcccactagactgtgaacttctaaaggcagcaactatatctttagtttgtgttagaggtagtcaaaaatgtttgaggcaggaacaaaaatggaaggaagactgatataaaggaagaatatataaaacaccaatttaggaaattcaagtgcatgagcatgtcacttgttaacaataggaaaacaaggccaaaattgtagcaaataaaatatacctcatataagtgcctactatatgtcacacactgtgctagacactttatatagtttgattccaatacatacattcataatttgagacacatagtattatctctgttttttaaaattgtctgtattagttcattttcacattgctatgaagaagtacctgagactcggtaattcataaaggaaagaggtttaattgactcactgatccgcatgtctggggaggcctcaggaaacttgaaatcatggcagaagttgaaggggaagcaagatgcatcttacatgatgacaggagagaggaagagtgagcagggaaatgccacacacttttaarccatcagatcgcatgagaactcagtatcatgagaacgtcatggaagagaccacttccatgatcctattgtagcccaccaggtccatccgtcaacatgtggggattactattcaagatgagatttgggtagggacacagaacaaaatcatatcattctgcccctggcccctcccaaatctcatgtccttctgaaattttaaaacacaattgtgtcttccctacagtgccctgaagtcttaactcattccagygttaacccaaaagtccaagtccaaagtctcatctgagacaagggaagtcccttctgcctatgaacctgtaaaatcaaaagcaagttagttacttcctagataaaatggaggtacaggccttgaataagtgctcccattccaaatgggagaattggccaaaacaaagggactacagaaattccaaaacccaacagggcagtcgttaaatcttaaagctccaaaatagtctcctttgactccatgtctcacatccagggcatgctgctgcaaggggtgggctcccaaggccttgggtagctctgcctctgtggctctgtagggtagagcttccatagctactttcacaggctggtgttgagtgcctgcagtttttccaggtgcacagtgtaaactgtcagtaaatctatcattctggtgtatggaggacagtggccctcttttcacagctccactaggcagtgccccagtggggacttttgtgtgggagctcaaaccccacatttccactctgcattgtcctagcagaggttctccatatggcctggacatccaggcatttccatgtatcctctgaaatctaggtggaaactcccgaagcccaactcttttrtctttgcacacccacaggccccacaccacacggaagctgccaaggcttggggcttgcactctctgaagcaatggcctgagctgtaccttggccccttttagccatggttggagctggagtgcctgggccacagggcatcctgtccccaggctgcacaaaacagcagggccctgggtctggcccagaaaactgtttttccctcctcggcctctgggcctgtgatgggaggggctgctgtgaatatctctgaaatgctttggagatgtttttgcagaaggtgaagaggaagcaaggcatgtcttgcttgatgacagtagagagagtgagcggggaactgccataaacttttaaaccatcagatctcttgagaactcactcactgtcatgagaacagcatggggaaaactgcccccatgacccagtcactctcaccaggaccctcccttgacatttgggaattacaatttgagatgagatttggctgggtacacaaagccaaaccatatcaatgtcacttagtgaaactaagtgactaccragttcactcaggcagctagcatttggtattcaaattcaggactgttgacctaaagcttctgtgtgtcttaatgttgactaatttgagctggtaatctaggtgtcttaaaatcactgttgcttagaaagaggttcagtcttcaggttgtgggtgaagttgaatgtgttggtgagagttcaatggcctcagggggcctcatagaaagaaatgcagggttagagacctacccagagctatgttgatctttataagaaaaaacataagcctctggggtcaacttgatctttgagattggagaaattttgtgcatttatcctcttgatgaaaataaatcctggcatatttggtgttagaactcttagattgcaagtaaagaaagccagctggagctaacttaagcaaaacaggacagcaaattataatgtaacaagggagcgtcacagagtccaatgagaagattgcagctgggtcactggaaggattggaattatattctgggaatagaaataatcaataactcaggaggaaatctctcttcaccttcactcttctctgtacctacgtttcttattttctctacrgtttagcttcctctgctcccctgtctacagagccacatgtatttcccttacttttatttatttctcattaattttaaataccaagagaaaagactccaattagctcagcttgtatcaggaacctacccctagatcaattaactctggccaggaaggagagaaatggtgtacttcaggtaatgaagtgaatcatatcctaaaaaatagacaactaatccaggtgaggtggctcacacctgtaatctcaacactttgggaggccgaggtgggtggaggtttaggcaggcaacctgaggtcaggagttcaagaccagcctgaccaacatagtgcaaccccatgtctactaaaaatacaaaaaaaaaaaaaaaagtagacagatgtggtggcacatgcctgtaattccagctactcgggaggctgaggcaggagaatcacttgaatccaggaggtggaggttgcagtgagccaagatcatgccattgcactccagcctaggtgatagattgagactccatctcaaaaaaaaaaaaaaaaagaatagacatctagaacaagtgaagatcaactaagaatgtggtattatggagagagtgagggaaaggaaattatgggagccctgtgagttagatagatactctgaagacatctagtatgttgacartacttacagcctacagctggaaagaacatgggatttggagccaagaaaatctggatttggatattgtttaaccttgcacagatcatttaagctcaatttaacataaacgcagatctgttttttatttgtaatattgtagtataatttttacttttaataactactgtgatgtttaacaataaaatatgtaaggtagctaggacacagtgagtgctaaaaactgatatttgccattacagttcttttcttgtgtttttgtttcttctaattgttttatctatgtgtaaagcaataacttcaaaattgagtgaaatgggagccattatcctatgactattacccacataatttcttcattatgtccaatctttgtacattgtgtccagtttgataaacagctctgatttattttcctgtcttgaatatatttaccagtgaaagctytccagtgtgtcactgaagaatgaaagcattaaactgtctggagacagaacttaagaatttgtgtatctcctttggccacagtttatcttgttttaaaagtgattgttggttgatatttcgtcttctgttcttttgctagcttcttcaagaatctttagtttataaacatctcaggatatacctggagtaaaaatcaagtaaactatccaaacatcatatgtatgtctttttaacaagtaaccttggctttagggctgtctaggatctgttcccaggtatttaactacttaaatatcttccagtattattgcttatatggtacagtgaaggtctgtgtaatcaggctacttcactgagtttctcaatgcattcctttctttgcttactccaacatccagtttggttttagttaactagattacgattataaattgaacacatttatatttccttttttcttccttaaagctagtcttattacaaagtcatattaaaaataaacacaaatatacctgcaaaaacccctgaaaaggaatgtaaatgtttactgaggttgtcttgaggacactgagagagggattagatgcaacatcagacacagaattttctatcaatcccagttatctattcattactacccctcaaaagtcaaatttatgacagccacacacatttcttcctcgtctttttttttaattctttctctttctacactttctggggatttgatttcttctgtttgtattcttatcttctacctgttcacaaaacagaagttgtctttattggataccactcttcatagaaaaggagggagaagggacttgtgagaattgttgcttaatattttgtcctatcacataataatagtatccagcataattcaagttatagtgataaagatagatagataaattgattgatttgtcagtcagtcaataggtagatatattggctggcagatagatagattatattagtccaatttcatcctgctataaagaactgctcaagactgagtaatttataaaggaaaaaatttaattgactcacagttcggcatggctggtgaggcctcaggaaatttacaatcatggcagaaggcaaggaggaagcgaggtaccttcttcacaaggcagcaagaagaagtgctgagtaaagaggggaagtgtcccttataaaaccatcagatctcataagaactcacttactattatgagaacagcatgggagaaatcatccccatgattcaattacctccacctagtctctcctttgaaacatggggattgtgagrattacaattcaagatgagatttgggtggggacacaaatctgaaccatattattctgctcctggcccctcctaaatctcatgttcatttcacatttcagaaccaatcatgccttcccartagtccctcaaagtcttaattcattccagaagtaacctaaaagtccaagtccaaagtcctgcctgagacatggcaagctgctttcacctaggagcctgtaaaataaaaagcaaggtagttacttcctagatacaaggggtgtacaggcattgggtaaatacccccgttccaaatggaagaaattggccaaaacgaagtggctacaggccccatggaagtccgaaatccagtggggcattaaaatcttaaagctctgaaatgatstcctttgactccatgtctcacatccagttcacactgatgcaagaggtgagttcccatggtcttgggcagcttcatccctgtggctttgcagggtacagcccctctcccagatgtttcacaggctgccattgagtgcctgcagcttttccaggtggacagtgcaagctgttggtggatctaccattctgggttatggaggatgatggtcctcttctcagagctccactaggcagtgtcccagtgtggactctgtgtgggtgctcttaccctccctttcccttccacactgccctagcagaggttcttcatgagggctccatccctgcagcaaatttctgcctagacatctaggcacttccatacatcctctgaaatctaggcacaggttcccaaacatcaattcttgacttctgtgcaccctcaggcccaaaaccaaatgtaagctgccaaggcttggggctttcagtctctgaagcaacagcctgagctatatgttggccccttttagccatatctgggacacagggcatcaattcccaagactgaacaaagaagcaaggccctgtgcccagcccacaaaaccagttttccctcctaggcctctgggtctgtgatgtgggggctgctataaagacccttgacatgccctggagacattatttctgttgtcttgctkattagcatttgactcttcattacttatgcacatttctgcagcaggcttgaatttctcctcagaaaatgggattttcttttctattgcattgctaggtggcaaattttctgaacttttatgctctgcctcccttttaaaaataagtttcagttccaaactatctttatgtgaatgcataaaactgaatgcttgtaagagcacccaaatcatctcttgaatgttttgctgcttagaagtttcttcyaccagataccctaaatcatctctctcaagttctaagttccacatatttctagcgtaggggcaaaatttcaccagtctctttgttaaagcatagtaagagtcacctttattccaattcccaaaaagttcctcatctccatctgagatcacctcagtctggacatcattgtcatattactatcagcattttggtcaaagccattcaacaagtctctaggaagttgcaaactttcccacatctttctgtcttctgttccaacctctgmctgttacacacttccaaagtcacttccacatttttgggcatctttatagcaacaccccactctctccagtcccaatttacttctataaagaactgcctgggactgggtaatttatagaggaaaaaggtttaattgactcacagttcagcatggctcgggaggcctcaggaaacttacartcatggtggaaggcaaatgggaagcaaggcacttctttacaaggcagcaggaaagagaagtgccagggaagagccccttaaaaaaccgtcagctctcatgagaactcacccactatcatgagaacagcataagggacactgattctatgattcaattacctccagctgctctctccctcaacacgtggggattatgaggattatgatgattacaattcaagatgatatttgggtgggaacagaaagcctaaccatatcgtagatattccttatataagacttgaaaattgatattttcatctctgttttataaagaaggagatcaaagttcagggaaacatgttcagtattaggaagtagcaatgcttgtggtgatgtttatcccagttatccaggtttgatcattactcattaaatgcttgcatcaaaatatatcagatgtaccccataaatgtgtacaactattatgtacatataaaattttaaaagtttaaatgcagtatgtttttaattaattgacagattctaaaatgtatatgaatgttcaaatgacccacattagtcaaaaaaattttaaaaagaaaagcaaagctgcagaacttatacaagctgctttcaagacctactataaggctgtattagttatgacaatgtgttattgacataaagattcatgggaagaataggtggcatctgaaatagactcacgtatatatggttaattttggaaaaaggtataaatgtaactgaatggagaaagagaatcttttcaacaaatatttatataaaactgaatattgatatgggaaaaagatgaacatcaatcttgacctcatacaatacagaaaatattaaattggaatagattatagacatgaatataaaatctaaacatagaatttatagaagaaaatgtaagacaaattcttgaaaccttcaggtggtaaatattgctcatctagcacacaaagattataatcctccataacggataaatttaacttttaaaacaattaaaactttggctctacaatggacatcattaagaaaataaaaagacaagttacaaaatgggagaaaagatttataaaacatatatatctgtcaaataacctttatccacaatacataaagaacagttataacacaataagaagagaaacaacccaaaacaaaaatgagcaaaacattttaagaaacattataaaagaaaataaaccaatggccaatgagcacagaaaaagtgctcaacttcagtgaaatgcaaatgagatacattgcattacacattacaaatgaggtacattacatatccattagaatggccaaattaaaaaaataataataccaaatattgactagaagatagaacaactggaactcttattcactactcctgaaatttaaaatggtacaaccactttagaaaactctttggcagtttcttataacgttaaacatacatctacaatatgatcaagctattccacatctaggcagctattccacacctaggaatttaaagaaaagaataaaaagagatgttcacttagagatttgtatacaaatgttcataacagctttatttgtaataattccaaactggaaagtgggatgaatctaaatatcactccctaggtgattgaaattttaatcatgcwttatattcatataatggataactactcaacaattaaaaagcagaaattttaatctgcataacagtttgtattaatcttgaaatcattaagctgaatgaaagaagctatacacataaaatatgattctactcataaaaatgcagaaaatggaaactattttataatcaaagaaaacaaactagttactgactaggaccagggtgggaacaattaattggaaatagcacagggaaatgttgtgtggtgttctcaccacaaaaatgttaatgtgaggtaatgcatttggtaattagtcagattaaaccatttcacgatgtatttatatatcaaaacatgtacatgcaatgaatacacataattatatctgtcaattaaaaaataatactttttttttaaaaaagaaaatgttctgtatcttccttgtaatggtggttgcattagtgaataaatttattaactcttcttggaatgtgcccttaaagtgggtgaattttactttatgtgaacctcaatatgataattcaaatcttacataggagtatgaatcaatggtctgatatggtttgaaagccagagaaaattaggtaaactttctgagccttgatgtttctcacttacaatgtggattaatttacaactgtcatattgaaattaatgatataaccaaagtattatacctagaaggtactcagtacttgttagttcctttttccttacattattttaactaattacatagttttcctttgataggccttaaattaaaagaatcatttccaaaactattccagaaaggatgctaacttaaacctacttgacatttgtagtaagcaggcattaaacagtgctctatattgtatttaaggttaatacattttcagaaacaacttgttttataatggactttcttgagggtagaacttatggagaataaacagcatctacttaaagtgtgcattagaaagattttgacagatttgtatatccataaaccaccacagctaacaaatacagaacatttgcatcccaccatctttcccatttccaaaagtttccatgacctcagtgcagttcattctcctctggccccagggagctgctgatctgttttgttttgttttatttttaaatcgctatggattagcttgtatttttaaatttttatgtaaataaaatcatgctatacatatgtttgtgtgtctactttcttttatccatataatgattttgagattattcatccatgctgctgaatgtactagtagttagttccttttaaatgatgaataggtttccttgcatgagtatagcatgttttgtttatctcttcactcattgatggagtattgaattgcttctaatttgaggctactgagaagaaagccaccatgaacagtcatgtgtaattttttagtgtggacatgttttcattttctctccattaaatacctaggattggaatgtgtgataagaatctcttttaattcaatttctacagagaagaaaaacagagtaggtccaaataatgaacagttaaataacaaagcctggttatgtatcttctacacagtaaaatatggtcatttagatggcagcttttaatccatctgtttctgtaccagcctttcaccctcagactactttacgtttatatattctcatttatttttattctctcattgctgagcttacttttgcccttccttgaagttatcagtatacctgctattaagagttctgtgctttccagccaggcaccatagctcacgcctgtaatcccagcattttgggaggctgaggcgggaggattacgaggtcaagagatcaagatcatcctggccaacatggtgaaatcctgtgtctactaaaaatacaaaaattagccaggtttggtgacacgtgcctgtagtcccagctaatcgggaggctgaggcaggagaatcacttgaacccggaggtgggggttacagtgatccaaaatcgcgccactgcatttcagcctggcgacagagcaagactgtctcaaaaaagaaaaaaaagaaaagaaaaaaaaagcgttctgtactttcccacttattgggtctaatcagttatcctgggagtttgtatagctaagtgagttaagtttgttgtaagtgatggtgaaacaccgaatgagacctctctaccgtgagtcctaggaatacttagtttgatttattaaagggctttgtttcccttttgccttctgaataactgtggttgcctgggaagtactctgcaataaaatgtagataaactcctaaggactaattctactttccttggtagatacaatttttatattgaaaacaattaagtttacttttattttatgaataaccttataaaatcatctgaatcaacctcaaatatttctcaaattattttattttattttaaacttttattttggattcaggggatatatgtgcaggtatgttatcagggtgtattgtatgatgttgagttttggggtacaaatgatcccataaacccagttactatgtgtagtattcaatagttggtttttcaaaccttggcactcccagtaaaccccagtttctactgctaccatttatgttcatgagtacctaatgtttagctcccatctataagtaagaacatgtggtatttggttttctgttcctgttaatttgcttaagataatggcctccagctgcattcttgttgctacaarggayataatttctttttatggctgcatagtatttgatggtgtatctgtgtcacattttctctaccaaatctacctacattgattccatgtctttgctattataaacagtgctgcagtgaacctgcaagtgcatgtttctttttggtagaacaatttgttttcttttggatatatacctagcaaagagattgctgggtcaaatggtagttctgtcctaagttctttgtgaaatctccaaactgctttccagagtggctgaacaaattgacattccctccagcagtgtataagctttcccttttcttgacagccttgccagcatctgctgttttttctttctaacagtaaccattttgactggtgtgaggtggtatctcattgtggttttgatttgcatttctccaatgatcagtgatgttgagcatttttcgtttgttggctacttatatgtcttcttttgagaagtgcctgttcatattttttgcctgttttttaatggggttatttgttttttgcttgttcagttgtttaagtaccttatagatcctggatattagacttttgttggatgcatagtttgtgattatcttctcccattctgtaggttgtctgtttactctatcagttgtttctttcgctttgcagaaactcttttgtttaattaggtggcactggacaatttttgtttttgtagcaattgcttttgaggacttaatcatattttttttttccaaggctgatgtcctgaatggtgtttcctaggttttcttctaggattcttatagtttgaagtcattatttaaatctttagtccatcttgaattaattttgtatgtggtaaaatgtggggacccggtttcattcttctgcatatgactaaccagttattccagcaccatttattgaatatggagccctttccctgttgcttatttttgttgactttgtcwaagatcaaatggctataggtgggtggctttattttagtgttctctattccggtccagtggtttatgtgtctgtttttctactggtactatgccattttggttattgcagccttacaccgtagtttgaagttggatattgtgatgcctttggctttgttctttttgcttagtattgctttggctattcagggtcattttttgtttcatatgaatttaagagtagatttttctaattctgtgaaaaacaatattaagagtttgatgtgaatagcattgaaactgttggacaatatggccattctaacaatactgatttttgcaatctatgggcatgaaatgtttttccatttgtttgtgtcatctattatttcttttagtaatgtttcatagttctttttgtagtgatctttcacttccttacttagacgtattcctaggtattttatgtgtgtggctattgcaaatggaattgtgttcttgatttggctgtcagcttgaatgttattggtgaatagaaatgccactgatttttgtacattgattttgtatcctgaaactttactaaagccatttatcagttccaggagccttttggcatagcctttagagttttctagggatagaatcatatcatcagtgaagagagatagtttgttccttttcctatttggatgattttatttcgttctcttgcctgattgctctagctagcacttccgtcctatgttgaacagcagtagtaagagtgggaatccttgtattgtttcagttctccaggggaatgcttccagtttttgcccattcagtgtggggtgttggttgttggtttgtcataaatggctcttattattttgaatttcaagcatttttaaagatccacattcaaaagttctaataactttttatttcttagcttttttaaacatcttcatactacattttatttagagaattcaaactattcttttgctccttgaatgtgtgtttgtgtttgctgatagagtgagggatatatgctttgaagtataattcctaatattttgttttggcaaggttgtgcaaagaaacattatggaatctggaaattagtgggaatcattagtatatttcttataaattccgtaaaaatgacatgacattatacatctttacatatagcagaggaggaaataagacattttaccttttttttagcctcttcagggcaataactgtagcgcatgtctcattgtgtacccaatatccctcttccatattggggagctacgccttccccaacccttttcagttctaatgggactatcaagcactgtttsctccctgatcataatggtacaaactcattcctagtcaagcagcctacctcattttacacttcatagtaattggtccaagtaatgaacatagaaatggtagggtactttattatatccaatayataaatattatgagagaaagagagagagagaatkatgctttcttatctgtgttgttaaggtttaaagatgttgccttggttctgcctgtagcagaaaagagttaggtcaacattcacagagggcagagataatgaaagtcaagaaatgtaaagagaatcagacagacctgatattggtgagactctgaatataaatgttatatatttgaaatacacactcttgtactgcttatatatgttagctaagatagttccgttcttcactgcaggattttaacgactttattggctgctccctagctcttgaaactttggcttcattgatctcttctttctgaactgcttcttcttacccgatgaataccaacttatatactgatagtctccttacagatacccttaatttattttgttggaaaaaatgttcacctcttttaagatgataaaaattctcatagatcttacaaaataattttagatacatcaatacattacttcttatatgtttttaaactttttattcagtacctcatttacctgcattttatcttctgttcaaaactataatcaccttaaaacctagggttgtttggttacatctgaaaatttctctacagtatacagcacaatttcatattcataggaagcactcagtaaatggagtcaaaaataaataaattaaaatttaaaaatacaagatattttctacatgaacaactttccctaactccctgaaaaccatgtgaagtgactttcttttatgctctcagattacttttcatttgcttcaaacatagcacttctcacatggtttagaatttttctgttgactcatcttccttatttctttataatgtaattgaagactttacaggtggtgtttattatttgataccaacaacctaacacagtatctaagaacataatgaacactgagtaagtactttttgacttatgaataaatgcaatgtaatgcagtcctatgtaaggactacaaaatattctttaccatctaattttttacattaactctattgctcatcttttcagtgatttttttatcataatcacagatagatctttaaatggaaaattattaaattagaaattaagaaatttttaaaaatagagtatattttaggtgtcgtccttagagcactgtggatcagaggtctggtgaattactccacgtcacatggttcattaaggaccaaccttatttcctttccattattcttttattataccatacaacttttctatcagtattggattatccaatttggcaaaagtgtagagcagtgatttttcacatatttttccttaagggaggaggacgtgctgtggattcaggttttagttaccagaatgtcaaaggaatagagttcacccagaccaaatgctcctgacatgctcttgcaaagaacatgcagatgactattgcagatcatttttaaaaataggaattactacgatagaatccctaaataatcatattattttagtctgaatagatactaattctgatcatgtttttcttgattttattgtttttttttataagcaagtagcatctttgtcccccccccaagactttctgcagtcattgtaagaactttgataattgaattcctgtggtcattttttatagctgtccataaaccttttccaaattttggttggtatgaattaaggtctgttcctgttaaagtacaagcagtttgtttggattgaatgcttgtctcttccaaaaataggtttaatttttctttttatttctattctttacttgttactaactacaaattcttaagtgtgtttcaacttttatgtcaatgtttttcaaagttgaaaaaccctagctctgtttagccaatttatttaatcttcattattttgggatttagtttgtgtgtttgttttccgaagagatttaatgtaaaagtgtctatactaacaatgcttttttgaaattgctttattaaggctagatatagagtttttaagttaattaagtctagttaatatagaattttacaaatattcctccatagatttcactttatttattcagtaaacatttattaagtacttgttgttttccaggctacacactgggtgctggccttacagtggtacacaagatcaacataatccttatttaatggtgtttatttcctcatgagaaaagtatatattaaagaaatcacccagcattttggcaggctgaggtgggaggattgcttgaggccatgagtttgagaccagcatgggtaacatagtgaaactttgtttctacaaaaatgtttttaaaattgaaaaaaaaaaaattagccagttgtggtgtcatatacctagctactcagaaaacagatgggagaatcacttgagcccaataattcaagactgaagtgagctatgatcatgcctctgtgcctctgtactccagcctggatgacacagcaagaccctgtctctaaaaatgaataaataaataaataataaaggaaataagcattaacaaagggtacagggtgcttttgaagcacatagaaaaagtaaaggaaggattgcttggtcaagtaatgtttaaccagatatcaatatattgatgagcggtcaaccaaataacttaaaaacttgatgaacttaaaaactcgataatccagaccttaagaaatatagcaggacattttacattacttttaataatcctggccaatgaaataaaaagtttttagaaaaaggtccttgttagaaacacatttttaaatatgtctgacatatactcttagatataatacagttatgacttgaataacatcaaagtgacataagtgagagtatttctggtaatggtggagagtggtcatttaagccctttgcatatttcaattacgcattgaaccgaatattaaaaataattattcaacatcttagaaaacaagaagaatraggagaagagcaggaggaggaggaggaggaggaagagaggaggaaactgcagccatcactgccattgagtttgttttcgaaaaactgtagctgaaagggcaagcattgcatgtttaaggctttctggcagaaagaactccccaaatacccacgatgctatcaggcaagaacagcagacacccctagacttactggctcaaagtaccaaagaattgtgtttatgactgaaataacagctggaagttcaaaggggaaaaatccggcattgaaagaattwcaggagtaagacccaaaatatgactataaaccctgcacaaataccactttgacagccagactttacatgcagataagaccctcaaggatcctagtaagaaatgcagtcagagatcagataggagcctacacttgaaaaatagtgctgaaccaggtaagatatgagtttgctactttttaactgagtgaattcctcagcagtatggagttcagaaagctgaaggcatcttatcttgagatttaaaaaaaagcctgagattgtcagagcagctgaaatttagagaggaatctagaatcaggaaaccatagttagtctgatgatagtataccttgacagtgtttttctttgtgttcatttgattagggcttgtgaagcatatcgagtctctaatttctattgatctatattcaattttactaaatttcttacctctttgaatttctcttaaaagatataggactgtttaaaaccaaaactgtaacattgtattttgaggtttataatgtatgtagatgcaatacatgtgatagcacagtactaacagggaagtgagtggaaatgtattgctgaaagattctgatttttttttaaggatgaagagaaatgacatcatatggcaactcagatctaaagaaattaataaagaacattagagatgccaaataaaaagtgaatatataatacataagaaatatcactgtagaaattaaaggagaacaaacaaaaagccaatgcaaattgttaggtgtaacaacaaatttattggatgaacttaacagtggaatggaggtggaagaagatgtagttaatgcaataaatgtttttcaagaaatttgggacattttcaggtaatttttttgcaacagaataaaaagcctaggaatagccrcacatgtatatggtcaactgattttcaacaaattacttttaagcaaatattgctagaacaacaggattctatctggaagaaaatgaatatctattaatcgtcccatgccatacataaaaatagatttgacatgaatcatagacctaagtatatatgctaaaattatagaatttctagaataaaaaagatttttacaatcctggtataggcaaatatttcttaaatagaacagagaaacataactattaaatatattaattaattgggatttacaaacattacactcttttaaaaagacatcattaggaaaatgaaaaaacmagacacagaatgtgaaaaaaatttgttatgcatgtatttgaaaaaaaaaacttgaatccmaaatatataaatgtaaaacagacacactgcaataagaagattttttaaccaaagcaataaagaggagaaaaatttgarcagatattttacaaaagaagctatataagtgacatagccataaacatatgaaaaagatgttcagcattataaatacttattagaactgctaaaaaaaactcacgctaaaaaaattggcaaggttgtagagcaaatggaactctcatacacttctggtgaagattttaaagggtacaactactttgaaatagaatttatcagtgtcttattgaagtaaatttttatgaaccaaatggcttagcaattgcactcctggatatttacccaagataaatgaagataactgttcacacaaaggcttgcacatgcatattcataaaaattgtatttattctagccaaaacttagaagcaaattaaatgtctattaacaagtgaatggatgaacagatgtcatgtcattttcattccatggaataatactcagcaataaaaacaaatgagctattgatatatgcaggagcatgcatgagtttgaaaaatattatgctgacctaaagaacagaaacaaaagagaacatataaaatgattaaatgtatacracactcaagaataggcaaaattaacatatacatttcatccaaggaatgcaaggttagtttaacacacaaaaatcaatgtaatgcatcatcataatagaacaaaaaacatgatcatcataggagacacagaaaaagcattttataaaattcaataccccttcatgataaaacaaacaaacaaacaaacaaaccctcaacttaagggyacctatgaaaaacccagagctaacatcataagaagtactcaatgctcttcccctatgatcaggacaaggttatctgttcttgctaattttaataaacattttactagagtttgtagtcagaaaaactagttatgaagataaaataaaaattataaagaaatacaaattataaagatagaagaaaactatcttttttgtatattagttgattacatatattgaaaatcctaaggcatctgtgaaaaactgttagagttaaataaattcagaatttttagaataaaatatcactttacaaaaattaactgtaattctatacactagtaatgtcaatatgaaaatgaaattaagaacacaattccatttacaacagcattcaaaagaaaaaactactttagaaataaattttatttaaaaagtgtgatattcatgagctaaaactacataagaatcttgaaaagttaaataaaatttaaataattgaaaacccaccccatgatcatgaagcaaaagaattaatattgttaaaatgacaatattctctgtcttatttcgttctgtgctgctttaatagaatatcatatactgggtaatttataatgaatagaaatttatttaccttgtggttctagaggctgggaagttcaacatcaagtggccgcatctggtgaaggctttcttgttgggtcataacgtggtaaaatgggtaaagcttattaaacataaattgtaaccccataaatattatttttaaaaatgatattagtaacaggaaaaaattgagtagtagaaagagacatggatttatgttatggtttccttgcacattcattcagtgatcttcagcagattactcayccatctcaaacttgtattctcctctataaaaataaagataaaaatatatacatcacaggtttgttctgaggattaaataaaatataattttttcaaatgccatatttatgtcaaataggagtgtattagtcagggttctctagaggcacagaactaatacgatggattaaaaacaggagtttttaatctgcatttcttctggaggctatttttttgtttgactcaattgtattgcaaagattattttgcttatgtttgaaaaattatattataaataaataccttaatttctattgcatatcattgcacattctctatagctagagattttttcattgctttggatttttgttatttggttttcagtgagatttaaagtcaagtattccataggatctagtgagttaagacaaagctctgttggaattccttctatgaatgtgatttttttttttttagacggagtttcattcttgttgcccaggctggagtacaatggcaggatcttggctcactgcaacctccacctcccaggttcaagcagttctcctgcctcagcttcctgagtagctgggattacaggcatgcaccaccacacacagctaattttgtatttttagtagggatgaggtttcaccatgttggtcaggttggtctggaactcctgacttctggtcatctgcccgcctcagcctcccaaattgctgggattacaggagtgagccactgcacccagccgaatgtgaaaatattatagtttcagagagtttcacaaatattcctccaaagatttcagttaaatagcttacttcctcaacatattttcagaactgagtatgttctcagaactctgctagatgctactcatacagtggtgcacaagtcaagatagaatcctactctgaagttctttccctatctgtgttgctacatacagaccagtaactgcaagtataatcagtgggcaagaaccacaggatgttttagaagtgtatggcaaaggtgggggaagaatttaatggtcaagtgatgtttaacctaagattaagattaatcrcagcattatttacaacagccaagatatggaaacaacctaaatgaccatagacagaagaatggagttaaaatatggtaaatacatacaatgtaatattactcagcctaaaagaaggaaattctgccatttgtgacaacctggataagcctagagtatgttatgcttagtgaaataaatcagtcacagaaggatgaatacagcatgattctacttacatgagttacctaagaaggtgaaactcatagaatcagagaatagaatggtaattatcagggtctagagtgagggaggggaaatggggagttggttaaatggtataaagtttcagttgtrcaatataagcatattccagagatctgctgtaaaacatagcacttacagttaataatattgtattgtacacttgacaattattaagagagtagacctatatcaagtgttttattataaaaaaggaaaaggaaaaggacacagcaaattttggcaatgatggatatgtctattaccttgattgtggttcgtagttccatgggcgtttgcatatgtccaaactctttaaaatgtacacattaaatatcagtaacactttaataaatgtgttaaaaaagattaatgtattggcttcattaagaggaaacgatgcaatatataaggcaagctgataacatatcaggtaaaaaattcaaataaaaattttctattgagctcagagccaaattcagcaatataaacacctactaattacatctgtaatctgcaaacagagaagattgatggtcaaagtgagaagtgtgtttcttcaatatgtttattatttcagtaaattgtcctcgtcttaaaagacgtaggcctttttgtaaacaagtattgtgtgaggtatgtgtggactccaagagaaatctggagagtggctcttctctttggaaaactttactttgttcaggtaaaggaaagctcctgaaaacaagaarcctgaaaaataatttaagtgattctaaacccttaaatacactccaaagaagcaattttaggaagcttccactttggcttcaagagttggccaaatctgatattatttaaaagaggaaatagactatttctgacgcacagatatttgtaatcaggattctatttttgtcatcggaatttctgttagcaattagacggtccattgccttcaacaataacccctagttatgtaataccccaccagtaaaaccatccccagtactatgcattaatatgtggaatctaaagatgttaatctcatagaaacagggagtggaaaggtggttaccagaggatagggggaagagtaagggatgaaaaaaagagaaacgttgacaaaagggtataaaattttaattagactggaataatcagttttagtcatctattgctgtaatgcccacagttaataataatgtattgtatgtcccaaaattgcgaaaagaatagatttttaatgttctcaccaaaaaaaatgatgagttcatgaggtgatgaaaatgtgaattagttgattgaatcttttaatgatgtatgcatagatcaaaacatcacattgtactccataaatgtaatattaataatgattatttgtcaattaaataaatttttaaaattcgtaagaactccaaagaaacaatggtagcatacctacatatagcacgacacaaagaattatgtttagaaaaaataatgcaattacaaatatttcagaaaatgtttatctgggacttttgaagcaggaggaaaagagattgtgttaaaattaggagaaaatacattatctgtccttagatactgaggaggatgtactacaagaccagaggtaggcagtcttatgtagatttgttttaggaatggacacagctgaaatgctagaatgtaattttataaattaagcaattcctggatccaaaccgatatttctcaagtaatatgcataggtaccatgtaagccagaagcatgttgctgctaaaatggaaacataatcctatttcaaaaaaatttatcaaacattttaagtttataaaaagttcttgcttttttgttttctctgaatttttcttaaactatkggtgtctgctattatttatctattctacactcaagtatagagtgtcttctgattctgtaaaaattacataatttgttagtaattaaaaatacagtattccacattcttttgcaagagtttctgtgactttatgttactgtcccatctgagcaatattgagaaccattgatttggaactgtagtaatctcactctatcatattcgtagttaagccagagaagatctcagaaatatggaagagtattttgtaagtttcatatttttgcctagggtgtgttcacctatctcagctaaggcaaatagaagctatgtcttggggcatcttttaatctctaaatagaaaatataagcttctttgctctgcatgatttatgaggaattttcttcatcttcttaataagtaactcaggctgtcactctgtaagatctgaatgagcagggtaccttctaggttacgcttgaaagtgctatcactttggaaagcctgaccatctccttcctgcctagatgtctaacaggtgcattgcacagtagcctttttatrccttataatacaaccaatatctaactttttcgaaagaatccacagattccaaagaagaaagcaggaagtcatctatttaccactccgtaggttcaaattacctccattaatggaggctgtgtatattcctactacccatcattacccggtcatttctttgtcttgcaatacctagcagtgcctggcatagaggaggtagagaagtttgagtggacatttttcatctttatgtagagtgctatcagagcccttgagttgattacaatcagtggacacggacacatcgtgttttagttttccttccaacccctgattgttgtgtgttataaggcaggtcattgcaccttgctaaatctaaatggtttactttctgcccttgtggttcttttttctgtgctttcaaggctgattaatttcttctctgatatactctttcatcagatgtttggcaaaatttagtttaaattcattaacaaataccattctaaaggtcatgatggctttcctaaatctttatgtatttatcttacaatcactactcattttcctagtgtgtaacttgttgatggctcccaacttttatctctatctaaagtaagttgagtcttagagataggcaggggcagcactggactgaagaatttgtcttctttgtaatttcagacaattgctgcccctacaagtaccattataaatggcaattagagctgggcaggacagggagacagagagacccctgacagtatatgacattgcccttttgttccaatgaagtcaattcatattccagattgagactattttcaattaatcgtgctggttaatgtctaagagacactatctattatgttagtaatcaagatatattgtttcttttgaacttccaatatattttggccatgcaattctgttggaagaaaaatggtaattaggtttgctcagaatgatttattatttacaagtatattggtatattgtgcttattgtttctgattcaatttttttgaggaacagaattatdttcattatttaaaaaataaaaacattttaagagtcatatgttcataaagttctcagtgacatcatgatttgaattgagaactaaattatgtttcctgaataataggaaaacaccatttttaaaaaaaatctctgtgctgagtctttctgactggacaactgtgtgcaatggaaactttgcagctttacaaacctggatttaaataacaactccgtcactttgttgctttgtgaacttgacaagtggcttcacctttcagatcctcagtttttcagtctgcaaaatggggttaattatagctacctgagaaagtgttttgagcactacgtaacacagcattgagaacaggcctggcctggtgccggggagattgtaggcgcagagttaatgttagtttcttttttactcccatcctctctccatgacttcttcctcatatccgtcctctccaaaaaatgtccctgtttgggcagtctctcaacatatcaaaaaatatgaaaagttatgacatgtcatttgtcacatgattatgttctatctcattgcttagaagctggcacgttcaaaacaccataaatagtttttaaagatataactgtctttattttctcaacacgagtaatcttagaaaggctcaagaaaagaaatatttcagagttactggtgattaaaattaccatcaagtgtactggcaagctctgaacaaaagtacacttgtgacctgggctgtctggccacaggtcagtcaaagagtgacacttgtcagagagctggcgctcatttacaagacatcacacctgtagtacagacatcctgagtgcggtgctttgggaacttcacttttgaggatgtttgtttttctacctaatgcaagtatgaattaggtagcctataaaccagtatgatattaagattctcatagctaacagtatcttggagggttacaagaaagtcagtttacataccaatagtttttgcattatattatttttaaaagcatgtttatttatttgatcttcctggttgtatatattaccaatgaatgggcgcttcgtataaaaataaatctccttctatataaactatgagggcaaatataacttttgaatgtgtttagctgagagagtatttggctatttggattttaattcctatttgtttagatgctttgacctttaaatgaaactttgacttttctaagaaattcttacgtttttaaaggcccatcactgctattcttggtggtaaatagtaattccctttagaagcttacctatcctgaactcaactttgaattatctaatatttaccatgtgcaaactactaggctgggtactgcagaaacataagagtaaaagagtcaatgaaaataaccataatgaagcagaatgttatacaagagatattctaaagtggaataaccacattcgttttggatactgaattgccccatgggatagatttgagaatagcttttagcaaaaagtcatttatatacctatatacacacacatagttttaatcttcattcaatatatatgtatatattgcaatatatattatgtaagtctgtgtgtatatgtgtattacattgttatatattatatgacatatgcattgtatattatgtgtattgtgtattattatatatggtatgtattacctattatgtgtattattatatattatatatagcatatctatacatggacatatacacacacgtaactttactgrgtcatagttaacattaaaacatctcacaaactgcatttatgtaaaaggtacaattgggtaagttttgacatatggatacacccatgaaaccatcaccacaatcaagataatgcacgtatccatccctactaaacgattcctcaatcttttttgtaatccctctataacatccgttgctatcccagcccaccccagccacagaaaatcttcatctactttctataaatatagaatatagtttttattccctaggcatttgtgaaaaatggaatcatgcagtacatatttttatgtctgatttctttcacccagaataattactttgagattcatacatgttgtagtatgtatcgagagttcattccttttattggtgaatagtattgcattgtatgagtataccagtttccctgacaccatttaaagcctttttaatcttagccattctgataggtatgtagtgctatcacattgtagttttaatttacttgttcttaataactaatggtgtttagttatgtttgcctatgcttatttgcaatccatatatcttctttggtgaggtatctgtatttttcattggactatttgttttcttatcattaagtcgtaaaggtcttttatgtaytttagatacaagttcttatcagacatatgagttacagatattttattcatgtctgtggcttctgtttttattctcttaacagtaacttttgaagaacagaagttatatactttaatgacctctaacatcaatttttccttttatagatcatgattttggtgtcatattttagaattttttgactaattcaaggttacaaaaattttctcctatatttatttctaggtattttatagttgtaggctttacatttaggtctatgatccattttgagttaatatttgtgcatggtgtaagatatggatgaaaatatttttcttcctttattttttcctttgttcctttcttccttcgttctttttcttcctttcctttccttttttctctttctttctttctctctctttctttctttctttcttcctttctttttctttctttctctttctttttttctttctctctctctctttctttctttctttctctctttctttctttctacaaatggacatccaaatgtttcaaaactgttattaggaagactacagtttctccactgaattgacattaaacattgtcacaaatcagtttccatatgtgtgtggatctatttmtgcagtctttaatcagtttcattggtttgtttatctatacttayttttatatctatgtttatcaataccataaatatacatactgcctcaacatagaaactctctcaagacagtagcagggacaatcataaacctcaccctacttgttttccatttttcagggatcactattcttcatcacttcatgtccaatgtcttgraagccattgttttacatattttgtctgtttttatagttaatttaggaggaagactaaatatatttctggctttactattttatctggaagcaaaagtccaattaatggtaccataatattttatagtaattacaaataatgtacttatttcatcgaactgatatcagtcaagtttcttttacactagcaaattatccagctctaagattcctgttttctcctcacattacactcccatcaaataccacaagatgtttttagtctctttgccgcacatttcctccagttgtcccctcagtaactgcactctagccatatcagcatactaaatttcagagacctctcccatactaactactcctctgagtagtatctgagactcctctgagtctcagcttacatatcaggtccttagaaaggcctttcctggtcctcacactctcattaaagttacgcttacttttaatggcaaaaactgcaataacttttgcaccgattaatgttattatttatactgtttctaattatatgttaatttatttactcatttaacaacttatcgggctcattagaacatgatctcctcatagacagtgacttagcttgtctttccccactgcagaccaaattctcttaatgtattttgtgtctagcagggaagacagacattaatgatktctaacttaaaaagtgctataaaggaaaaagttaatgatatttaagagtttataatgaggggacctaatattcctgtgttagggttctctgggaaaatagtccttcctctgagacttaaaaggtaagtaatagctaacaaagagtgattaaggcaagaaagcagaaattcctacacttagcttatagaaaagacgcttggtaagagagaaagatggggctagaaggcaaggtggcaaccaaaacccagcttgacatgtttgaaatgttgccataccaaagaagaactaatcatattctgtattgctttggggatcggaggtgagacaagggaattagaacaacaattaaagtcaaggaattttggcacagtatcaagaagatctttctaacattcagaattgtccaaaaaccaattgtcttctttaaaatgcaataaatcctccgaaactggaggtgctcaaagtttgtatgatcattgcttaaagatgcagtgaaacagatgtctgtattaattcacaaaataatattctacttacaratatcctgatgtataattcacaatggaacttagactagcagttgaatacggaatcatctttgattcatcacaattttggtagaccctagtttccaaatatgtaaaaaatctatccatttctttccattgtaactataacaactctgataaagtcattgtctcttatcacctatctacttcagtagcctttgttctatttttcccacaccctctattgccacatcctgtctattcatccatgacagagtgatgtttttaaaagaaaactgataacattgcatccctacttaaaacatgtctattttgtcccatatattatatttttgtatggagtgcaaaatgtatattggattataaagctccaagtgaagtgacgctgtctgtctccccagtgtcattttatgccactttttctgtcaccctgtgtgttccagcaacactagcttgctttcagcaacttaattgggccaagagttctcttccaccacaatgaatttgctcatgctatttcctctgtctggacatcccttctgctaccactcctccttgtctggctattgtccttcagatctcatcttaaaaatttgttaatcagatatgattccatagcactcaagactacgaagattttgttattttgtaccccacagcattgcataccctttgtgtagaactttcctcaaatacaattaagtgttttgtgttgtaattattaccataggctatgtctttccacttgatagtaagttccagaaggatagaaggatagggatcatgtctatggtggccattcatctcagctttgatctagtatgatgtctaacccaaagtgtattgctcaattaatatatgttgcatgagatttcaatgttataggatggattgggaaatttgtagaatcacaaaactctagaaccagaaaataccttagatattgtctagcctgtcccattaatcttatacattcagaatttgaagcttaaaagtattaaattacttgtctaaagttaataaaaagattaatggcagagccagggttcagtggaagtcaggaattccaactccgaattcactgccctgtccaatatatcagaatacctctctaacatggcattttcaatctcacaacctgatttttttacttattgagtaaaacaacagcatgtccagtattaatgagctgaaaagaggaaatgtaatttgatcatcaatagtagaacgaatggcagtttttttaacattgtgttgaatattatactacagttatattattccaatgttccccatgcatatttcctgtttatattctgctagagaccttattaatgagtatcatcactcagataattaccataaatagaattggactcttttgttgtttaaattagtctgtatgggagagtctagttgaggacttatctctctgtgacctcatgatatttgggagtaatatcagtagtatagcatttgcaactgaaaatttggctatgggattccaaatatataaaaaggaattttaacatattttgctaacaagtgcctgtccacatttatcgaacacttactctactgttgttcttccaaatttgctgttaaaataaatgatttaaatagtctaggacaaagaaataaagataaagggtatttttcatttatataggccagatatgatgagtaataattcaactcttgaggagaaggtacaaagctagaccctaaggtgacaactacaattaatagtacagggaaaagaattgtgttcatttttgaagtgtttgaatcatacaaccattcttattttgctattttcattttgtgaattatttgactaattaatgaaagaaatatggattcattacaaagtcagttaagtctaggaatatgaatattacgatatattccctgaattatcaataacttgtgatgcaaacatttrgcatgttaatatggctgtgtttctcaacatcaaaaatattcttctgtcatcaattcatattgttgtaattcaattatagcatttagagtattgactaagttactgtaacacgaaaattccaaaaatgatggtggattcatcaaaatgatagttttattctccctcrtgtaagagtcaatccattcttggctarcagggacctttgctccaggaggtcatttagcaatccagtttcttattgagttgctcaactatctcctagagcatagtcttatttgatcaaagagagttcatcagcacatttgtgttccaatctcatgaatggggaaacagagaaaatgaaatataagcaattttctctttaaccgataagactagaaagtttaacccattactcctactaatgtagtctcatgcccacacctacctgagtaggttgcaaaatgttgcatctagctgagcagttctgtgttccgataagactcgtggggttctattagtaagtggactaggggataattaataacaatggataggtatcagtctgtcagtttgcccttctaacaacccaggtgtccatgcaccctcatctttcttcataaatacactcaaatcctcttcaagggggcccacataaaatcttattcagttactgctgcagctgaaaatccaggactggagtgaaatatagtcttctctttcaggtctggaagtggctccttgtgctctggcatcaacttacaaacttacaagttacatatcttcctttgtcctgatatataatggtggagtagggacaggataactgcaacaaaaactcccattcagaaacataaaaactgaaaagcacccagctgtttctggctcacagtaaatctcaaattctcctgggtagaaatsgtgaatactstccatcctgctgrtgtattagttgtttgggttaaccagcctcttgttctgctctcagtgagtattttcttcgtccattgccccctgcagctttgactttacatatttgggaggttcttcttcatccactgtccacatcagaaggtggcaagagtgagtgttctctccttggttcggcttggaaggacagaggattgtgttagagagctaacaacaaaggtcgttgtataccagccttgtggttcttatgataataaaattctttcagacccttagtagtattcttgcttatttgcttccaatcacttccatgtggagtaaccacagcaaaaacaatcttttgagcaatgtctatagagtctatagatgctcccctttttattatcttctcttctctgctcatctttccttcccttaacttaatataagcgaccttaataccacccaaaactaccgctctttacctctgagctgactctgagggacaatctaatatcatgctcgttcatgctcattgggatatggaaacagttagcttttctacactctgaagtctcaaattaggggaattttaatctattaaattgcagatcacaggcagagagattttccattagcagagctttcttttcttttccatttgcaaatgggccacttcttgcctaactttatttcatgtctcttgtaacattttgctgaaagttccaagtagcagccaaaacataccaaaaatacgacattaaaaaaaatcctgttcycctagggctacagcttggtaataatgcagtatrtttccaagttggcatatgttttgtaatggcatatcaaaggacatcactttctagcctgyaggtcctttctacctgccccctaatgtgctaaactaatgtcatgtattttgttttttattatgacaatgccccacttgcaggaaccaatttctataataacaggctataataagttaagcagctrtaacctaaaatacggtgccttgaataaagcagtttatttctcataacattaaagaagtgaaccatataagtgggtagctacaactcatttacaaggtcatctaaatttttaatatcttatttcttcattattcttcagataatatctttcattatccttcaytgtccttaaattcatgcttaaagcatatttccagcctgtgaaataggagaaaaaggaaaatgtggaagaaatttcctttgtaaaaggacatacacatctcttctgctcacatctcatttgtagaaacatggtcaatgtctaatcttgacagaaagagaggctaaaacaagtaatgactagttcacagctataatccagctgaaacttagggggttttgttgctaaatgaaagaagagcagaatgatggagaacttgcaggctatgtgctcctccagtgaaattccactgatatgaagacatttggttgacaaataattgmatcaccatataataattgaacacatacaaattttaagaaaggactatgaaagaccacaggaagcataatgctgccttctgtaggagactgaatcaaaagggtctccaggcaaaaaattgacagaactgacagaaatggtaaaaaggaataaggtacaaaactttcttcttaaccaaaaatttcaatagtagaaaagaatgcagaaccctaagatgcaagattattctccttttaaacatttgatcttacacaataatctttcaaagatgttgaatagtcctgatatgctaggcaacacataatagaatacattacttaggggagtgaattcttaggaggaatagtaatgaaatatgacaggcataacatctgaagtacagatgttacattctatgccatgtaggtaatttacctttctaatagaatcttattcctgtaatagtttttctctcaatgtaacacagtattgaagtccaaggttagaatgataaataataataagagaggtgctcaagcattatttttaaaaaattaaatatccactgattaaataatgaaccaggcattgtgctaggccctgggattacaaagattaattccacagtttctttgactggcagttgtctgattcccatggggaagacagataaaccaacgtattatacagtgtggtatgcactaacattagagacatttaagctattaaatcgatataagtaagagtgatccaattgtgagaatggaaacaaaaacaaaaaatactgtgaaattcccagccttaaatttttggagagtaggaaagtttggctgaaggctaaatatcatgccagattgttgaggaagaagacaagacaattgtcaagtttatttgtttatttatttatttctcttattcctgaacttcttctgtaacaagttctaacctaaaacctttgccacactgttggcaattagaatatttggtgaatgctgagttttcattttgaaaataacctaaactggtttcacatgttagacattaatttatttattcatttgttcattaaatatattttgagcacttactatgtgccaggatttatgtaatgaagaaaaatttcttgctctaacaccagtgcagcctctagttcactgagctgcagccaaaggacaaggggtgtaagtaaggaaatctctattccatggctcctacaaagtggactgcttgcaaatgacccatagtaaactgcccaggaagcaactagctaaaaataactagctacaaatgcctcttgcgagtgcaccctctaccggaggggtaaagaaacctcaccgaatgctacaaatgccgcttgcaagtgcaccctctactggaggggtgaagaaacctcaccgcaagccttatrctgtagtgcttcatgaaattagatattatgaaaagcccattgaacttctgattcaaaaacttctttctagcatctggtgtgaaaaatttctcaagacttcaaaataggtctgggcttccagagtgcagctattggtgctttgcaagaggcaagtgaagacctatctagttaacctttttgaaggcacaatcctgtgtgttatccatgccaaaagtgtgacaattatgccaaagtgcattcaactagcatgccacaaacatagcaaatatgcttaagaatcccctgtgatgggaaacatttcatatccctcggccctcctgccgaattcttttcttcctattattagtcattctgaacgttatttttttcccatggggtccaaaggtacccaaatatatgcttgcaagtggaaaaatagggtacagaaatcagttatttgcagtttttctattttcatttgtatgtgaatttttaatataaacgggatgtgaagcattaacgcaagtcaacatacttcggtgaacaagtttcagcaattcaactttatagcaattataaataaacctgttaagttattctggacatttggattgacgttgggttggcaagtaaattttttactgacagcaactaaatgatgtttatataatttttatcatataatagattctatctttttactatacttttctaagttgtcccacatgcaaatacatgtttttaatgttatctatcttctgtgctgtgcctataagtttgttattaaaatacattaaacaacaacataaacttcttttcctcaaagtacttctagtctagttggagaaacaacctagaaaatgcaccaacaaatggggcacaataactactctgagagagagtggcacacagtggacgcaaagaagaggttcctgatgcagctgggaagagtctacatgggcctctagcaggagaagatactggtcttgagtttggagactaagtaagcatctccaggtaaggtgtgccatgaaacaagtaaagcatacacataaatggaaatgtgagaaaacaggatatgtttgggaaatagaaagaattaaagaagtacagaatatcatattagtgtaaaaaagaaactgtcagtgtgaaataattattggaagagaagtcaggaaatttagattctcctactgtctttcatttctttcattaaaaccattactgagaccctactgatgttccaagcccagtgtgtggctctgggaaaacaagaatgaacaaaacagacatgggatttgcctttgggaatttcacaatttagtcagatatagacagatatagtcattaatcaaacaagctcatcaataaatgtataaataaataccctctaagtgtgcaaagacgcagtagcatgaaggtgctcggtgagctcaatgagctgagaaaaaggctttaatttcctttctgtaactaaaagttatgatgctttccaaagcctcttccaattccaatgtttttatgactgtaaaactcatattatttaatgtggattctaatagtttgagtttaagattttcwtaatatattcagaaagtgaagtgagactatagaagtccaatcatatttcctcaatactttaaagctgtttgaagatgcaaccagaaaacatggattcgggtattaagaatattttttcagacacttctgtttaaaactttaagaacagtaacatttcacacacatacaggaattactgtgttaatagatgtgttcaggaaatgccatgcaagataaagcacaaatgatatcataaacaatagacacaacagtctttggagagtgtgcactgtcttggcaacacaaaggcctgctggtaaatctctacacacctgggatgactggggaaagctgccaaccacaactgcatttgtggccttaagcattagaactaagaacaggtagaagtcctggttcaacaatgactacatgaagtagaggaaggagcaggtgtattcgctcttggaaatctactacttaatatcatggttactttgggcaaggtagttcaagttagttactgtgcatatgcctcagttctgtcatgtataaaattagaatgaagaaaataatggccttacctaccttcctaccttatagatttaaggaacaaataaagaaaaacaataagagggttgctgtgaaatgacagagagaaacataaagagaggagagagagagcttctttggaagctgaaggcagtcagtatttcttacatttattttgtaaaaaatgaattttctttaataaacacagaagtgaatgtatttctgtgactgttgttttcagtttgcattttaaaaattgccctaattgcagcaaaatttgactagtctgtgttggtttgtatttattttttctctttttttttttacagctctattgatctatcattggcatataaaattttatatatttaaggtgtacaatttgatgttctcatatacatatacactgtgaaatgattaccatgttttttcttcttgaaattttattggtctatgaaatctagaagtttggaaaagtgtttaatgtagggcaattctaaataaaaattcattattattcagttttattcaacaagctttcattgaacatcttcattttgaagttcttaaattgccttcacatttgtaagccttattttccaacaaagtatctggtccttaagggcataaggacctctccaangtcttcagaatttctcaaggagctaacccagccatgtgggtgcacggtagacattcctaaatgactgaatcagatgatggtctacacttgtttttgtgtagaaatgagaatgagtcactgtctggaacttgtcccccgacttgggaatgttaagcctttggaccacttttccctggctccctggtgggcctttcatccttgcaagggcctcagggacatgatggagtttccttttctctttaatgtccctttcggttactcaaacctctaggattcttttacccactctaccagtttatgctgcatactgggatggagctttcctaggttcctcttttctcttcctgaaaaaacacacaggctctttttacattgaattttaatactaatccctcctggtaattagacatgaaataacaaaaatggtaaactatatcaaattacaatggttaagaaatcttactgaattctatcaggcatgtttcctggtctataatttttgacttcttgagggaaatgctaactakgagtcccaaacatttattctttaaggtaaatttctccagaagtcttattctaaggctagcatatccaatcagagaaagaaaattaatatgatctaggttaattaggtgctatcctaggctaaataatagccacctaaagataacatatcctaatctcaggaacttgtaaagttactttataaggaaaaagggactttgcagaagtgattaaatttaagtatcctgcatagggatattatcctggattatctgggtgagccctgaatacaatcaaaagtgtcctggtaagagagaggcagagggtgatttgacacacacacagattgaagaggaggaggcaatgtgaccaccgaggcagagattagagtgatacagccacaaatcaaagaatgtcagcagccactggaatctggaagagacaaggaacagattctctttagcacatcagaaaagatggtgcattagttgcagtggctcaygcatgtaatcccaggactttgggaggctgagtctggtggatcacttgaacccaggagtttgataccagcctgggcaaaatggcaaaatctcgtctctacaaaaacaaaaaacaaaaccaaacaaacaaaaagcaaactaactaaaaatgaaccaggcgtggtggtgtgcacctgtagtcccagctacactggaggctaaggagagaagatcacctgagcttgggtggtcaaggctgcagtgagccatgattgcaccactccactccagcttgggtgacacagcgagatcctgtctcaaaagaagaaaagaaaatattgtgatctggtgaacaccttgattttgaaccaataatactgatttcagacttctgacattcagaactgtgagacgataaatttctgttgttttagcccatgacatctgtagtgatttgttagcacagccataggaaactaacagaagggcccacttgtcttaaattcctatcgtttaacctgtggggttggtaacatmcattttaaggggttcttgccccgtttctttaccttttctggtcattaattgtcaagctgagcagaaactatttttatattactggagagttatgcttgagaaattgggatttgagaaaggcacggaaagaaagatgatatacttaaccactattccttcatctaataaacgttgtgtaaattcctactatgtgtcaagctatgtgctaagtcctagaataaaaatggagtaagacaggatttttgtccttaagaagttcagttgagtaggagaattagacacacacataygtataattaaattaatttgtggaaaatgcagtaatgattatgtagaaagagtattgtatttccccagtgcatttcatattttgaaaaacactgtctacaaaaaagtttctgtgtttaagtaatatataataggttaagaacagttctaactgccaataggttttataattaacataggaagatcagtgttatactactagcttaccattatttcagccaaaaatcaaaggtatctgtcatttgagtttttattgtaaagtctgttcctggagaaagtgtgaattttcttataatatttaaaatactgatgtagctacagaactctctccccattactttcaagaatggcctttcctagtttgggaaatacagcaactatgtcattaaacaatctggttggccaggcacggtggctcacgcctgtaatcccagcagttagggaggccgaggctggtggatcacctgaggtcaggagttcaaaagcagcctggccaatgtggtgaaaccccgtctctactaaaaatacacaaattagctgggcgggttggcacatgcctgtgatcccagctactctacttgggaggctgaggtgagagaattgcttgaacccaggaggtggaggttacagtcagccgagattacgacattgcactccagcctgggcaacaagagcaaaactccatctaaaataataataataataataataataataataataataataataaaacaatctggcttagagaaaattgtattgcaaacaatctcattaatgagagttcctgcgtaacaggacactagctctgtcccttggggatggcttggagtactgtttcctggtaaagcaacataaacagatctcagtcccctcttacagagttatgaaataatagccataagtaataaccaacatttatataagcattccatcattttacaaaataattttacaaaagtaactgattataggttgttttaattggaagcaaacccagtttcattacctcaagcaaatttcttcatctcttttagcttccgtttctcatctcttttttttttttgagatagagtcttgctctgtcgcacaggctgggttgggtgcagtggtgcgatcttggctcaccgcaacctctgcctcccaggttcaagcaattcttctgcctcagcctcctgaatagctgggactacaggcgcctgccaccacgcccggctaatttttgtatttttagtagagacggggtttcaccatgttggccaggatggcctccatctcctgactccgtgatccacccgcctcggcctcccaaagtgttgggattacaggcgtgagccaccgcgcccggcagtccgtttctcatctttaaagtgagagtgctaacacgcacatggagggctactatgagaatggagtgagattttgtatatgaagtagcaaagacagagcctgggacttagtaggtacattattaagagtkggagccattttttaaaccttttgtctttttgttatttttgctgttctgaaagtckctaagcttttaaaaatggtctcttattttactattcttgaattgtttcacgcttctcaactcatgacaagaacctattctgccaatgaacctcctgcccccatctattgaaattaaagcttaggagcaccagtgcatcccagaatttgacttccttccagtggagagaccccttgggtttttcgtgtgctctttccctgatcctttaggtgtcacatggtcagaaagaacatagtattatttataaacaatatgctctctaacttcagaaagatttaggacagctttctggatttggtcatgcatgaaacaggaaaaacaggctattagaaaattgtgtgaagtctaacagggacttgatatgaattcattttgatttttaaaactgaggactgcaatcattaatcagttcattaaattaattggaataagtatattgcatgtagtgagagtagtagtattttttkaaattttagttttaattatatcctatggcctgtgttgtaagattttttattttaagagtttaaaagccattcgattaagcaactagtagtaaacttttctgtctctcattagttgttaaatctagaaaagttattggtttaacaaacctttattggatatctattttgcatcagatttttttctacatgaatgacatttttttctctctcttttctaatactgatttgttgcagtgtcgaataggtacctgggtcaactccacacacttctcactcttcactggacctctggtacaagattgagaggattcctattacttacaaacagactaggtattaaaacaaaaagattcccgaatagagtgaatctaagttcccctagagcccctaagaattacatcagctttaaccattaattycctgggttcttcttattcagtaatgtcttaaaacctttttatcagtatgggatgggcgggcaaggggataaagaaactggcggctggtgggaagccttaggtaaggctgtcaggggggctttagtttgggagtgggataatttgctgaggaagggtgggagaaacgtgaactagcacacaaaaggctgtttccggctcaaatttcgttaccaaggctctttgagatgaacttttttgggggaaaacaatcagtctaaaagagctgtgtcttcttgtktgtgtgtgtgtgtgtgtgtgtgtgtgtgtgtgtacaagggggcggcgagggtccccacttttagtatgagtagcattgttcmcatgtttgccagtattttggagcctggcaggcctgggtagaggctgcgggggacgcctccaagttcccacccgggacatcctgaacagcagcagccacarcaacaggctcgcccctagacaaaggggcmggcgcggcggagcagactggtgcagcctgggccgcgcgctcagagcgctgggcgtctgggcagctgagtgggcagagctgacccggtgcgggtgggagtcagggcgcccggaaaacccggctctgggtagcagaccccgcccgggctggctcggcgccgggccttcgggcttccactcagtctttgaccctcggtcctcgctcagcggcccggcaggccgcacaactgtaaccgctgcccyggccgccgcccgctccttctcggkccggcgggcacagagcgcagcgcggcggggccggcggcatggctgtgtcctggaggagctggctcgccaacgaaggggttaaacacctctgcctggtaggatggcgggctaggctctccttgcgttytctctgtcctgcagtgattttgattcattctctgagcgtgcacgggtgggaagctggaagtggaagttttgtcttaattcgaacattctcaacttaacaaaactttatgctggagataacaatgaacactccccctcccaccccctcgcctgtcccccaaatgcatgagaatttttctgcacattgatgggagagatgtggaggaagagggaagaggtcattttcmgtgaatacagcttttctttttaccctttaaacatttttgctccctttgttcttttcccagattacttctgtttgcttggggtatggtgatgtcattaatttcttaatctcattttgtacggcaggggatagctgtaaatcatttaggaaacctatttgcaacccaaatgyttagtctcaggtgaaagggctgggtaaagtcagatttgttttcctctgagtggttttcagcttgctggttaattgaaaatgctttctgcagttactgatttaggttccattgaaagcactgtgtcgaagaatttacctgtggtttctattcatcaggtaataattattttcaatttttgwtttctgtctctcatgtctgattggtttagttcatctggctctccatgaatgtcctgcttttctggaaaaccttcttgctgtataaccaagggccagagtatcactacctccaccagatgttgggggtaagtaagstgaacttggataatctggtggaatgggtttaacactggcagacattgctacaggtttggtcagttccattcattaaagaaatgtgcactcttcactttgaaaacctttgttgttctctaaagtggtcacattttcctgatttatcatttacacttgtacaagttaaaaagattgactctctcaagaaccaaaggtaatatctgctgaagtgaaacgaatgaacctgccagaccaggttattggtgccttaaaaaaattgctacttattgccagctgctaagtaccctgaaggatctgattcactaggaggatcaaccaataacaagcttttagtatatacttatcagtgcttttagcctgctcatgagcttatccagaggatttctgcactgtttgtttttactgacaactctcacaaaatatgggtctaatggggttattcatttctgggcagttctcagtgcttgctttgggttagtggctgatgatattccagtattctactataatatgagaaagatactgggcaaaacttttttctgatttattttatgttaatatttttctttcttttctatgatgtttctgatttcattcttctgttccatctccttcttatttgactgcttaacagaagatagtgtcactgaaggcatattactttgcacaaggagattgcgttttctttttctttctttctttctttyttttttttttttttgagacagagtcttgctgcratgcccaggctggagtgcagkggagtgatctcagctcactgcaacctctgwttgcctggttcaagcaattctcctgcctcagccttctgagtagctgggactacaggcacgcaccagcacacctggctaatttttgtatttttagtagacacaaggtttcaccatgttggtcaggctggtctagaactcctgacctcaagtgatccgcctgcctcagcctcccacagtgctgaaattacaggcgtgagccaccatgcccggctgagattgcattttctaagcaacaagcaaaaagtgtaaaaccctgcaaaaacttagggaacctgaaaaaatagattttgcattttggtgagtgggggggtgcagaaaaaaacacattttgcttttttattttttttcatggtttaatgactacttaaaattaagacgagctcagacaaattcagtggaaccagctctcccttctatgttttacatggagagatcttatttatctgtaattctcagtacccagactagtgattggcacatattaagcctgcaacaagttgcagttgaattaattaattaattttttatacaacaaagtaatatcataatctgttgatcacacactttataaagtttaacttctaggttttaagccaatgggttgaaaaaaatagtctgtaaagctaaacccatttcatttatttctttcatccatccaatccaggaactgtcttgaaacctatacatttcagatgggcacccagagagtaagacctcacctcgcccctcaagttgcttacaatataatggaaaaaccaacaaataaataattataattcaataaacaagaaaaggtttcttctaataaacacatgaggtctgataactttttggttttgttttctagtatttccccattaggtgtaasttaatgaataggacgtttttcagtggaagctttatctcatctattacataacttgatgaacaacttggagaaaactctttagatatagaatggtaaaatttgctctggatcacgaggtatttgtattaatataaaaatctaagaaytggaaatttattgcaataacctagaaagccataactgaactttggattttagctttgtgagatagtataagctaaaataacatcttatttcttaaaaaaataattatttggaaaccarctcattaattttcatgaacttggatactgtataactgaatttcaaatttaatttggtggtaagtcagatatgattaagatcacatatgcacagaaacataaaccaacaaatttggaaaacatttaaactatgtttcacctctctacttccatcccacttcactgcttctgcttgaataacagacagggtaatgagcttcaaggactgctgacacatagggctcaataaatattgatcaagggaatgaagaaaaaaaatgataaaaggaccaaatggaagactaggagcataaaggataagaaacagattcaagaaaggagaggttgttataaattagtttttaagaacacacaagtataattatagtgagttgatatttgagctatctggtaagtattctccattttaccaagagtcactgtggacaggaatggtctttctacatgctgagagataaaatatgacttataaacttctcagtaattatctgttatgaattttccagtcattaatttatctaagctattttggaataggtattttcagtctgtatattaccttttattggaaaagaaactccttctacagttttactatctatgaartagtgtttaattttatgtcctaggcttatcttttctaatcttataataagtgttgcattatttcatagagtaacaatttgcaggcacttttcaaattgcaaagaaatgcagtataacaaagagatagaattaatttttaaataaatattgctggttctgatgttttacatttttaagaactatatgttattaacttagcatcttagagtgatgcatcttagaacttagcaaacacttggtcccactggtatacgcatgtgggattcctgaagagagtcaaggtatattataagtctcttttaggtggattttaggtttgtaaaaatcatgatgttatttctggaaatgtatttcattgtaccatttaaaatgcaaatagaaacaatactttcatggctgaacattttgataatagctttgagtataaagttgctgtcattcgtctgtgaaatgtaaggtaataacaaagttgtactagtacaggaaggacccacagaatatggtccatttattggaagacacagacaatgagaaacagttaattcttagtaattgcttgaaaatctctattttctattgaagaatgactttttattcaaatgtttacttatacctgtgatatgccaggaattttacaaatgttttgtttaagctgggaaactgttctctctgttttacatacaaggaaatatgggctgaggaagctgtatgactcgctgaaataccttttaatggtcagtgtcagagctaggatttgaatacagccctgtctgacctctgctttttcatcatactacgtagcttttctaaacgacttcactggtccatgtcagatacttatactactggttagtattaatttttacmagtgctgcccaacagaaacataaagcaagtcatatatataatttaaagttttctagtagcacattaaaaaaaggaaaaagaaaccagtgacatttatttaataatatgtggccaactaaccaggctgtaaaagagacatcaggacatgggtagtcctcttgctcctcctctactaagcaggaattgtcaaaggatgggaagttgtggaactacaaaaattattggtttgggaggccaaggtgggagcattgcttgaagccaggagtttgagactagccagagcaacaaagtgagaccccatctttacaaaaataaaaaaaatatacatatatatacacatatatacacacatatatatgtatatatacacatatatacacacatatatatgtatatatacacatatatacacacatatatatgtatatatacacatatatacacacatatatgtatatatacacatatatatgtatgtgtatatatgtgtatatatgcacacaaacacacacacacacacacacacatatattagctgggcgtggtggcacatgcatgtaattgcagctacttggaaggctgaggcaggaggattgcttgagcccaggagtttggaggcagcagtgagctatgattgggccactgcattccagcctgggtgacacagctaaataaataaataaatatttaaataaataaatttatttatttatttatttaaataaataaataaaattggtatagaactataaaaatctccctgacttctgtctcatcttctgagttttctgaaggtgggaatctttgagaatgaaggtgaaagtatttacttctcagaactagagtatccacttttatttctgggttattattctcgtaataaaattaaagagtaaaaaaaatacatacgaattgatagaaaaaataagatcttaattgctagaagataaaatataacattgggattaatatgttttattgggggttctcatcatgattatccttccccagactggtctgatccagagtggaggcaacgtggtcatggctggtttatgcctgagttaatgtgctaatcagactgtgcacttcctaggagatgtttaattgtgacatgtcatgagttttggaatcttaaaattagctaagaggaaaaaaaaatctattgagagaagccaaaatgaacaccgaaacaagcaaaccaacaaaccaaacaatagcctgctccactcccccatggcaaccttttaaataagtcacttcattgattgcttaagattaaatccattttcatttatttattttcaagaatggaaaatgtagttgcctgaactttatagaaattagtaacaggttgtgttcaactctcagaaatgtagttttcttttctttttttggaaatattggagcagtttaactcaaaacaccatttataggagctcttgaattcatgtttacctgttttgagttgcgttttttacattttaataattaaagaatatcatgtaattcccataaacattttaacttgaaaagagaatgattttatgatatcagattcaatgtgtcttagttatatatatatattcaatgtgtcttagttatatatattatatttttccctccaaactattcaatttcaaactagttattcacatggtgtcaggataagattttaatttttattttgcttttattcacaaatattgttttagatctgctgcatgatcttgaagctttttttaaacttttattgaaatatctatgctcttgagcattcagattctttctagtgaaacactgggattatctttctttagtcaatcattatccattagaaacattaactaatttaccctctcaagagtcctagaagttatatcataacattttacagagacagaaatctgatgtcatgtgaatttcttaaggtcagagactggagtctctggacaaatggatctaggattttaagtcaatgttagtttcacagctggcctgggcagctttaattctgctgagaatgaatatatgatccctgttactttcagaagagatttggtcattaaatcctaattatacagactgtaaaatcactagctagagttgctcaggcacatgttatgataacaattcaggggacatttttagatgagtgttattttgcttatttgtttttattcttaacattctgttatttagacacaattttcttgtttattgatgggtgaaatgggttatatttctttgatgaaattatattctttatctatttacaatagacactgattcatagagttttagacttggaaggaaactttgatatctttacttaacttttcattttccgaaatggaaaaatgagattgaggtgatttgttcactatcacctactgaattagtgacttggtcactatttagtctrttgttctccttagtccaatattagccrctataatgaacagctgtatgaacacacgcaagaacattttaaaccccacactgtatggactactagctttacattttaggtgaaatgatactttaaaatgtctagcaatttaagaagctagcgaaaatgattgatttactctcaaaataaaatatatttttagtattatagttgtttgagacttgccaataaattgtgaaggaattatgagmatttttatttaaatttattctgatttcacaatacttttcagaattctaaggctcaatatttaacctcgttgtgatatatagctaaatgctaactgcataattctcctttatcaatatcatcccaaacagcatagaattggaagttagaatgaatctcaaagatagtcaaatctttattttttaataaatgatatgaataatatcaataacagattgtgctcagtgataactggctaatactagactttagtctaagagctttgcactgattaatttatttaattctctcatccatagtatggaaggcatgatttcaagtttttgttttgtagctgagaaactgagttagaggggttctataacttgctagtgagggacagaagcaggactcaagcccaaagatcctggttccagaacttgtattcttgttttataaaattttaattgacaaatgccaattgtatttattgtgtaccacattatattttgaaatatgtgtatattgtgaaatggctaagtcaagataattaccatgtatattaccttacatgcttatctttttttgtgataaaagcagaaaatctactgtcttagcaattttcaagaataaattgttataaactatagtcaccatgttgtacaatagatctcttgaacttattcttcctgtctatctgaaattttgtatcctttgaataacagctacccaaccccctcccacccccaccagcacctggtaactaccattctactctctacttctgtaaattcggttacattctttcttagatgacacatataagtaacattatgtggtatttgtcttcctgtgcctggcttattttacttaacttgatgtccttcaggtctcctttcatgttgtcacaaatggcaggatttccttcttttttgtaaagctgagtagtatcctattatgtatacataccatgttttctttatgcatttatctgttgaccaaatttgtattctgagccattgtgctctgttgtttctttgcaacattaatattaggttgaatcatatagattggtagatcagaaacagtcaaawatcagccattttatatggctcaacctaatagcaactgttaccatttattgattatatatgacgtgtcagacacagttcttggccccttttataatctcatttaatccttatatttaattgaatccttgtaacaacagtagaatataggaattattgatttttacagaattaagaagcttagattaggaactatttgctttttacagaattgagaaactgagattctgagtggttcggtaactttctgagtagttaggttacatagctgactagtagagaagcccaggttgagcccacacctgtctgaaactgaacaccatgctctcaatcactctgctttccaggtgaggttctgaaacagatagtgttagaacctgcaattctctactgttgtctaaggtccttatacattttgccatggtggtgctgaatatactgtttgtgtttccctctgtttgctgtttgcatgttagtgtgctttttgtatctgttaagaagtatttgatcagaagtaaattcaagcatatatgcattattcttatatatgaggtggacttgtataactaatacctactctgttagtttgctagggctgccataacaaagtaccacagactgggtggtttaaaggaaagaaatttcttcatagttctagaaactagaagtccaagatgaaggtgtcagcagggttggtttcttctgagggcctctctccttgacttatagagggctttcttcttccaatgtctttgtatggccttccttctgtgtgtatgtcttaatttcttcttataagggcaccagtcatattggattagggcccatcccaatgacctcatttaaccttaattacccctttaaagattgtgtccaaatatagttacattgtgagttaaattcaacttggtacaaataccaactttgtcagtcttcctctggaagctaagcatgcattttgagaaattaatttgaagttaatgtatttttttttctccttaattgtagaagcccagctgagcactagcattccagaatgacatggcaaaagggtccttcccaggcctttttaggaaggtattgtaatrttcctccttagaggtttgtcgagctttattcttagccctaccctacaactattttaaacatgctcttacacaaccctttattccctccattacctcaaagaagaaaatcagataaattagcacctctgaggagtagcatcaatattttattttgattttttagatcttggcatcaagagtatgaattcagggaactgactcccagaaaaggaagtagggaatattgaggaactactttaccttgcacaccactgaggccaataatagtagcagtcgtcgtagccctagtcctagtcatagttgtatatactttcttctgggcaatgctcagcctggagggagaggagcctgtagaactgtggactgttctagtccatttaccctgtttgatggatgaatttcatatagttaaatgctttctttatggactcagtgcaaagctgaatgtggaatgtaggtcctctaactcctggtcagtgtttcttcatgtctatcatgctaagcattgtgtttatcataaaactgattttaaaattgcctaagtaattctggagagaaaaataattataatttcttactgaaaaggtcatgggctttggagccatatggatatgaatttcaattgtggttaagcatttctctccctttgtgattttgatatactattctctcagcctaggtgtaaaccctactcataaaatagggcttaagccctactcttagtttagatggaaggacarcatgagaaaatgcaggtgaagtgcttagcacttggtacataggcattcagcaaattgataactattactataaatattaaataatggtaattagtattaatggcatcaatattatgaatagaaccaaatggtaatattgtattgtgtatatatatatacacacacacatatatatataacatatatatgttaaaaagaattcagagacataaagatggaagggatttgctgagcatacagatgctgagcatatgagatgacacctaggacagagatttaccctttgatctattatttcagtgctcacaagggtgcttaataaatggctgtttgatgatgaggttgtatgtttgctcstcagtaggaacatgttaccttcagtcctttggttgacctttggctgcctccctgatcctctggagagaggaaggctatttactgctatttgctattggcaaaaagtttgtggcaatttggctatgattsttgggtggaattttagtttgaggtggaacatatttcattcaacaaaacattacttaatactttttattaatcttcactgaatcttggaatttcaacagataaataagataaattacctatctcagattactataaattttaaagaaaattaaaataaataataataatagctagagctagctttcattgcaatcttttcatgggcctgacattgtgccaagttcctgttatgttctttgctgcagtctccactattctacaaggtaggttctattcatgagaggaagctaaagaacagaatttgtaagcaatttgcgcattgattataagcacctaacatgaagtctattccataataggagctgtaaaaatgtcagtcgtcttctttcctccctctgctcttatccttcacagcctcataaaataattcaccttactgttttataccccaggaaaacatgatggaaatattctacttatctcagaatattgtgctgagcattatgacttaatacataagaaagtagtttgaagaattaagtttcacagatgtggaagactgttgttatgtcgtgtttttgtctcctatcatttcacaaagcttttaaggctccagtcatggtgccatgacattgttcccctggacatcattaaggaaagtttgaagaaaggaatgagacgtttgtcttcatgccaaaaaaaatggcagtcaacccttagcatgcaatatgctttacctttgcagtgtgactgttgaagtgggatcgtgaaagtctgttacatgttgtacttaatagcaaaacaagtatatacagttgactctttaacagcaaagatttgaactgcgcaggtccagttacatgcagattgttttcaaccaaatgtggatttgcaggatatgaaacccgcatatactaaggaccgacttttcctggaggccaattccatggggcccactggggcacttgaatattcacagattttgttatatgtggggatcctggaaccaatcccccacatatgccaagggatgactgaaagagcaaattacacaggtagtgagtgagtctatgtgattcctagaattacatcctaaagcaagtttgtgatataataaaacccgagcaatgcgataaaaagttagtgtctagtgaaaagtagtttactttcagttctgacaatgagactaaaggaaaagtaaataaaggaaaagaaggactttgctcaatcagtagaaattgtgttcatctttagaaattagaaagttgaatttgacaatggctctcatctctaaatggaaactatcaaaggttttcatggatatgggaacccatgaaaggattgttcaaggtctccagacacatatcaagactttcagaggtctgatatattttaagggaagaagagatgagtgatataaccaaagtataataattttatatagctgagtgttttttttctaatggaggcattttaacaatagggtataataaagaaaagattatatggaatgcctttctgactatatctcttttctttatgatcaaattttcaaatacctgatttcaaattgcaaataatctcattaatgtgatcatagaaagctaaggtccggtgggaggatctggagtggcagtgatccaaacaagtttcttttatccccatgctatacttttgattctctttgtaagcttccttttcttccaatatgtcttcctttacgtgcttttcctttagcatcttatactgaataaaatccctgctactctaccttatatggaagcatagacttcaaggagggtgaagatctcataagatgagaaagttgtagaacaagaaaataaccacctattgagaatacttaggagataaggtgatgagattacttttatttctcactgattttccttggccacatttcattttttttttttttaagatgaaacaaaacaggatctcattatgttgcccaggctggagtgtagtggctattcacaggcatgatcatagtgcactacagccttaaactccttggctcaagtgattattctctggggttgcagatgggcttggactgtgtagaacccatcactgaactaacatttactattttgattttgtacatttttaaaaaacataagagtgaaagaatgagtcaaacgtaaatcttggaagagtttaktttatgggctgagaatggatctacagggtttctttaactttgatctacttgaagaaaattggtcttagacttgtactgggtttaaatgagtgtgtcatgcttgaagaaaatacattttgttcagtgcacaaattttaggtatatgaaagttaattcgttaaagtcctttatgaccgtcattctgattcttgataaaatcaagtgtctgctatcaccttttcctgagcacatagtgtctatcagctcaaatatcaactatggtaatatttgtgaaaagtcgacaatatcagtgagagtggcatgatgtcatgaaaagaacatggattttgtggaaaattgatttaagttgaaatctcaacttcacctcttaacaaatatacctgtaaatgatttattaaaattttgaaagccttagttttctcagttttcagttgagatttatattattaattgagctacatgaaaatttcaatatagaaacattttgacttacaaaaatgacaatttaggttaacctgtgtttagtttaacctaatatatcgcttataagatttttttttgtcaggggacaggggcagggaaagagaggaaaagattaaccaaggtgaggaagaaatgagtgtaagactctcaaaaagtgttaattcccttcatcctaacggcaagttatagtagacaaatttatgacaatgctaagacttatctatttcagaaaacatctttggaattaagaatgttttgaagttgaaatttatttataaacatttgttaatgattataaaaatttccaacagttaagagaaaataccttctagtttagagcaaagcatgcattttgaagtgatatgaaaaaatattttgccaatgacagtatatattattttcttagttagaatttcaaaaatatttaagctcacagttaattgttttccaattggctgtggtttccacattttagctcccaaattcttggcctttataaaaccttcgtcaagcagctcataaattgatatacacatgaaaaagacccattttataggagagtaacagtgaattatttccataaaaacaaaaaagttttaaaaacttttttgatatcaagtacaggatatttaattaaacatatacctcagttcataacacactatcctcatgggtctgtgccagacttccttttactttcttcttcattcattcattaatttatcaatttaatcattctccattatccaatcccactctttcagcggtccccagtccccaagccacagacagagaccagttcgtggcctgttaggaaccgggccacacagcaggaggtgagcagctggcaggcaagcaaaacttcatctgtatttacggcggctccccattgcttgtattaccacctgagctccacctgctgtcagatcagctgcagcattagattctcttaggagcatgaaccttattgtgaactgcgcaggagggatctaggttgcaagctccttatgaacatctaatgcctgatgatctgtcactgtctcctgtcaccccccagataggaccatttagtttcaggcaaacaggctcagggcaatcactgattctccattgtggtgagttgtataattatttcattatatattacaatgtaataatactagaaatgaagtgcacaataaatgtaatgcagttgaatcatcccaaaaccaccactgccccctccaccaatctggaaaaattgtcttccccaaaaccagtccctggtgccaaaaaggttgaggaccactgcattctcccccttacaatagcagtctttctaatgtgcttgatgtttatccttttttcggtgttttatgtatatgtatcttctaattcacaaaaatggcattggatcataggacttatttagtttcctaatttttctcatctgttattatatttttgaagtctatttatgtggcygtgtgcttcttttgtttcttgctaccaactgctacatggtattccattgtttgcatctaccactttttatatatccattcttccaggcatgtaaactcagattacctctaatatcctgctgcttcaaatagcatcatcatgaatataaaggatactgttgtaatataattattatatggtattttgttggatctgcctactaggttttcttttaaaaaggagcacaaataagttgttcattttgtttaaaaaatagcatttttttagttacttgttataggagttggatttagtcagattaggataaatgtgaaaataatatcaccatgtggaatgagtttacaaatattaatatatttgattttaataactagttttcagcaagaaaactaaagtatattgtgtgatgtagggaatgaatgtagtgagtattttaagtatgatttaacttctatatatctttcttatgaactgcgcataatagtaaccatttaaccaaaaaaagctacatatatatagttacagtaaaaacaacaagcctgacaaatgtaacatcaagcttgggagtactaggcaatggaataaaaaatataaaagagaacattaaaaggataggtgcaaatagtggaatggattttcttaaaagacaggtaaataaaaaagtagaaaacaactcaccctaacttcctgaactgcaaagtacagtatagtagatagcttgtaccaaccctaatgagcaatcgtaggttaggaaggttgtgagatggaatatgagtggagatgttttgttttgtacatggcaggatattaggattttctttattaaaattgtagtatgtgttaaaatactttttccaaaattgtttgctaaatgtcttaacagcacacaagaaaagcaaaccataagaaatatagtatggaaatatgatatcaccagcgaaccagaggttggataatacttaatgtttggggccagttagtagtgttaaagggtcaggaatttttgtccattgtgccctcccagtgcctcaatatttcttccctatattacttggaacccctcttatttcttagattgctatagtataatatcaattattataattttatctcttccctgttcctattctrttgtattctgtcctgtcctgtcctatcccgttccatctcatcctaacctattctgttgaagcctgcgctttacgttaatatatcctcagttatcaaaagtctagaagaaaagggatcagcagcttaatacccttctgaaagattccatcctaagccattaaatattttcaaggtaattyttagaagtttatcatgcattttccagtatgaacataatgcataccattagggaataatgaaaaatgcacaaaagtagaaatggawagtttttaaatattatcaatatttgaagacaatattattcttcaaattgtatttttaagacttgccctaccttattttcttaagaaaaataatttttcttataactgttttatatttactaattgttttcctatttattatagaaaataggggaaaattaaaaaatgttatatatatcatcactcacacataaccaccattaacattttggtgcatgtcctcagtacaagttttttatttttttaagtagcagtgtgatcattcagaatcaacagttttgtttcctactgtaaaatgtagcataaatatcacattagatttatctctgttatcacaaactccttaagcatatgttgtttatttttaatatttcactgaataaataaaacacaaaacttaaacactcccatatttctgcaaatgcagttggcttctgttatttactgacttataaactgcaatgaaaaacatcattgtgtagaataccccctctgttttcatatgtcctttggacatgttattagattttcaaagtatattaacccatttaatttcttttattgtgactttgtacggcttatttatccattgaattcttggtacttaattattaaaatatattaaatgtcaaaagaaatacctgattctgtatattaaacactgatgatacaatagaaaaaaatagaaacttccctctacatcttagaagtaaccacctgaatcgctttcatttatgtttatgtctatatatcaatgactgtacatgtagatacacatatatacatgtgcatattattcagtaatctggatggatattactatttcatttctattatgtgaggctaattaattttatctttaatgactacatagtgcaccataatgccataatgtacaccataatttattttgcatttctcaattgttggacaactttaattccttttttttttttttttttggtattatagatcatacggcagtgaatatccttgtagaaatttacttgtacaattagaaaagtgtttctgtatgtcattttactttttaaagaaattccaagatgtgatgtattggtcttactcaatattagtttttagagaaaaaaaagattaaatttgaattgcatttcctttgtctttgtaaaaatgtggcactgatgctgtaaacctttttttgtaacatttggaaactatgcagtgattgtcaattggagaaaagaggactacaaatacatcatcttatgtttgatttaatttaataggttggcgcaaaagtaattgtggtttttgccatggaaagtaaaaaccgcaattaattttgcaccaaactaaacgttattttcccaacaactgcactagtgtggtccactgcatgttggccaattgaactctgtgaagagtttgtcagaagaatctaatgctttaacatgtatatatcaggaaatttaggaaaatagtctgtaccaaattatccattcatttagtccctcttaactgagtacctactgtgttaggcattttggctctttctttgcatacagagttctttctctttgaattgatagcttattttggaggcagtgttttgttttttttccccaaggaaagactggaagagagtcgacttcattcaaaagttgaaagtcatagttaaaagacatgccgagttagctaagattgctagtattttgaggacagagatagaatttaaaaacaattttatagattcarttagtaaaagttaataagaaataggattgagttcaggaggagtaaaatagacaatatgtttaagtaggctatgcttaggagacatgagaaaaagatctttatattgaatatcctatattcactatatgagttttaatatatatcattatggatagtctgattaaaattccmataaatkaagaggtatcattgtcatgtgygttttctctcattttttttttkgtttattcaggccaccagtatatcttttkggcttctaattttcagaggaatgttgaaaaattaaaaatggtttaaagataaagaggaatgaggcaacattttggaatgattgtttttgatgrggagtagatgagaggtaactaaacgctcagtaattgtgatcggatgtgctgaacccatgaygtaggagacacaaggcctgtttcagttatctagtcaaccatgctctctgcaaaacactttcaacttctccatgccttctcctgtgcacagataatttctgtagagggaggaaaatgtaagagtgacataaaatcaaatgctctgtaagttttgaaaccttgttgagacttagaaagatgtctagaataagggatgggtataaatattgataggaatttaatagatgaaccaaaaaatatttccacttcaataatgtttttcagccaaagaggtcaaacctttttcacttgatacatttctataaggaaaagtgaaggcagtgtttactgttgttcaaattcttcaattctaggttctggagacaagtggccttggtagaggtcacaggtattaattgtgattaaaatttcataatcatttacacctggtgaactgttcactagacaatattgtctttagaaacccctggctgtgttcatatgcaactctgaatgccatttatgttgaagtttaactttgccagacaggcacagagtctagaagtgaatgttttctgccctctgtgcttttggcactggaaagacaaggtagacaaaattgggacaaaaatatgttataatactgctttcttctctctctgtaatagctatgtgtccttctgacttttaatagcttttctagggaaaaaccacattcccactgaaaatggaagaatgtcatttttagaaagcrtagataaaaaaatgatgacataaaacaaatagaaaagatttgagttaagcataaggaaatctgaatataaagtcattatgaactgtatatttttggtagcccctttagttttatgaaaaaaaaattacaccttttttttctttagaattgatagcttcttttggagacagtattaaggaaaaaaaagcagattatagatgagaagataggtcaacttgagtcaaaaattacatcatagttaaaagtctccagggaagctagttaacagaaatgagctgggatcatttggaatgaattatggtttattatggcattaaggtacatacatgagcttttggttataccccaagaacactgaattggtagtttattttcagaattttttttaaaagaaatgattgcttcaattattgttcatcattttctggttactcatgacatgttcttcatcattgttttcatatgaaaccttatcaaaataaccttatcaaaacagttaggtaataaaggccaggtgcagtagctcatgcctgtaaacccagaacttagggaggccaaggtgggaagatcacttgaggccagaagttcaaggccagcctcaccaactggtgaaaccctgtttctgctaaaaacacaagaaattagcagggtgtggtgctatgcacctgtaatccaagttactcagtaggctgaggcagaagaatagcttgaacccaggaggcggaggttgcagtgagctgagattgcaccattgcactccagtctgggtgacagagagagactgtctcaaaaacccaaacaaacaaacaaacaaacaaacaaaaacaatcaaaaaagttaggtaatcagctttttaatcagtccttcactgaaatgtsattttttattcttaagtgcagtcttgttcccatggaatgcctactatattcaaaatttttattcccattataatttattaatgatatgaacctagtgatattaattaggactacagttttgacttataggcataggaaaaataaattttttccaattttctgccatagacctttttgattactatatagaccataaaaatatgcttaccatagctttgaaaaattgtacagcttactttatgtggtttctctttttgttcatgtatctgtctcgtgactattttttgttgactttcgttgctcagaacatattttccccaaagagtacttattagaaacaattttatttattaataaccatgcatttttgaggtcctcaaaggtaagaggcagtttgggcttttccacttgcctgtgcagccccttgctagctttatatgggagacaaggagataaatacgtaaaccattataatagaaagaattaagtgctctaggagagatatggtgaaaggcaaaaaggaaacacggagaaagatgctccagatttgtctaaatatatgtaaaagggaaatttggagagttataagtgagggtggagatagggatatgggccctagcaagcccttacagagaaagtgacactsggacactttcttcactttctttgtgactgaaagattaataaagagtccatctggtagttatcctgggggttggaacaggtacaatgccaatacaaatagaagggatagcagcagtctgagctgtggatctgtagtgtcaactgagataggtagtaacaacttgggttagctaatcttcataatgcatctgggagctaaactgaggcrtataatataaaagtatatgtagccaagtagcctaatggtatcatcagttaggcctgtttactgacttggaatataagttgggaccaaaaaaaaggaggttggactagatcatctacgcagtctcatagaaaagctatagtggctttgaaacttttctttaattgggtgctgttccagaggcaatcccagcctctgaagtggtggaatagagagagagtggagggtggaggcagagctgctgagcctgagcaagaggatggaaagtgtatgtcctgagttctgattccagatcttaactggatttcctgggtaatcacttttggtattctctttttctaaaataagggcattgaaggatcatctcttagcctcattcattcattcattcattcatccaccatatatttatagaacacatagttgcctagaactttctttgaattctttagatcatatgagtgaaataaagctcagtttatacaactacaatgagaatgtcactttccaaagctgtggctggaaaggcagcctggagatttgyaggaagccatgccataagttcatttaaattctgaaactagtttaaatgtgtggatgacaagggacactaggatgatgataataacttctgttgacttcttactatatgtcaagcactgcattaaatactatatatgctcacttaatatatacaataaccctttggggtaggtatcttattattattattattattattattttcattttgcagatgaggaaaatgagactgagataaagtcacatagttacctaagaccacacagctagttaaggggcttcatattcaggtttatgtgacttcaaattgtcctctaaatcaatgagtgctgatcctggctcagaactccacccgagacytaaggaataacaacttcagaagtttggtagtagaaagtggtttattttaaaatagcccatcaggtaataactatgtacagtccaatatgagaagcctttgtcaagatttacataaaatgagaggaaaatttgttgattgggtaacagtataagcaactgaaagagtaagaaagtgtaaaaatacggaaagagcattaggcaaggtgtccgaatttgcaactctgttctggggagtgatgcattgcaagggaagtgacacagaccatgaagaggagacttgggttcccattcttgcagctttatgaactagcagtgtaaacagggcaaaaagaaggttgaactggatggtwtgtaaggcgccatgaaagaactacagattttttattctaaagcactaaagaattaggctttgtatgggcatcatttggtttgattaaaattttccttgggatagaagagtcaataaaattgatcacaatgagcacaaatttacatatttttagacaaacaccaatgccaaatcagaattttaaaatattttatcactttaagktttcgttatttttaattttgttttcctaattgttgactcaccaagaagcacccagaaaaatgaccaattattcaaactaacctctctggctttttcaactccctttgaacaatagtttagtgtacatatttacatgtagaatatcatcttatgttcccttaatttgttgagaaaatttccagttgagaacaaaatgttcatttgaaagttaatttgccaaaacaggtagtttgtaagtcctctctagagtcagctatttcataggatttggtacattttaatagctttgccaaaaatttggatgaagatgtgaaaaacataaatgtaaagctttcaggccttgtgtggtggctcactcctgtaatactagcactttgggaggctgaggctggaggatcacttgaggccaggagtttaagatcagcctaggcaaaatagacaaaaataaaagtaattagacaggtgtggtagcatgcacctgtagtcccagctactctagaggctgaggtgggagaatcagctaagcccaggagctccaggctgcagtgagctgtgattacaccattggactccagcctgagtgacagaatgagactgtctctaaaaataaacaaataaatgaaaatcaaaatttctagctgaggcaaagatgagagggaaaaatataagaatacagaattcacaaccaatataatagaataggttaattcttgcatttatgtaccttctctcacccgctcccatttttttcttttgagtataggataaagggatcattgtttaataggaaattcatgtgaagaaaacctatatgttggaaactcaagatgagcctttatgtgacataatttccataaaagataacacaatcttaaaattagcagatagcatccgtagtaacagagaygatagtcttcagcactgctctgggcaatgaccttttgtcaagaatgtactgaatattggtgcacaaagatgatggagtcttaaaattatatcaacaattgtagaagcaactaattgtatttagcatggagaaagcaagattgatttaggaaattataccacttttatcttcagtttttgaatgtctgtcttaggaaaattattatgcagagtagctctgtgggtggaagttacagagacacagatttcatcctagtgtaagaaaacaaaatagaacagtggaacagcctgttatgtggaagaattcaaacagagtgtaggttacctttggttggggactgtcagagaaggggtttagacagtgggtgggaggtacagtatgagctaggccctttcagatttccagttttagaattatatgttttagtatttagcaaaataaatttactgataagtaaaatatttagtcacaacagaatccctcctatatgtaacacacataattaacttgaaatgtagtccttgtcactaacaaaattttactgatgcgatgattaactatacaaagtaatgtaattgccaaaattacttccttaacatctgttgtccacacttcattgagaataatcatcgccaaatactaatctcttcatgccacttcctggcttaaaacacaatcattctgtgctatggactgaatatttgtgtccccccaaaattcatatgttgaaatcctcacccttaaggcaatagtrttgggaagtggagcctttgggtgacttggtgattaggtgatgaaggtaaagccctcatgactggcattagtgcctttatgaaagaggcttcagagcactagttagtgaccatgtgaggatgctagcagaaggcactgtctatgaggaagtgggccctaaccagacactgaatctgccttgaccttgaacttgtagactccggaatggagagaaataaatgtttgttgtttataagccacacagtttatggtattttcttaaagcatccagagcagactgagagagatgctctgcactaataaaataaaataaaaagataaagacaaattttttttttttttttttttttttttttgtgacgagtttggctctgtcgcccaggctggagtgcaatggtgcgatctggcctcactgcaagctccacctcccgggttcacaccattctcctgcctcagcctccctagtagctgggactacaggcgcccgccactaggcccagctaatttttttgtatttttttagtagagatggggtttcactgtgttagccagcatggtctcgatctcctgatctcgtgatccgcctgccttggcctcccaaagtgctgggattacaggtgtgagccaccgtgcccggccgataaagacattcttaatgtaacctacaaagtccagcgagctccccccaattagcttctccagctttatgttccattacccttcatttccaaatgaaacatattggcctactatttatttattacatatacaccatgttttcatttgctacacatcatttctcatgctgcttttttccctgcatggatgtccctcttatttctagctgacttctagttttattcttcagatctcagtttcctttatacttttcattaatcaaggaaggcttgctgatcttcccatttagatctgatttcctgttacatgtattcatactctgtttctcatttatcactgttacaaattgtatttgcttatcaagttatttgattaatgtatttcctctactaaaacataagcagcctaagggaaagggaattttatgtttttagttcactattgaactcctagtgtcccaaaatatgtgccgattacaataaatatgtgttcgattaataatataagtggaacagatagcacttactttaaaagtacagaccaatgtttagtgaaaggatgtgatccagtgaccctatggcaataagttaactctatatactgcctgcattttttagactgtgtttacttttcacaaaagccctaacagctaggattattatgttatatttgttttataggtaaggaaattgtatccctctcaattaactatttcaaaattaatatttattaagtaggatatttaagataagaaactgtttgagattttaagaaaataaccatgtgcttggtatacctagatattatgttcttcaataacttactttaaatggcatttaaaatatttttctataggattgtcttggttcaggctggtataactaaatatcatagactaggcagcttaaacaacaaacatttttctgttgcttgggaagtgcaagactacagtgtcaatagatttagggtttgatgagggccctcttccttgttgacagatggctgcctttttgctgtatcctaacctggtgagagaaggagaggaggtattctggtgtcctcctcttcttataaaggcattaatccttttgctgtgcagaagttctttagtttaatcagatcccatcagagtgaacaggcaacctacagaatgggagaaaatttttgcagtctatccatctgacaaagggctaatatccagaatctacaaagaacttaaacaaatttacaagaaaaaaaaaaccccatcataaagtgagcaaaggatatgaacagacacttcttaaaagaagacatttatgcagccaacagacacatgaaaaaatgctcatcattgctggtcatcacagaaatgcaaatcaaaaccacaatgagataccatctcacaccagttagaatggcaatcattaaaaagtcaggaaacaacagatgctggagaggatgtggagaaatagaatgcttytagactgttggtgagagtgtaaattagttcaaccattgtggaagacagtgtggcaattcctcaaggatctagaatagaaataccatttgacccagcaatcacattactagrcatatacccaaagggttataaatcattctataaagacacatgcacatgtatgtttattgcagcagtgttaacaatagcaaagacttggaatcaacccaaatgcccatcaatgatagactgggtaaagaaaatatggcacaaatacagcatggaatactatgcagccataaaaaagggtgagttcatgtcctttgcagggacatggatgacgctggaaaccatcattcacagcaaactaacacaacagcagaaaaccaaacactgcatgttatcactcatagatgggagttgaacaatgagaacacatggacataggagggcacacaaactggggcttgttgggtggtggggggctaggggagggatagcattaggagaaatacctaatgtagttgatgggttcatgggtgcagcaaaccaccatggtacgtgtatacctatgtaaaaaacctacacgttctgcacatgtagcccagaacttaaagtataacaaaaatgttttttaaaaataaaggcactaatcctatcatggggactccattctcatgacttcatctacatctaattttgtatcaaaggccttaactccaaataccatcacattggtgactagggcttcaacaaatgaattttggagagaaacggcatttagttcataacaaaaactaatctttgttttgtttatacttcctcattttaaatctatttgtagttttaaaaattacatatggaatcctcagttgattatgtatcttagataccttgacaggtgggacttgtaacttgaaaataacacttccatctagtgacaactaacctgattaaattaaaaaactctggagtagctgggaagggtaaaacaaatcattcacatagaatggactggacacataacttagagcagtcattttttaaaaataaacacctgaagtaactgatgcttgtgaaggttatggattaataatgatcaaacaaaacaatctgtttagctaatagaatattgctcatgtagtaactagataaaatgttttcttataatcttgccacttaaaaatgggtccgtctccattttcctcactccactgcttctgaatgagaaccttttgtactctgaaaacctagtaaaaagttttcttcttagtttaaaaaactaactatattcaggaacaaacatgtatgagaaagtgggttcttggtaaaatttccagttgggttttgcagaatcgtaaagaagttgatgttaaaataagctctatttatcccaaggggacacttaaatccactttgaattaaattactgtgggatttaatataaacacaataataaaacacttccagacatgcaatacatagttagacaatgaagatatataaaaattttctttaaagcattgaatctcaaaggaaatatggatgatttatttgtatctcttaattcctgaatttatgttatagattttaggtgatatattttaaattaactattcagctacattaaaactacaaatacaattgtcatatacaatcctttgagctaaaatgttcttatcatatgcaaatgccagatcaaaagagataattattctatttctctggaagcctatataaacaagaaaaacctatcactctcaaatgataattatttcactgattgagatagaaaatcatgtttaatcttttttagatagtccagaaggtattatatctatttgtccacttactggtatatccattaaactgtatccctaaggtgttccaacttaagatgtagaaataacctaactggacatattaattgctttttatatcagtcaatgaaaattactgctttcctgaaaacactatttattatcctgtctccctttcaggaactatatttcatatgctgacaataaacacaaagttgacattttgccaacagttaagttggaaatatcaagcacgtgaacaaattcaagataagaaaagcatctgtcttacacatattcttagtcagtgtcattaaaatagagttgttttgtggcctacttcaggaaaaatatacagatatgaccccatctcttgttatatttgtatacactattcatataaaaagtgtggattgtaccagacaacaacagatgacaagttatgattcaaacttgttgccaaaaaatattgcatcaataccaaagggaactgattctttgaaaattatgttgtgtcatgtgattgtaattagcttgtatgaagcacagctgatctaggatgtagaattcagtggtaatccagagaatagtgttcctattattattaataggaattattgctatatgacaggcattcaattaaaygatttacatacataattatttttgtttttattaaatggacagaatctgattactaatattcctcagttcctatcccaatttgttaatttaaacatgatcctcctttatttattttatacaaattacttatgatataatgaatatccatacatacacctagaattagaacattgtgagtaatttacatctatgtatttggttatcttatcatatatctatctttttcttctctcttcctgcaaaagattaccactattgtgaattttgagtttctcctttctttaacattgaaaaaaatagttttattttgcctgtatatttaatatattacttgttttgattcatttctaactttttatgtcttgagaaatccatacctacgctaatgtccaaaagattaatatattatgttctattaaaagttttgaattttgattttgatatttaagttcttaactattcaggaactaatgttttggggtggtttgaaacaaggatgttacgtgattttgtttgcatatgataaccaatgttttycttcatcgaatagactcttcttttcccattaatctgacatgccatctatatatgtataattgatacttatatagttgtttatgggtctttgttttgctccgttggtcagtttatctatctatacacaagaaacacattctgaattactgtaactttatagtaagttctattatgtgaaggccaaattatttctccttttcttttagtgttttactttgtttctgctgttttgcatttctgcatacatttgaaagtcggcttgtcaagttttatgaagaaaacctattggagtttgactggagttacatcgagtttgtaaatcaattttgagagattgacatctttacaatattaaatctccctacatgaaacatggtgtattaattatctacttagcccttctcttacgttcctttagttccttgtttttacatgtgtcttgtggtttgtttttttgttaagttttttactagacaatttacattttttattacttttataaaataaaatctttaaaatatgtttttaaaaatatctgtcgccattttatagtaatgcagttagctagctttctttcatgcttcttaccctcccttgcttcctttcttccttttttttttcttctttcttcccaaaagtagcagaataaaacaaaagtttactaaggattgcatttatkgaatagaaaacattttagagtcctgttacaagtagcttgtggctgaatttcctcacatagkggtattatgttctctcttggcagatgggtaacgcaaacattagaaaattcaaataatttttccataacttgaaagaggtaatagtgggattttactggtcaattttactttaagacctgtgacttataagatgttctgtaatgagattttgttcccctcattccactttcttctgctgcataatgttaatattggatttaaatattttcttctcttatttatttatttatttatttatttatttatttatttattttttgagatggagtcttgctcttttgcccaggtcggagtgcagtggcgcgatctcggctcactgcaagctctgccttccgggttcatgccattgtcttgcctcagcctcccgagtagctgggactacgtgtgcccatcaccacaccyggtcaatttttttgtatttttagtagagacggagtttcactgtcttagccaggatggtctcgatctcctgacctcatgatccgccagccttagcctcccaaagtgctgggattacaggcgtaacccaccgcacctggccttatttatttattttttaattaatttatttttttgtttcatattcttttttttaattatactttaagttttagggtacatgtacacaacgtgcaggtttgttacatatgtgtacatgtgccatgttggtgtgctgcacccattaactcgtcatttaacattaggtatatctcctaatgctatccctcccggctccccccaccccacaacaggccccggattgtgatgttccccttcctgtgtccatgtgttctcattgttcaattcccacctatgagtgagaacatgcggtgtttggttttttgtccttgcaacagtttgctgagaatgatgatttccaatttcatccatgtccctacaaaggacatgaactcatcatcttttatggctgcatagtattccgtggtgtatatgtgccacattttcttaatccagtctatcattgttggacatttgggttggttccaagtctttgctattgtggatagtggcacaataaacatacgtgtgcatgtgtctttacagcagcatgattcataatcctctgggtatatacccagtaatgggattgctgggtcaaatggtatttctagttctagatccctgaggaatcaccacactgacttccacaatggttgaactagtttacagtcccaccaacagtgtaaaagtgttcctgtttctccacatcctctccagcacctgttgtttcctgactttttaatgatcaccattctaactggtgtgagatggtatctcattgtggttttgatttgcatttctctgatggccagtgatgatgaacattttttcatgtgtcttttggctgcataaatgtcttcttttgagaagtgtctgttcatatccttcgcccactttttgatggggttgtttttttcttgtaaatttgtttgagttcatcgtagattctggatattagccctttgtcagataggtagaatgcaaaaattttctcccattccgtaggttgcctgttcactctgatggtagtttcttttgctgtgcagaagctctttagtttaattagatcccatttgtcaattgtggcttttgttgccattgcttttggtgttttagacatgaagtccttgctcatgtgtatgtcctgaatggtattgcctaggttttcttctagggtttttttgattttaggtctgacatttaagtctttaatccatcttgaattaatttttgtataaggtgtaaggaagggatccagtttcagctttctacatatggctagctagttttcccaacaccatttattaaataggcaatcctttccccatttcttgtttttgtcaggtttgtcaaagatcagatggttgtagatgtgtggtattatttctgagggctctgttctgttccattggtctatatctctgttttggtagcagtaccgtgctgttttggttactgtagccttgtagtatagtttgaagtcaagtagtgtgatgcctccagctttgttcttttggcttaggattgacttggaattgtgggctcttttttggttccatatgaactttaaagtagtttttttccaattctgtgaagaaagtcattggtaacttgatggggatggcagtgaatctgtaaattaccttgggcagtatggccattttcacgatattgattcttcctacccatgagcatggaatgttcttccatttgtttgtatcctcttttatttcattgagcagtggtttgtagttctccttgaagaggtccttcacatcccttgtaagttggattcctaggtattttattctctttgaagcaattgtgaatgggagttcactcatgatttggctctctgtttgtcgttattggtgtataagaatgcttgtcatttttacacattgattttgtatcctgagttttttttaaagttttattttaggatcagtggtacatgtgcaggtttactatagggataaattgtgtttcatggggatttagtgtacagattatttttttcacccaagtaataagcatagtaccacatagtttgttgaatgtcacgctcctcccaccctctaccctcaagtagacccctgtgtctgttgttccattctttacgttcctgtttactcagtgtttagctctcaatttttaagtgagaacatgttctcggtatttggttttctgttttaggataatcatctccaggccattcatatttcttgcaaaggacatgatcttgtttctttttatggctgtgcagtattccatggtatatgtatacaccatattttctttttccagtctgtcattaatgagcatttaggttgattccatgtctttgctcttgtgaatagtgctgtgatgaatgtatgtgtgcatgtgtctttatggtagaatgatttatatccctttgggtatatattcaatcatgggattgctggatcaaatgaaagtttggttttaakttcgttgagaaattgcaaaactattttccacaggggctgatctaattcacattcccatgaacagcatgtaagtgttcccttttctctgcaaccttcccggaatctgttattttttaactttttaattatagccattctgactggtgtgagatggtatttcattgtggttttgatttgcatttctctaataattagtgatgttgaatattgttttcatatgcttgttggccagctgtatgtcttctttggaaaagtgtcttttgatgttcttaccccactttttaatgagattgtttgttttttgcttgttaatttgtttaagtttctcacagaatctgtgtactaggtctttgtcatatgcatggttttcaaatattttcatccattctgtaggttgtctgttgtagtttcttttgttgtacagaagctacttagtttaattagatcttatttgtccatttttggttttgttttaattgcttttgttgtcttcatcatgaaatctttgccaagrtctatgtcctgaatggtatttttaccaggttatcttccaggctttttgtagttttaggttttacattaagtctttcattcatcttgaattaatttttatattgctttatatttaagtctttcattcatcttgagttgatttttatattgctttaaggaaggggtccagattaaatcttttgcaaatggctagccagttttcctagcaccatttatattgttattgtagtcttgtagtataattygaagtcaggtaatgtgaggcctccagctttgttctttttgcttggtatagctttggctatttgggttcttttttggttccatatgaatttaaaatagttttttttctaattctgtgatgactggcattggtagtttgataggaatggtattgaatctgtaaattgctttggccagtatggccattttaactataatgattcttcccatttatgaacatggaatttttttttcatttgtttgtgttatttctgatttctttcagcagtgttttgtaattctcttacagaggtsttttatttacctggttatttgtatttctaggtattttattattgttgtggatattgtgaatgggattatgatctggatttggctctcagcttgaacactgttggtgggctgatgttcctttagtctttgaagttactgttctttggatggagttttttacaattttattttctttgatgcctttggaagtttggttgtggtttgaggtaggttcagtagactgactttatttctggaaggttttagggggccaaggatcagcttagcactcctggactgcctgttaactctggatggctgtactaggccctcagctgcagtctctggccctttgaggttaggaatctgattcactcggggggctgaggtgtcccagtctactggccacaactctacaaagctggtgctggcagggtttactcctgttggcttgggtggcacactggtgggagtgagcctgaagtggtcctgtgtatgctcatgcctatggcagtggcagtgtgrctggtgcagggcggtggcagaggcagagttgccagygtccatgtacacatttgtgctgttggtggaagggtaacagggcactcctgcatcagcaagggtttggacagttagctctgtttgcatcatctgtggtgacacagtgggatgcattcacacacacgtactggctgggtaagggaggtgaggtctgcccacatggggagagggagactgtagtgggtcaaggctgcaggttggctagtgtgcatcgtcaggggctggtctactggagctcttcaacaaacagacacagtcttccagtgaaggagctatgatgataacccctgggaagcaacttggttggccatcagaggctgtgcttcaagcaggtacatatagccaggctgtacccaggagaggccagcagacagaggatgtgcaatttggactggtcccatcccatttgcaacaccaccatgttctgtccaggtccaacagtctctcaaaggctgacgtcacttagaaggccatggagagtctttggggatgggcaccctagccatactccactgcagctgttcctgtcccaaaccctgtgggctctgcacaggctggaatcctgtttcttccatctctctgccaactctctgccagctcaagtgtccgtgggagtcatgggctgtcttgttgccaggatttttggggattcctggtgaggacagagcactcctcacctgtttagctcattccgcaggagttgctggggtccaggagcgagccccagtgctcagcagccccctacagggctcccagcttcctcctcaagttcagcccactgtctgtgtcctaactgcatccactctcaatgctttcctgctgaagatctgctcagagtttgctagtcttccccatgtccctgtctctcagtgtgagatgttcctcctggctgtatctagtcggccatcttgggtcttgtcctactttcttttcagactaaatctttagtcttttcaaaatctgttaatagaaatatttgtgcatttatatttgtcaaaatatatgtattctaaatgtacttattatttatttctattcatccattcatttattcacacaagacttctttttgaagcttgcttagatttaccttcttaaacaattttaatttttaattattatagtaattgtatatatgtataaaatacacatgatattttgatacaaacatgcaatatgtcataagagtagctgggatatctatcacctcaaccatttatcatttctttatgttggaaaaattgtaattccactcttttagttattttggaatatacagtaaattattgttaactatagttgccttattgtgctatcaaacaatagatattattccttttaatgggtactgtgttcatgtacctgttaaccattgcctcttcatctccccacttcccactactcttctcagcctattctctgtctccatgagttcaatttcttttttttagctcccatatgtgtattcactcaagatttattgattaccaaattygatggatagagttgcctacagattgtgggagtaagaataatgtaactaggaattttcttgaagtgcctgctttttgtttcatatatatatatatatatatatatatgacttcatcttcttgataacagtggggagttttcagtgaccacttcataatattttccatgatactgcaagctgtgcaatttaaagttattggtggacatacaagctttgtgaataaaataaccacaaagattgtawatatttgaacaaacttgagagttgtaaccaaataaaatgcttatcagagcatggtacctgtgtttaaaaattcagctcaattcaacaaagatttactgaaaactaccactgtgttagggctgaggatacatagctgtaaaaaatggatcctgcttttgaaaaacttactacctgggtgcaggaaaagagtagaaaggaggagtaagccagatcctagagttgagaggaagttataaggagaaatgaggtacctttggggcttctgcttctccatggaatgtccttgtgataatatataagaatcaaggtaatgcatagaaagtcagaaaagtttgaggtattatgacacaaacacattaattcatataccaactaaagaggaaatggtgctggctaggactataggggtaactcatgagtaagtaataaactaaagtagtcatgcttgatggaagatgaaacgcaagacctgtgtttaactaacatactttactggcaactaagcataatgtatatggcctataggagctattggagtaggcttttctcatgtctctcaatttaatatttatccttccgtatccttcagtacattttttgccttagttttaaccctgagatgaaaagagtcatagattccagggtacagaattccttttcaactagtttgacttttgacaaggtaaacagcttctaagatctttatacaagtcatctgtaaattgagtataatagttcttactttacaaggtttttgaaaatattttcagtgattcattaaaaacgcttagcctggcgactgttctgtattggatgataaagagatggtaaacctgttagttgtaccttactatgtcagctttctgtaratgagatctttrttgttcctgctttgctttttatttatgcccagactatttacttttgtatttttaatataaaaatgctatttttaaagctacatttggccagtaagtttggaaatatgcaattacactttcttattataatttaatggttgtcattgtttcataacttgtaaacagtacagttggctaaatagtcttaggtagtggtgttcaacccaggtggcatattagaatcatctggaaagctttcaaaaatgccaatgttcagacactacccaaagtcattgaattcaggatttcttgtggacctaattattattattttgtaacagctcttcatctccaacatggcaataataacatctactcagcttgtcagagtagatctgatgattacattaaaaatatattcaaaagtgattgataaacagataattaaaataaaaatgtagggtaatattaaaacattttagaaatatttaccctggtcttgaggggtttaacatttacttagagaaaaaggttaaaacataaaaaattcaaggtaacatgtcacacactaaatggaagtaacagaataattatgctaggaatcccatcctaatcacactgtgtaggcaatccttaatgtatatgaggctgtgaccttgtctagtacttctcaaatatttatacctgggctttctttaatgataaaagaacaagaacaataacctttttggggctggagagggttactaggagggaagtcttatctagggtggttgtctaaaaccacttacctcaaatgtttgttcattcatcaagtcattcaacaaaatgtttattacctaatatgtgccttctggacattttctttttaaaggcaatttagcagcatgataaagtgggggttaatagtataaatgctggagccagaatatctgggtttgaattctggctccacaactttctgattatcttatgttgggtaaattcttaacttcactgtgactcaatattctttattttttaagaaggaagacaatatcgttaattacttcctagggttgcagaaagaggtttaatgtattaataagtgtaaattgatccaaactatgtgtggctaatagtaagagataggtgtgcttttgctaacatctctgcatttttattccgttatgttcttcatttgttttagtatgaacataatgttttcagtgtgaacatatgaagataatgctttaagttagctatcaccaaatgaaaatggttctcaaaagaatggatatatcctcctcctaagacagagtcaaatatatgaatctcagtttttcaaggcactatcttatttaagattggtcattttcaacaacatggattatctagaggatgttatgctaagtgaaataagccaggcacagaaagacaaatactgtatgatctcacttacattttgaatctaaaagagttgaaatcatagaagtagagagtagaatgctgctggttaccagagcatggggatgggagtggacagagtgtacaaagtttcggttagaagaaataggcctagtaataggcytggaaataggcctgtttttgcacaacagggtgactatagttaataatagtgtgtattgtatttttcaaaatagctaagagtgtattttaattttaattttttattttttgagacagagtctcrccctttcacccaggctgtactccagtggcatgaacatgactcactgcagcctcaagctcctgggttcaagcaattctcctgtgccagtcttcagagtaactggaactgcgggtgcattacaccatgcctgactaaacgtggattttaaatattctcaccacatggcatgcatctgtagtcctagctactcagaaggctgaggcaggaggatagcttgaacctaggaggaaggggctgcagtgagccctgatggtaccactgcactcagcctgggagaaaaagtgagaccctgcctcaaaaaaattaaaaaataaatataaataaatatatttaccacaaagaaatgataagtgttttgggggatggatatgtaaaatagcttgatttggtcatttcatgatgcatacatgtattaaaacatcatattgtacccatacatatatacaattattatttgtcaattaaaaataaaataaaaattttaaaaaaacattagaaaggaggttagagacataatcagggaagtacagaaagcaatgaatgcttgtataccagtgggttctctcctagtttccgatcagggaagaagtctagaagagtcgtgcttactatgtgaccagaaagatgagtagagttagtgataagcagagcttgcagaaaagctgtggtgtgtaaatgggtgggttgtgtggagactgagagtgttccagagagagagaacacatgagaaaaatgtcatttaaaactgtgaccttatcagtgaataaagggtccaacaccacataaatgtggaggtgcagtatatacagaaactcttaaggctcttaacagccagaacaatggggtaggggcagaacaagaaatggagtttctttggaaacagtgttttcaggtgattgtaacattagcattaatgagaggagtactaagttttgtggcagtgcagaacagaaagaagtcgttcaaagggggttttagtgagaggaaaagggaagactattcaaggcttttgaaggagctggtatttggcatgattcttaaaagagcwatagggtgagacctctagcttctagagccaggacagggctttactactgtccttaactgtgtgctgaccttgccttatttgttcagctaggattgtgtctaagcagagcctcagcatctgttcttaacctcaactgcagccttatccttttacccatgtgccgaacactcttggcttacctccgaggatcacagaaggtaagaaaaaacagtcctactttcaaattccagcataaaaatcaagtgtaacagtcrcatgttagtttgtttacttttcatagtctgacttttgrctggagtgatttcttgtaagatgatggtaaaagacatgtcacctgccaagatgatctgtgagttattctgcaataccagataagggcagaggataatagtaatattattaacagggatttccagcactatgcttagtgtttcacatacatgctggacaattcttacagggattctacaatcaggtattgttagtttcatttcacacacaagaaacctcaggcatagaggctttgagtaacttcgagactagggaatgacagagctaaggtcaatcctaatttgagttctttccattatgtcttgtctcattgagattctgtattttcacttagctaaatccaggtgagcaaactagagtcctttagattctgagcaatacatgaaatgattgctggtgttggcaacaacttatctctgcttaacacatatactcattttgaagtgtgtaataggcttgagaaacatgtctttttttattatactttaagttctagggtacatgtgcacaacatgcaggcttgttacatatgtatacatgtgccatgttggtgtgctgtacccattaactcgtcatttaacattaggtatatctcctaatgctatccctcccccctccccccaccccacaacaggccctggtgtgtgatgttccccatcctgtgtccaagtgttctcattgttcatttcccacctatgagtgaggacatgtggtgtttggttttctgtccttgtgatagtttgctaagaatgatggtttccagcttcatccatgtccctacaaaggacatgaactcatcctttttatggctgcatagtattccacatatatgtgccacattttcttaatccagtctatcattgttggacatttgggttggttccaagtctttactattgtgaatagtgccacaataaacatacgtgtgcagagaaatatgtcttgattaaatagtgatgtcagggggaggggggagggatggcattaggagatatacctaatgctaaatgacgagttaacgggtgcagcacaccagcatggcacatgtatacatatgtaactaacctgcacattgtgcacatgtaccctaaaacttaaagtataataataataataataaatagtgatgtcatgtattatatgcagtgttgtaaaatgaagtatgtaagaaaacaaaaacagtcattctgctaatcaacaaaaattcttttttgtctttgactaattttgtgtatatgtgtgactgtgtgtgtgcgtgttgattcttcttccctaagattcactaagcaaagcaccgctggatagatattgatattttaaaaggagttgttaacttgagatcactttgatgttctatgaatttaatgtgtgcagatttactctaggaaaacttctcaaccctttctacataattatatttagaaactctttccttttaatgcagtaatctgtgaaaataactctctctaggttgcctaccatttaaactgctaggttttgatccctgtggttggctattggtttggcttggagaaagagaagataagtggcagggaataaaaagttcccacctaagtctctcagtatttaatcattcttaaagatttgccccgagtgtgaaacagtgattcagaggtgcttgacattttattttgttataagatcaaacaggcatttcaaactatagatgagattgcttcattttaaaataatcttattttttgactgtaaaaggaaatcatatatattttaaaacttaaacattccagaaatatgcaaaatgatcagagaaagtttaccctaatcttattctgccagaacaaccactgatgacaatttgtggtaagtgcctgcagatacgttaacatctaatgccattagtgttgatcaatataagatcacagtgcagtttttttgtaactttttttttaacctaacaatgtgtcttgaacatctttctatatcaataatatggacttctcacatatattttttaatggtttaggtgtcccattaactagatagatcataattcatctcaccaatttttgattaataggcttccgccatattttaaaaattttgacataatgaacaatgctatactgaaaaacttttatcacatttgttgcattatttttaccatattaaatgatttttgtttaggttccaagcaggagaaccaggagattgttggataaaagcagaacattccatattacctgtggtgttactatctgtattttctcaggtgagaaagccacaagatattaaataatttgttagaattacacatttaaatgtaaacattccagacatacacagaatgatcagagaaagttttccctaatcttattcttccagaacaaccactgatgacaatttggggtaattgcctgcagatatattaacatataatgtcattaatggtgaacaatgtaagattgtcgtgtggtttgtgttttaaaccacacgtaaaattacacatggaaaatgtgtgattttattgttctgtacattatctgctgtcagcaacttaggattttcttattaaatagcttagtagttcttttccatgtttttgaaaagggttgtctacagggaattacagaaaatggatgtgtcttgtgatttttacattatgatatccaaaagttggcccccaagctgataatgactatttcctgaaagtaagtaatttcattccagtaagaaatactggaagaaacagactaaaagttttcaagctctgaaagtgatgatgtgatatgagtttaaatgcatgaacattttattttttatttttttgaaacagggcctggcactgttgcccaggctggagtacagcggtacaatcttggctaactgcaacctctacttcccaggcttaagccatcctcccacctcagcctcccaagtagctgggactacaggcatgtgccaccatgcctggctagtttttgtatttttttgtagagacgggctttcaccatgttgcccaggctgatctcgaacttctgagctcaagcaatttgcttgcctcagcctcccaaagctctgtgattataggcgggtgccactgtacctggccaaatgaatgaaaattacaatgtgaaatactcattagtagattaggattccatcccgaattatatgtgatcaatatttctttgatattaatatttggtagaaaaaccaatgtcaaaatttctgaagctttatcttgctcttttccaaattaagaaataaagcaatgatctttgtgctattataagcctttttaaaatacattttgatcctgagcttttagatgatacttttcaaatttttggaacagaaagtaagaaacatagtgatgaaggacatggattccgaggagtccatgcgtaggttctatcctcagttgcccttctgttttaatgtgtgatgttacctctctgatcctcaatttgctgttgttgttgttgttgtttttaactgtaaaatggattgacagcaggacttacctcatagatttaagactaaaatgagaaaatgaatagaaatttttaggatagaattagtaattgtaatttacagttgcaagggttaattattccagtggcatagcacctggtattttcacctggccattatttgatgacatagctgttttgatagcagggccattttgactaatgaatgttttgatacagctattgccaagaaattattttacttttaacttggtaaaaaattgccaagcattgtygaaatgggtaacttcattgttttatctctgaatgtcttccaattggtagtcccacctctgcaggtgttagatggggagaggctcagggataggattagcagttcagtgaggatgagataaggaccaagggtgtagtaagggttagagatagattagggagagggagagtgaaaggtcagaaatggaggaggatcaggaaaccagcatattcgtgactcaatttgytctaaactataatcatgtccaagtattctggttcaactggagagcaaccaagcaactgagctagcatgagcttgtgttccagagggtttgcattctgccagtcactagtcgtctgactttggctacattacccttctttaacttcagttttcttgtctgtaaaatagggatgactctatctaccacattgctttgttttgagaatcaaatgagaaaatctatgtaaagtgcttggttgagctgcttccttgctgcctaaaattagaagccctgaattcttttgacctaagaggtcctttaaaaaggtgaatatatcccttaattatgtattttctatagctgttacctacaaattttttttcagagaaattcagaaagaatagtaattcttctatagatgactttgcattttttagccatagagtatgtagttaatatataagcttttaatttaatatgaaaggattattttactatacatttgggtattgatgaagctatatgacacagagagttttgtgtaaatagtattttatacctgtgccatagttgtgtcacacttagaccccctttgttttactactttggaaacttgtccttgcttgttatttaactcatgttagcttcctgtccattttttttcctcttaaaaatttttaaagactatttttctgtagggcagatttatgttcacagcaaaattgagaggaagatatagagagtttttgtatatcatttgtcctcatgcatgtatagcctcccccattatcaacatcccctgccagagtggtacaattttttacaattgataaatttacattaattgacatatcattataacctaaagtccatgctttacatcagggttcacacttgatgctatacattctatgggtttgcacaaatgtgtaatgacctgtacccaccattactgtamcatgcagaatagttcattgccctaaaaatcctctgtgctctgcctatttatctttcctttcccactaacgccagaccaccactggttagtgtttacagtctccataattctgccttttctagaatgcaatatagttggaatcatgctatatgtagtcttttcagattggcttctttcacttagtaatatgaatttaagtttcctttgtgtcttttcatggcttgagagttcatctttttatagtggtaaataatattcccttatctggatgtaccacagttttttttttatctattcacctattgaaagacatgttggttgcttccagatttcgacaataatgaataaagctgctgtaaacattaatgtgcctgtttttgtgtgggcatacatttttagttcctttgggtaaatatccaagagtatgagtgcgagatcatgtggtaagagtatgtgtagtttttaagaaaccaccaaactcacttccaatatggctgtaccattttttgcatcccccacctgcaatgaatgacagtttctgttgctgtgcaatctcaccaatatttggtgttgtcagtattctggattttggtcattctaataggtacgtagtggtaacttgtcattttaatttgcatttctctgatgttatataatgtggatcatcttttcgtgcttgtttgccatctgtatatcttctttggtgaggtatctattgagatgtttggcacatttttttaattgggttgtttgttttcttgttattgaattttaagtgttctttgtatattttgataataatcctttatcgatatgtcttttgcaaatgctttttcccagtctgtggcttatcttctcatggtgttcamaacgtcttttgcagagctgaaattttaattttaatgaaggccagcttattaattctttctttcatggatcatgtctctgacattgtatctaaaaagccaacaccaaacccaagctcatatagactttttcccgtgtatcctttgaggagttttatggttttgcattttacatttgggtctctgattcattttcagttaatttttgtgaagggtgtaaagtctatgactagatttatttatttaaatgtgaatgcttccttgtttcaggtccatttgtgacaaacgcattttcttctttgtattgcttttgctcttttgccaaagatcaattgactgtattaatgtgggcgtatttctgggctctctattctgttccattaatctatttgtcttttcttttgctaataccatacattcttgattactgtaacttcatagtaagtcctgactcttcccctacttctaatttgattacttgaaggaccttataaatcttttaaataactttcaggcattttagcattctaatcctctctcactttcattatttttgtgtgtgtgtgtgtgtgagtaccttagaactctaagccctctacattttacattatgggttgtgggaaattatagagttttctagattccaggctatgtcttcttttgaaccattgcactacacatattgtgaactataatggtttactaagcaatttcagatcacttatctcattaagccttttgtttctgtcaccatcattttacagagaagtaaattaaggcccctgaaaggcaaataatatggccaagatcacaaattttccagcgagttacctgttgtattttcaatacattaaaatgtggtgttaattcacaccttattttgcctacaagcaaagcttgagcaagggggaaggtgtgatgggcccgtgcacatctcaatttctccttccttacccaacctcctcaaaataatttttattaccctakctttgccaaaatgagttcatcttcacatctctagtaatttcctaacactgctattatttatgtgagctctaagtcagtcgagccctttgtttattgtgattattgttttcctgaattttgtcccatgaagtgattcccaacactttttctgttgggttaagaatattatgatttaaatctgtggattgtgaaaaatttctactagttgaaagtctttcagtggcctataatttaccttatggggtagggaagtatgcaagatatgtattaatagcagatttggaactatggaagaggtgaaagatgtggaatacctaaaatatcagggaggtgctcaagtaaataaatactcatatcattagatgcatatttatgtgtgtgtgtgtgtgtgtgtgtgtatgtgtgttagggggaggatgtgtgtgtgtatgtgtgtgtgtgtgtgtgtgtgtgtgtttctcttatccctgacttactagggttgtttcattacagcctttgaaaatttggtaaactgtctatagttcagttttttgtgtctttaaaacttcacctttcaatgtaatatttcattgtccacatagctgtcaaagtttggccctgtatttacttagggagaggaagaactgagtccttgacatagagcatatatgcaaatcccactaacttacccctggtgtaattctgtaggcgtgcatgtggctgcccatctggtgaatgccctcaacttctcagtgaattacagtgaagactttgttgaactgaatgcagcaagataccgagatgaggtgggtggtctctgtcttcccatttttctttcacttgtcatgagatgactaatgagggtctgtgatttttccctgaaaatttgtaccttactgctccttttgagtgcttttaaaatgcagttgtcaagttgagctttattccttttcagtagaaaatataagtaatyactatttcatagtgtctcctgctgaaagtgagagttggtagaatgtctactttttatattgcaatgttcagatggttgccactcaggtctgcctctgactcccagcagcttttgtctaattcctatcattcagctgagagtgttgacagtgccgttacagggtaaaaatactttataattcacatactgggttttggggaaaagggaagaaaagtaggttgattttttgtgaatcctggacaaatcaatttatttgacttaaaaaatgttagtgagttttcatgattcattcatttaaaaacattcctcgaattaagtgatgttgaattcaattctgtagcaggcaatatctgacgtagagtgcttttctccatgtgaagccatccatgaaatgaaattatatttgcaaggtgcagsccagagcctgatgaacagcacatgctcagccagttaggtctctgttggttgatgctttcatacagtcctcaggctgcctttgcttcacaatgccaagactacatcaaaaacaaactgttctgtcccatttaaatcagcatcccccccccttattttcctgttctgcagactaagtttggtagtgacttattaacttttttccccaccttccccactcctttttcccctccacatatcaccagagttttctaggtttaatactgttgtgttcatgtgtttgacctccatctcaaaacaaaacagaggaaaaagtaacaacaaattcagaaacaaatcacaaaaccaaaatagccagcaacttttgatatagcccttgtctctattggtattttaaaaaataccaacatgatctaattagtcttggatgggaggcaggcattgataatttgtaaaaatttaccaggcttgtagagtgcatccagcactgagaaccactgaaaaattcccgctccttagcaggccagtgacagcgcttcacatgtaatttcagacccagcctccacttctgcccatctcacttccacctgcttccctttctcctgctgccctctgctcaaatcactagctacttgtttcctgcccctgttccaacatttcctttgtttctcttttccttcttttcttctcttttcagaattcatgtctttaataactttaatggttttctcattttaatggaataaacttttgcttaagttccaatatttttagtgatttcaaaattttcagttattaaatttattttctttgaaaagttatacatgctcaatataaaatattttaaaactctcaagtaaatgaagttaaaagtgaaagcttctcctccaaaacaagccacagtttattatgtttttttctgatattttgagtcgcattttatggtatatattccttggcgatttacttgtttgcataaatatacttttatagcttattgtatcaacatatcttaatctatctcattctctccatatgactatgccataatttatttttagtctttttcttattcagacatttagattgattctagggttttgttctgaaccacactccagtgaatgtatttctttgtcctcttctacacagatctgtagttgtagaattttggtttaaaaggttgtacatttttagttttgatggacagtgccaaattcctttttaaaaagtcttctcctgttttcacacttctaactaatattagaatgcctatttctacaactcatctctgtttttttttcccaatctaagggatgaaaatggcaactcaaygttttaagttagtatttcccctgcctttatttcttcttgtattccttctttcatgtctctctttatgcttttttctctctttttaataaatatgtatttagcatctaataggtacaaggccatgcattagatgtagatgaaaataagtgtatatatacttatgtatttaaatattatgtaaataaatatatggcatatctattatatatagattatattttatatattgatatatttatatattgattwatatatatatatatatatatagtcaacacatatgttattttgtgaagcacttttgaaaaagatggtttkgtgccaatataccctattgttcttcttttatgcttttactctgcatgcaaggactcaccctccaccttgtgactgctgcacttccttgatagcccggctaaatctgcctcatcttgccactgtgaaaacatctctcactctcatgtttcattttctttctcyagcaatattaattgttccatcttctgggttttcttaggtatttattcacatttctattcttaccactttgttcagcccatatgatatttttatgggttgtttatatattcagttttcttagatcaccctatagccatgtttctaatagttggaatagaagtcaattgaattaagccaggtgaggagctattcctaagcaagtggtccttattcaaagacccccagatgacactatatcaatcgtttccttcttagtacatagtctggcctgaccccagattcaatggaggcacacagaaagaaattcaaaagcttgtgaaatattaagcaccacggggataaaaaataaatccacaaatctagtggcgattggttttccagaaggtagaagggtgctgactataaccattagagcataagagatgtagtttaaaggaaatcatacaatattttagcaatattaatgtttcatatttctaagtagcagaaactggtttttatttgagtatcctcaccacttttcactatatttgaaacacagaaagctctcaattagtcttcttcgtactgagcttacaatgcrcaaatcccctacatattttattggtttttaattctgtcttcacatcttgtgatgcagtttcacggttttggtagacagagtatataataatagtttaacatcatggctaagatattgagtttcaaaatggtcaaagatgggcttaaaaccagtgccaccagcttgtaggtaaccattaagaataatttctgggccttttgagtcatccagtattttgcctcagatggatagatttctctgaattgggtttttacttgttgtaatctcctctagcattgtgaaaatgttatgaaacttaatcgagtctttctcacttccgttggatgaacagtattttacatgacaagtatgtggtttgtagatcctgcatactctttatagaattatatatcatcagtgctttagtttttaatcatttatttttttttctttttctcaggatcctagaaaacttctcttcacaactggtaagttgttattcttagccttttctttaggtttaggaacatctttaaaagtaggcattatcggactgggcgcagtggctcatgcctgtattcccagcactttgggaggctgaggcgggcggatcacctgaggtcaggaactcgaaaccagcctgatcaacatgatgaaaccccatctctactaaaaacacaaaaaattagccgggcatggtgggtggmaagtgcctgtaatcccagctacttaggaggctgaggcaggagaatcacttgaacccaggaggcagaaattgcactgagctgagatcgcgccactgcactccagcctgggcgtgacagagtaagactccgtctaaaaaataaaaataaaaataaataaaataaaactaagcattatcaaattacacaacaattagatatatgttacaaatataacatatggacaatttgcatgtaagaataaatatttggagttaaaggataaggttgcaatgagaacagagacaatgcaaacattggggtgtgaataaatggagagtaaaaataagcaaatacatttcactgtcgtatattcttccaatcaaaacaatgcaaccgcattcttattgagggcctgctttgtgcctgctgctgtggcaagtgctgtaggagataatgcatgtttaacaggctcctgccctcaatgtattggaaaggaacaccaagcactgtgggtatccatggagttcttataattcagtaatttagtgcaactttttttaatcttaaaatttacaacaaagaggagaaacagtcattaaaataagttatttctttgaaatgtgtctcctatttcatttgtaatttatttttccttttcaagcttattgtccatgaaatctcagtctagactattaatttgttaaagcacgtttgaacatctcaaaatttcccctgatgttaaacaatttttgctaaaagtcttctttttcccaaccttagatttataaagatgaaagaataaagatgcatttggggaatttttagcacatatttcagggacaaggatgattgcatagttgagatgctctatcataaattgttgggtgtaatacccaattaagtattggaattgcacatgggactgaggcacattaccctggcaaatgcattatttttcttttgaatcaattttatgatgaaacgtcacaataattctagtgctttccccatccatgtcacagctatatatttagatttataagatacattttacttttgtctatagatttataatacttgccacttgcaaagtatttcacagttttctctttaggaacacaatttagttttgctttcaactttgctcattgaaaacatgttttcatttaggcctgaagaattgggtgagaacaaaaagtacagaaaaagaaaactttacgtatcaaccaatgtattttttggtttacagtgaattcatttaagagagagaaacaaaagctttgtttaatattattttctaaaacataaagtttaattgaagccttggaacctttaaaatgctttgaaaagtttagtttacaaagacacaaagagatttgttatgtgactaagctatcacattaaggcactaatattattatactattagtagtattattattagtattgttactattagcactattatgattatactaatattactaatattatattaataatataatatataattatatattatatattattatatataaaataatatatattatattattatatatattttatattatatattatatatataatatataatatattatatattatatatataatatataatatattatataatatatataatatataagatattatataatatatataatatataatatattatacactatatattattatattattatattatattatattatatatagtattatatatagtatatatgatataataatataataatatatagtatattatatattatttatagtatatatagtatataatatatagtatatattatatagagtattatatatagtatataatatatactatatattatatatagtattatatatagtatataatatatagtatatattatattatatatagtatattattatatatagtgtgtaatatatagtatatatagtatataatatatatgctgtatattatatagtatatatagtatataatatatatgctgtatattatataatatacatagtatatattatattataattatatattatatattatttatattataattatatattatatattatatatattatataatatatagtatatatagtatataatgatatatactatatataagcaagtttaacatctcaaaatattttatatgtagtatatatattattatatattatatataataataatatattactatgttatactaatatactaataatactaatattattatactaataactaatacttcttataagcaggtaatctcactacctagcatgcaaccctatcatcctatgtcctttcccagaggtccccatgagtggtgttggacttagtagagaagacacttaatacaaatttcctgggtctaccttagtgtgtgtctgggaaagacttggcaaagtgttttactaaccttcccaggtactttgggagctgctgtcctgtcactactgaacatctcatcatactcttgagcataccgtctcgctactgcctgccttttgtattaggtatttattgtaagtaaccgagagataatttaaagtatgtgagaggatgtgcacatgttatgtataaatacttgagcattctcaaacttggtatctgtgaggggtcctggaaccaatcgcatggatattgaaggatgactgtaaaaatactgtgttgtagaatagtttatttccttacatgtactgtcttttccacttgtaggtgagcttctcttgggttgggaagggctgcttctagagtatgcagggtcctaggtaaacatttttttatggcctctggcaataaaaacaatttgactcacccaattcagcaaattagcaccattttggtggcccattctcacataatttcaagaaaagaagtactatgctggccagcaggaggcatccacttcccaggtcatcagtctggaactgggctcagacacagggctccctaagcgtgagtctggagctcctaaggcatctgtttgtccccactgaagactagcaggtgacagtgcaaagtagagtctaaggatggtaatggcatgaaagacacctttttctatcaatgaactgaatccaactttrtatcactaatgttgactaaaactattccacagccatctctgaatgttctcaggcacagcatctaggaaacattgcctcagcctcccaagtaactgggattacaggtgcccgtcaccatgcccggctaagttttttgtattttttttttagtagagatggagtttcactatgttggccaggctggtcttgaactcttgacctcatgatctgcttgcctcagcctcccaaagtgctcagattacaggcgtgagccactgcgcccagctgataaagagtatttttattagttaatagatttcatggatttttgtttgtttaatattacatagagtcttctatctctgtgtgttggaatttttttcaatggaatctagtattgacaaattaagattgtcttgtaaaaaataaagtcttkggttatacaagtgacataaaatatagtggctaaacttactacataagaaatgttataaacattccaattaaggatttctaaggtaagattaatagattgaattatttaaatgttcatttaaaaatgcttactatatatctccaaatttggtagtagcttttatggtgagaataaaatggataatatctaactttaattttaaaaaccctcagaaacaaatataattatgtttccaattatgttagtaaaataggataatgaatagataatggtatatttctgaccacatctggktatggatgaaaacaatctctcaggttcatctagaaattacaatgtcatgcaattattcattttaaaagctactaattaataaatttaatatgcataaatataaagccataagaataaacatgtaaacatgtattttgctaaggaaacaagtataggtttggcttcctaacttgaaggactaaaaaaattcacaggagaatcaaggtacttcacttggacaagcaactttgcccggtgagattagactagcccagtgatttccagccggtgttttcagactcttggaatgtgttgtaataaggctaatatattgggatttagctgagctgtcaaccaaggctagcttagggtgccctttgatgtgccctgaaagcactcagtgcttagctctctttacagcacttaatgccgtgtgttgcaatttcctgcttaacttgtctgtctccaccagtggactgggaatttttgtagagcagaatttattttatctctagcatttaacatctaacagtacactgtatatgcctacaaactgttcactgaatgaataaaagtcatttgtttaactcttttatttgatgcatagatcttcttgtaatatcccagataacagttacccctgactttttgatcactctgattatagtatgcttttctgcccttgctaattgtaagttcttcttcattgatctgaaatctattactttattaattgtacactttggtcttttttacttttgagaaataagaaggaaaaacaaattctttagataaaagagataactttataaatctgaaggaacatggaaaatcttcagatttattctccttagtttgcagatgagattcagtgagattggagttttgtgtaagggacagtaacaagagtataatcccagaccatatacatcattggctgggtcgtctggcccttctattttatcctcaaatgactgaagtaaactattttacttcctctaagtctttccaatatgttttcatgttctgacctaaaagcaatactctgatctaataagtttaagaaaatayttaagtttaatcaggtttcttgaatttaatacttctcagagacttttatacattaatgtaccctgtgactttttaaggaatggttatagtatttttagtaatagaaactaatatttcaaggaattaattttcaaataatacactttggaaattgtggctctattctaaacatactccatttttccaggtgttctttcgatgaagtaatttgcagacatcccatgactaattttggcatgttcaaaactatataggaaagtgtatgcagacatagaagaacactaataaaggcccaataaaatattggaaaggcccctctaactataatttcacactatgtagccatctgggattctatcatttagttattcatgtggacaaataaaggttttcttttttaacacttgaaaacagtgagactgacctcttcttttttctctcaaatttatgaaattataattgaagtacactaattatacacatgtatacaatttgattggttttgatacatacatatatacacatacatacacmatagtggaaccatcatcaaaagttagatgataaatatttttattatcacagaatatttttgtgctcttttataacgcatcttgccctctacccctcctagcaactgatctgctttctatcactgaagaatagtgtgaattttctggaatgttatatacaaggaatcatagaatttgtactttttcaggactggagtggtttagcttcttttattcagtctaacaattttgtgattcatgtatattgttgcttatctatcaacactttattttttttttattgctgattaattttccaggtacagataagtaccacaattgtttatccattaatctgttgatgaatatcagagtcgtttatagactttgactgttaaaaataagtagctatgaacattcttaaacaagtctttgcatggatatatgtttgtttcttttgggtaaacacttggaagtgcaatggctgggttactttgcaggcatgctatttttccaaaatagtgtatttttcatgctgctagttctttagagtgaactagactagttatcttacycatctcttacaactgggaagtaagcactcactgtaggaaatggaaaaatcatgaaaaaggaagtacttttcctctaggaaggaagcgtaaagaagaaatgatttggattaggtacattagggaagggcaccttttgttaggcttctaaaactgtctactgggaaagtgaggaggtgcgagtacwcaagtgctgagaacccatagactaattctcttatttttcatgtggtgctttataagtgaaatttgtttctactgtactgagatttcgaatgctgttattttccagtgattctaactctggaatcctaatgatacacacctgtgttgctcttacattgtacacaaggtgtctgcttctgctggtggctcatagtctatgacagaccttctatttcatagtagttttcttgacaaggaaagaagcagaggaatgtcacttttccagatggaattgtcccaatagcttttctttgtagtctgatttaagattatctcagatgggatattcaggacttactgttgcttgtgagagtaaacaaatgtaacttattgacaggatatttaattttgtaataatacaatactaaaggagaccattgacactttagctgtttaggatattgtttttcagttagctattcattttggacatgctatatgtgctaatgttggatttgtagcaatctatcctgccattataattttgacaatatatttgcacattttattattttaaaaaaacaaatgttatgccatatctgaagcacttgatttcaacatatttttcatactaaggagaaatatgtctgcaagtatttttaaaacatcaacattgtagtttattctagaaacctccaatttttgttctgtgttttgtgatttttgaaaacactttaggctttattttttgtttaaaattattctagttagtgaagcctaaaagcagttaattgaaattgaaactgaaggcactgcttagtttcataagaggaaggagagcmtgagggagatttagtactatggtgtttaaaaccaaaacagaaagagtgctgaaagttaaccctgtcctgttgcattaattactgatgtttagtgtatacttttagaagtaagtacctatttgccattctgagtagaatatttgggaattaaaaaaaatggaatattctgtaaaatagataaaagatcctgattggtctaaacgactttgaaactgtactgattttaataagttctggtgttctgtaccactgtagaatgactatagtaagcaataatgtattatatgctttcaaatagctagaagaaggatattgaatgttcccaacacaaagtaataataaatgtttgagatgatgsatggatatgctaattactctgatctgatcacttttactttatatgtatggaaacatcactatgtactccatagctatgtataattattatctgtcaatcaaaaattaatttaaaaaattaaaaagtaaagggcttgtttgagggagaacatacatgtagatgtgggatttgaattaggcttcccacagaacagcacagtatttcggattctaatataatcattttttgtatttttytctcactatgatttaagtaaaaacctacttgtatacatttttatagttcctggcctgacaggggtctgcatggtggtggtgctattcctcatgatcacagcctctacatatgcaataaggtaagtgtcagaatcaattattttkatgtgtatctgtcaggttatttagaaaaaktcttgagtaatcaaaatgtttaaccattgtagtgtcctggttaatggactattctgggtaagtaagagtgaagtatagctgtttctatacatgacttcttgtttctgaaagttctcytgtattagcaaattttctggattggtaagaarttgtgtatggagactgcatttgatgatcaaaagaattagagttcttcagaatttgagtatcttttgaaggatagtgtatctctatgggacacgggattgaaatcaatgtgtacatatggggaccttagaaattcctaggaatatgtgacttaaaattattttattttattatttcattatttttaagatttaacattgtgattttattttattttatttatttttttattattatactttaagttctagggtacatgtgcataatgtgcaggtttgttacatatgtatacatgtgccatgttggtgtgccgcacccattaactcatcatttacattaggtatatctcctaatgctgtccctccccctctcccaaccccacaacaggccccggtgtgtgatgttccccttcctgtgtccaagtgttctcattgttcagttctcacctatgagtgagaacatgtggtgtatagttttttgtccttgcgatagtttgctgagaatgttggtttccagcttcatccatgtccctaaaaaggacatgaactcatccttttttatggctgcatagtaatccatggtgtatatgtgccacatattcttaatccagtctatcattgatggacatttgggttggttccaagtctttgctattgtgaatagtgccgcaataaacatacgtgtgcctgtgtctttatagcagcatgatttataatcctttgggtatatacccagtaatgggatggctgggtcaaatggtatttctagttctagatccctgaggaatcgccacactgtcttccacaatgattgaattagtttacagtcccaccaacrgtgtaaaagtgttcctgtttctccacatcctctccagcacctgttgtttcctgactttttaatgatcaccattctaactggtgtgaaatggtatctcattgtggttttgatttgcatttctctgatggccagtgatgatgagcattttttcatgtgtcttttggctgcataaatgtcttcttttgagaggtgtctgttcatatcctttgcctactttttgatggggttgtttgtttttttcttgtaagtttgagttttttgtagattctggatattagccctttgtcagataggtagactgcaaaaattttctcccattctgtaggttgcctgttcactctgatggtagtttcttttgctgtgcagaagctctttagtttaattagatcccattttcaattttggcttttgttgccattgcttttggtgttttagacatgaagtccttgctcatgtgtatgtcctgaatggtattgcctaggttttcttctagggttttgatggttttaggtctaacatttaagtctttaatccatcttgaattaatttttgtataaggtgtaaggaagggatccagtttcagctttctacatacaactagccagttttcccagcaccatttattaaatagggaattctttccccatttcttgtttttgtcaggtttgtcaaagatcagatgattgtagatgtgtggtattatttctgagggctctgttctgttccattggtctatatctctgttttggtagcagtaccatgctgctttggttactgcagccttgtagtattgtttgaagtcaggtagcgtgatgcctccagctttgttcttttggcttaggattgtcttggcaatgcaggctcttttttggttccatatgaactttaaagtagttttttccaattctgtgaagaaagtcattggtagcttgatgaggatgcaactgaatctataaattaccttgggcagtatggccattttcacgatattgattcttcctatccctgagcatggaatgttcttccatttgtttgtgtcctcttttatttcgttgagcagtggtatgtagttctccttgaagaagtccttcacatcccttgtaagttggattcctaggyattttattctctttgaagcaattgtgaatgggagttcactcatgatttggctctctgtttgtctgttattggtgtataagaatgcttgtgatttttgcacattgattttgtatcctgagactttgctgaagttgcttatcaccttaaggagattttgggctgagatgatagggttttctaaatgtacaatcctttcatctgcaaacagggacgatttgacttccttttttcctaattgaatatcctttatttctttctcctgcctgattgccctggccagaacttccaacactatgttgaataggaggggtgagagaggacatccctgtcttgtgccagttttcaaagggaatgcttccagtttttgcccattcagcatgatattggctgtgggtttgtcataaatagctcttattattttgacatatgtcccatcaatccctaatttattgagagtttttagcatgaagggttgttgaattttgtcaaaggccttttctgcatctatggagataatcatgtggtttttgtctttggttctgtttatatgctggattacatgcattgattgcatgtgttgaaccagctttgcatcccagggatgaagcccacttcatcatgttggataagctttttgatgtgctgctggattcggtttgccagtattttattgaggatttttccatcgatgttcatcaaggatattggtctaaaattctctttttttgttgtgtctctgccaggctttggtattaggatgatgctggccttataaaatgagttagggaggattccctctttttctattgattggaatagtttcagaaggaatggtatgagctcctccttgtacctctggtagaattcggctgtgaatccatctggtccttttttggttggtaggctattaattattgcctcaatttcagagcctgttattggtctattcagggattcatcttcttcctggtttagtcttgggagggtgtatgtttccagaagtttatccatttcttctagattttctagtttatttgcgtagaggtgtttatagtattctctgatggtagtttatatttctgtgcgatcggtgttgatatcccctgtatcattttttattgcatctatttgattcttctctcttttcttctttattagtcttgctagcggtctatcaattttgttgatcttttcaaaaaaccagcttctgcattcattgattttttgaagggttttttgtgtctctgtctccttcagttcttctctgatcttagttatttcttgccttctgctagcttttgaatgtgtttgctcttgcttctctagttcttttaattgtgrtattagggtgtcaattttagatctttcctgctttctcttgtggacatttagtgctataaattttcctctacacactgctttaaatgtgtcccagagattctggtatgttgtgtcttttttctcattgttttcaaagaatatctttatttctgccttcattttgttatgtacccagtagtcattcaggagcaggttgttcagtttccatgcagttgagcggttttgagtgagttcttaatcctgagttctagtttgattgcactgtagtgtgagagataggtataatttctgttcttttacatttgctgaggagtgctttacttccaactatgtggtcaattttggaataagtgcgatgtggttctgagaagaatgtgtattctgctgattggagtggagagttctgtaggtgtctattaggtccgcttggtgcagagctgagttcaattcctggatatccttgttaactttctgtctcgttgatctgtctaatgttgacagtggggtgttaaagtctcccattattattgtgtggttgtctaagtctctttgtaggnnnnnnnnnnnnnnnnnnnnnnnnnnnnnnnnnnnnnnnnnnnnnnnnnnnnnnnnnnnnnnnnnnnnnnnnnnnnnnnnnnnnnnnnnnnnnnnnnnnnnnnnnnnnnnnnnnnnnnnnnnnnnnnnnnnnnnnnnnnnnnnnnnnnnnnnnnnnnnnnnnnnnnnnnnnnnnnnnnnnnnnnnnnnnnnnnnnnnnnnnnnnnnnnnnnnnnnnnnnnnnnnnnnnnnnnnnnnnnnnnnnnnnnnnnnnnnnnnnnnnnnnnnnnnnnnnnnnnnnnnnnnnnnnnnnnnnnnnnnnnnnnnnnnnnnnnnnnnnnnnnnnnnnnnnnnnnnnnnnnnnnnnnnnnnnnnnnnnnnnnnnnnnnnnnnnnnnnnnnnnnnnnnnnnnnnnnnnnnnnnnnnnnnnnnnnnnnnnnnnnnnnnnnnnnnnnnnnnnnnnnnnnnnnnnnnnnnnnnnnnnnnnnnnnnnnnnnnnnnnnnnnnnnnnnnnnnnnnnnnnnnnnnnnnnnnnnnnnnnnnnnnnnnnnnnnnnnnnnnnnnnnnnnnnnnnnnnnnnnnnnnnnnnnnnnnnnnnnnnnnnnnnnnnnnnnnnnnnnnnnnnnnnnnnnnnnnnnnnnnnnnnnnnnnnnnnnnnnnnnnnnnnnnnnnnnnnnnnnnnnnnnnnnnnnnnnnnnnnnnnnnnnnnnnnnnnnnnnnnnnnnnnnnnnnnnnnnnnnnnnnnnnnnnnnnnnnnnnnnnnnnnnnnnnnnnnnnnnnnnnnnnnnnnnnnnnnnnnnnnnnnnnnnnnnnnnnnnnnnnnnnnnnnnnnnnnnnnnnnnnnnnnnnnnnnnnnnnnnnnnnnnnnnnnnnnnnnnnnnnnnnnnnnnnnnnnnnnnnnnnnnnnnnnnnnnnnnnnnnnnnnnnnnnnnnnnnnnnnnnnnnnnnnnnnnnnnnnnnnnnnnnnnnnnnnnnnnnnnnnnnnnnnnnnnnnnnnnnnnnnnnnnnnnnnnnnnnnnnnnnnnnnnnnnnnnnnnnnnnnnnnnnnggtgctcctgtattgggtgcatatatatttaggatagttagctcttcttgttgaattgatccctttaccattatgtaatggccttctttgtctgttttgatctttgttggtttaaagtctgttttatcagagactaggattgcaacccctgcctttttttgttttccatttgcttggtagatcttcctccatccctttattttgagcctatgtgtgtctctgcatgtgagatgggtttcctgaatacagcacactgatgggtcttgactctatccagtttgccagtctgtgcattttaattggaacatttagtctatttacatttaaggttaatattgttatgtgtgaatttgatcctgtcattatgatgttagctggttattttgctcattagttgatgcagtttcttctagcatcgatggtctttacaatttggtgtgtttctgctgtggctggtaccggttgttcctttccatgtttagtgcttccttcaggagctcttttaggggaggcctggtggtgccaaaatctctcagcatttgcttgtctgtaaaggattttgtttctccttcacttatgaagcttagtttggttggatatgaaattctgggttgaaaattcttttctttaagaatgttgaatgttggcccycactctcttctggcttgtagagtttctgctgagagatcagctgttagtctgatgggcttccgtttgtgggcaaccccacctttctctctggctgcccttaacattttttcctttatttcaactttggtgaatctgacaattatgtgtctttgagttggtcttctcgaggagtatctttgtggcgttctctgtatttcctgaatttgaatattggcctgccttactaggttggggaagttctcctggataatatcytgcatggtgttttccaacttggttccattctcgccgtcactttcaggtacgccaatcagacgtagttttggtcttctcacatagtcccataattcttggaggctttgttcatttctttttactcttttctctctaaactcttctcacttcatttcattcatttgatcttcaatcactgataccctttcttccagttgattgaatcggctactgaagcttgtcattcgtcacgtagttctcgtgccatggttttcagctccatcaggtcatttaaggacttctctacactggttattctagttagccattcgtctaattttttttcaaggtttttagcttctttgcaatgggttcgaacttcctcctttagctcagagaagtttgatcatctgaagccttcttctctcaactcgtcaaaatcattctttgtgcagctttgttccattgctagtgaggagctgcgttcctttggagggggagaggcgctctgatttttagaattttcagcttttctgctctgtttttttccccatctttgtggttttatctrtctttggtctttgatgatggtgacatgcgaatgaggttttggtgtggatgtcttttctgtttgttagttttccttctaacagtcaggaccctcagctgcaggtctgttggagtttgctggaggtccactccagatgctgtttgcctgggtatcagcagtgcaggctgcagaacagtgaatattgctgaatagcaaatgttgctgcctgatcattcctctggaagctttgtctcagaggggtactcggccctgtggggtgtcagtctgcccctactggggagtgcctcctagttaggctactcgggggtcagggacctacttgaggaggcagtctgtccgttctcagatctcaaattccatgctgggagaaccactactctcttcaaagctgtcagacagggatatttaagtctgcagaggtttctgctgccttttgttcggctatgccctgccccccgaggtggagtctacagaggcaggcagtcctcattgagctgtggtgggctccacccagtttgagcatccaggccactttgtttacctactcaagcttcagcaatggtgggcgcccctccccaagccttgctgctgccttgcatttygatctcagactgctgtgctagcaacgagtgaggttctgagggtgtgggaccctctgagacatgcgtgggatataatctcctggtgtgccgtttgctaagaccattggaaaagcacagtattagggtaggagtgacccaattttccaggtgccatctgtcacagcttcccttggctagccaagggaattccttgaccccttgcgcttcccaggtgaggcgatgcctcaccctgcttcagctcatgctcggtgggctgtacccactgtcctgtacccactgtctgacaagccctagtgagatgaacccagtacctcagttggaaatgcagaaatcacccttctctgcgttgctcacactgagagctgtagactggagctgttcctatttggccattttggaacctttgttaaaattattttaaagctattttcctgatatgagtttgtcttgctgtaaattaacatgatgttctatacaaaactttggagaaattgtttgtttgcatctgctaaaataacaaattatctgcattcatattgattcttatagttaagagattttgagcaaaatcagatacacattatcaggagcactttcacatgtcctttctaatggacacattcagtttttcagaatatttatagtgttgatgcttctgaacaaactttttagttaaagaaagcaaaaaaaggaatataagatatatttcctctaatcttcaagaatctccaattgttctacttgttcagatgtgaaatttaacagaaacacagatatatatatatgtatatatgctttgaaagtaattgccaaataatatacttaaatgaaactgtctttatagtttttaacctttgtgcacacacatacatacaccctaaaatttcacaagtctactcactacccaaagattaatactgtacatatgtagtgtatttttatagattaaatccttcttgctcttcttcactaattcccctcctcctacccccaaatcattttttctctcttatatacatatgtattttaccaaaataggaccatattagagtattacttttaatttactttttgcctaaatttatattatgaacatttttacgttaataaatattctgttattattctctttactgatggcacagcacatcgcaatataggkttttatacattattttcccagacccatattactaaatgttttgggtagattttgttttgtttttttttttttttggtatttcaattttgaaacaaacacccccatccatatgtctttgcatgctttttcaatgatgtcctaaggaaaaattcttagatgtagaatagctgagtcaaattgtaagaacacttttaaagcttttcataagaatgaaaaattggtgtacagaaaggcaactcactaacatcagtacatgagggtgccaattttgtggggagcaattttattttatttagatagaggaatcattaaaaaacctcactttttcaattttaggaattcttgaaggaaaattagagcatctgacatacttattttaaaatccttgaggtatagttttgtcaaatggaataaaaagatcagcttcaatcctgagcttttatatttgctctcataaacaatttaagcccttcctaatcttcagtgttttttatgctttgtttaaaatttgtttaaacaagattataacacctagtttgcttttctgttttattgttagaatcatgaaattcttaaatgaatcatggagacagatatctcttttattttaccttttctttttaccagtaagaaactaaagcactagacaaatcaagtgaatgaataagtccccagtgtttgatttctgatagtgaaatgtagcctcctaattcaaggagagttcaatatgggtcaatctgttaaaataattaatgtatcccgttattagatgacaggaataaattttctcatctcaattgattttaaaatggcacttactaatatgaactcaaattttgacttaaaataatcagagtaaataagctaaaaattaaaattatttacattgtagaattaaaaaatataaaagccagtattggggttatactcaagagtgaaacactagatgtattcctaagaaaatcaggaaaaaagcaaaagtatttttaattctaycaatatttacatatagtaaaaaatgaaacatttggaattattagaaaaagtgcaacaataaaataccattatttccagaaaaagtagatatatctactttttctggaaataatggtaattattaggtttctaagagaatccaagagaattacggaaaaatttggtgttaacaccaagtaaaagagttgaaaaggtaattggatataaatcaaatataaaaataatccttttattaactataattagtttgaaaaattgaataaaataaaaatataccacttacgattgcagcaaaacatataatatctggagacaaaagatayatgttcactaagagaaatatgtagagatttgaataaagactgtgtactataaagatatagttcttccttaattattatatatatatttttttgagacagggtctttctctctcatccaggctggaatacagtgataagattacagctcaatgcagccgcaaccttgacctcccaggctcaagtgatcctcccacttcagcctccctagtagctaggatcacgaacacacaccaccatgcctaattttattttttttaattgtatttattttttcgtaaggtcaaggtttcaatatgttktccaggctggtctcagactcctgggctcaagtactccttccacctctgcctttcaaagtgttggattacaggcattagccaccatgcctgacccctcaatatatatatatatttttaaggagtgttgcaatttcaacaacgttctcagacaggttattttgtttgttttttttaatttagcaaagtgattccaaagtttgtctggggtacatccaagtacatatttcaaaagaggagtaaaaggagggatgtgccttactaaacattaaaataattaaacttcagtaacttaaaagagaatgggacttacttgcaaaaatgactaacacattgaaccaagggacaaagtcagtaaaaagccctgtaaatgaccttgcaatatataagaacctgcagataataaaggtgrcattacaagcttatgaggaaagtaaagtttaagcaaatgtaggtctatctaaattacacatatgaattaaaaatactctatagaaatgggtaatgattataaacagaaaggtcacagaagaattaaaagtaacagacatatgaaataataccccatcctacttataaaaaataatgaaaatttacaaaatttagtytgagtttttgggaaacaggcactcctagcctacagttgggtttgtaattaataaatayatttttagagggcaattggcagcgtgtattaaaagcattaaaaaggtgtatcccttaattttgcagttcaaattctaatggttttgatttaaagaaggatcagagggccaagcatggtggctcacacctgtaatcccagcactttgggagactgacgcaggtggatcacgaggtcaggagttcgagaccagcctggccaacatggtgaaaccccatctctaccaagaatgcaaatattagctggtcatggtggcgagtgcctgtaatcccagctgctcaggaggctgaggcaggagaatcacttgaaactggaaggtggaggttgcagtgagctgagattgcaccactgcactccagcctaggcgacagagcaagactgcatctcaaaaaaaaaaaaaaaaaaaaaatcagaactttgtatatgttacaagggatggtaatgatactgtttatgataccaaatactatgagtggagtaaatgtaaagcaattgcttgctgcttaagtaagggtttctctaagagtctatgggaagcatcagattcatctaggaagcttttgtaaatatctgccctctaattccaatattctaatatataaaatccacccaggatatatgaaataaaataactgtttctcttttacttctctcaaacattctgtagattatgcttatcattctctgtcttttcagtgtctttgtcctcccccagagcaataacattgaggtatcattcttgttacactgtccaggaaaaaatataacactttggtcgtcatctatttcatttatctctttttgagtttcccttgaactactctcaaaatatgtattgaaagaggagctttggttgttttggaaattatttgaaaactgagaatattgataaaataatagccaaagtacatattagcagactactatctgcttcttagccttatatcataataacttgaaaataaacaacttatttttattatttccatgtgtctttatttgaaatacmaagaacttacaaaatgataaaatcttactcataatttttgtcatttctctctatatactgtgttaatactttggtattagtagattaatatgatgtactcatgttttagcttttttaaattgtgagatgtttgaaatgatacatggtatttttgatatttttagtaagatggaatgtaaagtagcattaaaatgagtgtatttgtttttgcagagtttctaactatgatatcttctggtatactcataacctcttctttgtcttctacatgctgctgacgttgcatgtttcagggtaagtttacaaatgtatgtatttaaaaccatttgtgccccaaaatggggtaatgaaagaaaactctataggaaatttcataggaggtggtaaaagtgtcaagagtgaaagaaatagtttctctactattgaggataaygtcaagaatggaagaaatagttttatttttagcatagcatattgtaatgaaaccagtataaagtatactaaatttaraagctagaattacctctccaacaacctttyagtttctaaatcttcctatggatatatcctaatatcttctaaatgaaaaaatttaagaatgaagaacatcaggaatatattttagtatttgtatttcctgaarctgtcctgctaaagcaagatttataataatggaatttccagtttttcattttaaaagttctacaggaagtaatacttgcagagagagccaaagatttaaaataaccaaagaaaaggatctgtcaaaatcaccaaggaaaaaaaacataaagtgaaaaaataatgtatcctaagcttattacaaagagtatacctaaagtattccaaaaatatgtgtacccaagcagtatactcaaaaacatggtgcttaaaacaatacatgaagatagatgaagaaaataatgtatttttgtacatgcatatgtctgtatggccaccggcagtgaacttgatggctttggcgtgacattcacacctgcatgacataataagtctggcagcagttttacttggtttggcaagatacagggcaggacacacagaatgtcaacaggataatgtcaggtgcttattaagtagaaatccctatatttgctcagaagcatttacccccactccttcatgtagcaactctaagataagaaacccatgtgggtaagcatggtctaccttgcattgggtaaggctcattcgtactccacaggaacctgtatcttgggaacagcataggtcccctcaagggatgcccttgggatcaagaacacactgtacacaaggaggctgaggtctgtgaggtccaaaatgatttcatagttcaatcacagtcctttctgtccagatgcatttcaccgataataaacaatgttgctggtaacacagctgacaatccctatttttcttaacctgaaatatttccagggaaacagtttgaagaaaggttcagacctttgtttagttctttcttcagaatgttttataatgtaatttatcagtacagtgggtcatttacattgatcatatatttatttcagggtacatattcaaactgttgctttggcttttttccmcctgattttagagactgctgattaagacagcagtatcaaatatcccatatgtcctggttagctttgttcagtaccaaggttccagaacacatagttgtagagcactggaaacatggccacacattataactaattctctggagcctcagggcaccgagaaagcccttggtagataaaagactgctttacattctgctctttaaatgggattggttacctgtccagggctatgctcctgaagaggactatgaataaccagatacaactaatgataataacagtaatctaaaatagttacataatgcttactctatgctaagtataaattcaaaatgcttcacatactttatgttattaaatgctcagaatgttatgagaataaataatattgttaaacctctttcagaagtgggaacactgatgtttagaaagattaagyagcttgttgaagtttacttaactgatggatcctagattcaaacctaggcattctgattcagaaactcctaagtttttactacaaggctttatttttttggagaggtctgtacttctgagaatttgatgttagtatttgtttaaatgcctttatctttactgctttgagattgtgatctgtctattcatctatgtccctatatcagatagatatagaaaataaaaatgcaatcatttattagtataattatatattattttgcctttatgttttactaaattaaaactctgaaaaaaaactatttctttgtaaatcaaaatagtgtcaattttttgttaaaggatcagcatttcaaacagacttctttttaaagaggaggattacattgagagttctttacttttttggaagtaaaaggaatgcatatttaaattttgatttttacttttatagaacaagtgtcatagaaagtgactttaatttatacagagaaatagtaggcatctataggatgaattatatataatcaatcaattattaaactaaattaatatgtatttattcattataggtagaaatgaagaaagcaattattctaattttgaaatatgtcatgcaacccatacataatacaataagcattctacagtgcacattttttccaggaaatttaatagatatgcttctggtatgagaaatgttactactgataacattttaccattttctcaaaattaaaaaaaaactatactgatgaaggattggcttataattaagtctatttatttgtgcaaatgttggaaacagacatattttaacttctgaaatacctagataactttgttcttcaacttttggttatacaaataaagtacaattgttcaaagtaaatttcttggatttatattgaaatttctgttcaacagtatgctttaggtctgaacagaaaatcactatttgcttagcattagcttctctgtccatcaatgtggtaagtaccataaggtaaagaagagcaatatattgcatgatgtctagtcatccagcattgatcattgatttggaattttgaaaaatcaattggaaaagctagacatattataaaactgcatatttttaaaatgtaaacattcatgtgttatttacatgaatgctagcaattcagagaattatcagtgtgggctagaaattctagaaaatattaggcttcaaagatgaggtgatgagacattgttgactggtttttctacctaagcagacttttacagtaagagcatttgcttcatatgattttctaaggtcatttttttcatagaatcttaaattttaaaggaagctgaaaagatatcttgatcaagcctcttttaagctcctctgcaatttatctactaagtcaatgcctaattttgaagatgtccattctgtcttaggggaagttctaattctcacaatgttctttcgtttttggttggaattattttactgtaatttctgtctagctatttaaaagtctgtgattctggaggccatggaagttaagtcgcccacttttctaaattctattcatctgtttctcacgttgtgatatttcagatctcaattttctgaactgtctcttcgaatatattaacaattaatattaattgaatgcttctcttttactaacatttgctctcattaaatcctcctaacaaccctgtaaattattattattattattattattattattattattattattattctcaatgttcagctgagagaataggagcagtgagagataagttgctgagggccatggctagtaagtagatttccagtttgaacccaggtatcaggtaccaaaattaacattcttaaccactaagttatgctggcccccatttggcaacacttctctgtatcccttttaaaacttacaccaaactaaatgttcttggagtatgtgatctgattttggcagagtgaaagtctcactttcttcactacaaacattgcaatcggtattatttaggacccaaattttttgttctatgattatctgtgcccttggcttaacctggttttcattcttgttgtatattttagcgattttcttcattttttataaataaatctgttgcatgccaccctaaaaagatgacatttcatgtacactaaactagatgtttctttttagtgttaaaatacatctttaaaatacattaattttcttctccaagatgttagtatattatagaagttaaaagatacatcacttaatacccgtatgaacttggcagataatttgtccttgctttttgttagcaattaaatgggattaataaaatcacttatatcatagtgttgtcttgggtttaaagtaatgcagcaaagtaggcagaatatagacatacttaataaatgttagtaagaacaaattatactagtaccaatacttatagctttgtaagaatgacactccacatttaactttgaaaaatcaggttttttgataaagacacaacacttttgaaaaacccagattttcttatcaacaaagtaatttgatgaacatagtgaaaactacttagcagctcaaaggaatattccttgatatggcaacaattataatattctaagatctctaacattctattgatttttagcaataaaggtttatctttgcaaaacaagccttcctcctgaggaattttttgttttgatttttaatatacctttttgggaggttgctattggtgtgcttaggaatttaaaggtattcaattcctaagatacctggtgaaaacaaaacaaaacaaaaccatttcctctttccaaacatgtatagaactggatatctctttcctcattttcttttgaaaaactcagaaggagatgcatactgctattctcacttactgataaaaagagtattggagggaaaataaattacgaatgtcacagtctctgcttaagagccyaacccagctcctttcgaagaaatgtggagggaatgcattgtaaatgagatttggcaccttagcttctgcagtcttaccatagtcaacactcccactggctttagcttggagagtgctgtgtgggtggtgattgtattttatgtctttatttaactgagtgagagagactataatgtgataattctggaaatgatagaggggaaggtcctcctcaaatgtttggatgacaatgacagcacattaaaagtgtaaatatttttttgtgctagctctgctgcacttctcagatctttttattatatgaatgatacctgaattattcttttaagcagaactctttgccatttggcactacttgttagcaagagttaatcatagagcatgatttatattctacttgaatcattttttttctaggaaatctaaaaggagtatttttatgtgcatgtttttaaaaacatttattctttatgccaggggagcacagtgggcaggctttgtcaacagtgacattaatgaacccccggcagtgtcataggcggatagtttaacagggagcatcacaggagtttagactcaagatgttaaccagggttagacagatattgtgggggtcggcttattgtgctgactggaaaataacctccctctattatggcctcgggcctcaggaggaggacattaaggatatactgttagaggatagagatatttgtgcaatatagtgaagtgttaaggactgctgatacccaagtatcttcycttttagaagccactttcgtggaagtcttccttcacccacactgatgtggcagagggaaaagcttggtcatcttgctactggtgggaggcacttgctcctcttagaaagtcaaattgcattttgaatggaaggcccacaagttgtattttaaacaatcctattctagtactgagggagaaaatttttactttcctctatgttcttttcagtttcccatttcttgcctgtacatttgcagtgactttgtaatttattgtccaaaccagatacttttgagaatgaatggggatgctattgataattcagcagtggctatagaaaaaccaggtcatacaggtattctacctactcctaggcagtggggaaagttttaagagaggctaatgcactgttttaatgtagactttgagctagagccacaaaaggagtccttaccttgaataggggctctgtgtgtgtatttgagaaacagaaccttcaaataatacacactgtaggtttgcctagctttgtctcactttagagattgtaattagatgtccactaccatggtcattagaaggctgaggatttggttgttcatgacagtgggtaaaatcttttataaactctctgtcactgatatagatgacctgttctaatacttcctagatgcctagtttctaatgagtctggcatactcgttatcagtttggtgcccattacttctatcacaaaattctacttctctttccataggataggggtttttaacatggctccataatccctaggactaattgaatggattcagggattcattaattcctgaaatacatacacacacgtatctgcatatttatgtataagtttaattttgagacacatatgtatatttttgtataaaacaagtttctcaactttcattagataccgtaaagtttgtgtggtcaaaaacgtttcaaaaaatatggaactgaagtttttaaagctagattttaaccaaagagctgtaatatctaatatcacattgacacattttatatagcctacttcagttttatttagagttagaatcactgcattgtgggaaaaataaaagccactggggcattttttttcttccatgaaggctactggaaaaagaacttgacaaatataatgaacaacttaacaactgcattatcattttagaggataataattatactgttcataataattctctagttttagataatgttgactatgtgacagggactattcttagcactttacacacacacacacattaattttttgtttgtttttaatatgcacagtactataagttcttctatcatttctattttacagatggggaattgaagcatgaaagattaaattaagtaactgtctaaagtcacacagctaataactgaaaaaactaagattgagcccatgaagtttgacccctgaatttaacttctacccttttcttgaattattgaattatttatttgtcatttagaaagtactcttgcttatgaatgaaaaatatttatgtattgtaaaaatctaggatatatttttctattygtycatgtaagttggtgagtatatatacatatatgtttgcctgttttgaatcagaagttcaattttgattcagggtacatagagttcaaggttttgaaggtgaaatctaactagctcccagaaaatggagtaagaagaaaatggcttctttatggtgctgcctgataaatgtttcctaaaatgtttgaccttgttaagatacataataatatgataactctataatataatgtaatcattttataataaatctaataataaaatwawawwwatgtgatactttacttgccagaattcttccatgtaacctgaaaataacaatgaagaagactaggatttagactggagcagataaaaatgctgtggaagagatattcttatcagtattttattgccagtgtgtctttataaaaggattaagtcaaaacatagcaaagaaagcaatggggaaaatatattattcatcatatagaaaaatcaattaagtccacagatttccaaaacccataccttttagaattttgctatgaattttctctaaatattagattacccatccagttattattcaaatgtgtgggatgaatttgataatggaattccaaagtaaatacataaacgaacccaagtaagcatgcaatttgtgaattaccatagttttgctatcccacacattttggtattttgactttaaaaatagtgaaacaaatgccctgggttataatagtgaagaaasaggattgattcctagaagatcactaatcttagacaaatcagttttttatagagcttcctgatttgtgcaataaagaaaaataattgtatctcccagacctattagaagagaaatattagctatcatacataaaattgacactatacacacacatatacatatatacacatatatttttattgttgtctatgtaatgttctccatttaaaaaacttttctatttttaatttttatgaatacatagtaggcatatatgtttatgggatacatgagatattttgatacaggcatacaatgtgtaatgatcacatttgcataaatragatattcataatctcaaatatttatcttttctttgtgttacatacaaattgtactgttttcattattttttaatgtacattattgttgactctagtcatctaattatatttttataaccaatactcatccccacttctccccctctcattygcagcctctggtaatcrtcattctactctctatcttcacgagttcagttttcatttttagctcccacaaataagtgagaacgtgtgaaatttgtctttctgtgccttgcttatttcacttaacacaatgacctcagttccacccacgtcgttgaaaatsagaggatctcctttttgtggctgaatagtacacygttgttatatgtagcacattttctttatccattcatctgttgatggacacttaggttgcttcaaaatcttggctattgtgaatagtgctacaataaacatgcaagtgcaggtatctcttcaatatactgatttcttttcttttgggtatatacctaccaataggattgctgggtcatatggtagttctgtttttagtcttttgaggaacctccaaacttttctcccataagggttatgctaacttacattcccaccaacagtgtatatgagggttcccttttctccacattctcaccagtattggttgttgcctgtgttttcaatataagccattttaactgtggtgagataatatcgcattgtagttttactttgcatttatctgatgatgtgatgttgagcaccttttcatatacctgtttgctatttgtatgtcttttgagatatgtcaatttagatattgtgcccatttttaaatctgattattagatttttttcttacataactatttgagttatttatatattttggttactaatctcttgtcagatggatagtttgcaaatattttcccccattctttgggttagatctttactttgttgatgtatgctttgctgtgcagaagctctttaatttgatgtaattccatttgtctatttttgctttgattgtctttgcttgtgggatattactcaagaaatctttgcccagtccaatgtcctggagagtttccccagtgttttcttttagaggtttcatagtttcaggtcttagattaagtcttcaatcaattttgatttttttaatttaggaagagatagagatctagttttattcttctggcatgttgtatttccattatcatgcatttcaaaaagttttaaaatttcctcaataatttcatcattgactcactggttatcaggagtatattgtaaaatttctgtgtatttgtatagtttccaaaattcctcttattgatttctagttctgttccattgtggtcaggaaaggtgcttgatattatttcaagtttttgaatgttttgagacttttttgttacctaacatatgatccttgagaatgacccatgtgctgaggagaagaatctgtgttctgcagccattggataaaatgttctgtaaatatttattaggtccatttggtctatagtgcagattaagtctgatgtttatttcttgattttctgtctgaaagatcggtccaatgctaaaagtggaatgttgaaatctccaactattgttgtatttaagtctttctctctctttagccctaataatatttgctttacgtttttgtgtgctgcagttttgggtgtatatatatttacaattgttatctcatcttgctgaattgacccctttatcacattatgatttttttggtctcttcttatggtttttgtcttgaaatctattttgtctgatattaagtatagcttctcctcttcctttttggtttccattggcatggaatatgtttttccatctgtttattttcagtctrtgtgtatcttcataggtgaagtgtgtttcttgtaaccagcagatcattgggtctttttgtttctccattcaaccactgtaagtcttttgattggacagtttatttcattgacattctatgttattgctgataagtatggcctttcttgtaccattttcttatttgctttctgattgttttgtggtcttctctttcttctttccttccatcctgtcttccttttggtgaaggtgattttctctggggttatgttttaatttcttctttttctattttttatgtatctgttgtatgttttctgatttgtggttacaatgaggcttgcaaccaatataacccacctcaggcccacagtgaggtactgcgtagctactgcctatgttcattcaaggcccaaggactcctcagtcagcttgtagtgaatgcttccaggcttgggacttttacttcaggataatgcattcccctctggcccagggagtgtcaagaaatgtcatctgagagccagtgcctggaatcagggaaccttgcttggtgctctaccccactgtggctgaattggtatgtaacctgcaagacaaagtcycattcactcttccctttccttttcttacgcagaaggagtccctctccataacaaccacagttgggaatttgctgggtcacacctaaagccagwacatctctcagtctcacccaaggcccatggcgagtactgcgtgggtaccactgctggttattcaagggccaatggctctttagtcagaagatgattaatcttgccaggactgggtccttctcttcaaggcagcaagtttcttgcttgcccagggtgtgtctagaaatgtcattygacagttagtgcctggaatcagggcctcaggcctctgcccagggccctatcctactgtggctgagctggcatcccagaggcaggacaaagtcctctttattcatccctctcctctcttcaagcagaaggaagaggtctctcccagaactgtgagctgtgttgcctgagcttggtagagaggtggtgcaagcactctcttggctgctctggctagtgtctcactggggcktgtgccmcccacatcactggctgtgagccctgcacagcaccaggacttgcagggaatttcagtcctttaaacctagactgcctttcaagtttatttacaatcccagagcactttagcccaaaatggcaaggcttgctgagacttaggttttgactgctagaatgggcaattcctttttggctagtactgggtctaaatgctccctctgtgggctctggctgagttcctcctggtgttgcttttcattgtgacagggcaacactgagttctcttctccctaacctccttatgtatctgcgagttccaacccaaaaaagaaaaataaaatagaacattgtgccatattctaggtaaactatagtggttctggggataggagtgtttatttcccatctttatgcagggaatccctttcacatatcactcactcagtatttactggatgaagctgaattgcattaattagtttaagctaggaatgtgttgtccttctaggctcttccaattttcctcaagtatcaaggcattacagatgacaataaaggataatctctaaatttgtttaactataacttggactgtcattttgtaactatcatttatatttagtcttatctaggtaattagttattatggcaactagtatattgattcccaygccaaaggaattagcttttaaatcttaactattttgattatattgtagactggcacatttttgttyggggyctttatgcatytctgtggctaaaaawtctgaaagaaaagaaaacccatgcctcttattttattttattttattttattttttgagacatggtctttctgtgttkctcaggctggtctcaaaagtctggcctcaagtaatcctcccagctcagcccctaagtgctgggtttacaggcatgatccagcatgctcagacccagctctcctgatttgttttatttcactttttagttcttcaatttttcacttaaatatatggggtgaaaaatattattgaataattagatctctcttagatggaatccaaattcttctcctccataatatttacatattttcaatatgttaataaatacaatgtcctatataactatgatctttaagatataaagtttttttaactttatatcttttgtttgccaacttccaattttgtttgccaacttccaactttttattcattggatttttaaattttatgtaaaaagtagtatttctctatagtaattatggactaagatcttatggtttattcacatttgttgatattttatgctgtaagccagttggcagtagggattgaggtcatgtgatatttaccccattaacgatgccttacatttctatagcttgtatgtatatatgtctgcttatatacatatagtatatacagaacatttttatgtacatgaagtcatttatgctgtaagttgtatatattaatggattttcttaaacttccaaactgcgagtttattttttccccagttttggagatagaccaaatactttttcacataatttttatctcagtttttctgcagggaacttttttatattagccagtgttcacagctggtattacaagatgagaaagttgggggaaaggaggaggaaaaagcactgtatttatttaagaaacattttcagtatagtactttctgaaacatgaaataaatattttatcctccactgtcattttagtgaagcatgaaagctgaggaaatactaagaagtaatggatgcttacctttttttttctttgcaaggggtcaaagctcttccctttttatacccgtgaagtacagaggaacaggtactatttctctttttcagttaaggaaacttagggaaatgacctattttacttcaggtactcaaggaagttgtaaatgttgatcctaagcccttaagaccctaggcwatacattagtcagctgcacagagattgtggcagaatcagctacctaatttgcagggcccactgcaaaatgaaatgtgggattctttgatcaaaaaattattaagcgtttggagataatgacaacagagcagtaaaccaatagcagggtctttctaaagagcaaggtccggtgcacctgcacagattacaaacacatgatgttattcctatcttgtaagcttggaccaccccaccagtaagagctagacacaattcctgctgtggttaagctgcagatgacagtactcttagctatcaaaggcaagagccaggaaagaatgcagaggcaagaactctgttaggccagaaaaacaaagtaggggtgggagtaaaagctttggtagggtgggtacccagatacttaggatttcctgaggcacactggatctgtagtttaggaaagcactctacttctaaatgcacctagcaagtagactttactctcttgataactgtctrttacttaatgttactgtctgttacttaataactgtcatgttactacatgccatttgctaaaatatagacctcctttttgaaggttgaaaatgaggtcraatatctgttaaaaccagatgactccccagtcaagtgtttcaacaacaatcacaacaaaagttgtttatatacttctggtcactaagttaatcaatgaatatttattgagcacttattataagtcayaagcactattttaggcagtagaaaaatagcagtggagcaggataaacccttgactttaagaagtgcacattctggtggattctacagaagttagagaactgcaataaattttaaaatacacaatttggttttattgtttgaattaaactctttttctttgtacttgaagcaaaataaaaataactgtcagaatcaagatatatttttaccataaagaaaaaaaaatcatattataaaatattaggaaaaaaagtaggttcctaagggataagaatttttttctcctccttcaagatagattaaaataccacaaatataaaggtcacataagtgacactcatttgtgggatatttttaacatgaaattaaagtagggatgattctggcattgtccttttgtcaggtgtggtattttgtaatatttatcttttgccataaaatcatgttttgattaccataaaatcctgttattacttagtaggattcatttaatgtattatattattttataagactttgtcacagccgggtattaaaaagaaagaaacaaacagaaagcaaaacaaacaacaaaaacaccaagatagtataattataatgcctcttgagggaaacaagggaaaaaaaagaaacctacaactttgaaacatggttgaaagtttgatagcacatgttaagatccttttgaatgcagaaacaattttgaaactccataaaatcctttatttctcatgataggagaacactagacattccacagatacttcaaaatttctccttggaacatcatataatgaaacttaaaacattaataataaacacttatatttccacatagtctgtgcacctcctttcctcatccctcaccatgtcattataacttggcaagactctctgtttaccattcactaatgtctttttcccttcttgttttttgctttaaaattatttagcatttgtttatgaaagctacaacaatacatacaagaatgctgtctttttgattcctacrtgatttgctatattaaaacaaattatgtgtttattgtttgcttttaaaatcaattcactagaaatgcattagagatctattatgtgcaagaaaagtattagagggatgcagaggtttggcagtgagtatgaatgtataagggatraatgcataagacatgatcccttctacttattcaggaataaaccaagtacctttgtgcatatggcttcctcatattggaatgccattctcctattctctaacccctggaatctctacatccttcagctgccttcttctctgtgaagcctttctggaattttataatcaaagttcattacccatctctactctcaagaggttatcatatgtttatatggcattaataattttgccctttttaattatcatttttggttctatgtttgatttgacccattatatctgtgctgtggctattcaatttaaattaaagtgaaatagtattaagaattcagttcttcacctgtactagccaaatttaattgctcaatagccacttttctctaatagttactatgttggtcatcagagacttagaccatttccactatcacagaaagctctattggacagtgctgctctagactgtgcatgcctttgaaggcagtgaccataatattgaaactaataagattccaaaattaataaaataatatgtctaaatgaggtatatcacagtggcggtgtggggcaagaagcaggggcagtattgtttggcaaatagacacasagctttgtgttatcttaagtgggttctgttacatttgagaagatttcattctactttaaagaaaggcatgcatctaaaataaataaaggtaccaggaatttaaaacaccataaaaatcatatagaacatgtgcctcaaattttaataaatgtggccacagtgaagtaaatggattagggagataatatcagattttgtctatcaatccaaatatccttaatatctagtctacattccttttcaatattctttagaaaaagattgttataatggccttcaaatataagaattctaagaaattctgcactaataccaaagaaatgagcacttttactctttactcatacaatgaaaaagtaagttattgcattcaattgagcttgaaaaataacacataaaaktattggtttgataaaacatgctccctccgtttctaagtctatagccatataaagccatcmaattttgctcaatgtatacattggtcttcaatttaaagattgtccataaagtagtgtggatattttgcaaggggaataggcctggtacagaggaaggagcacagactttggaatcagactaactgggctttcagtcccagctctgcagactgacattattgtgttgggagatacttaagtactcccaatctaaggccactaatctttaccatgcaagttttttttttttttyttttttaaccagtaggtggcctttcaatactgagttaaaaacctgccttccagtgaactttcagtaccttcaccacctwattacagccaaatgacctgggatgtcatacttgagtttttttttttttgatgaatgattttatcattgtctgtctttagatcttatccatatttctttggtggcaagagttacaactaagacaaagtaatctgagctctctattctgtttgttttttgtgtttttaggcatataccatattgtttttattactatagtcttgaaataaagcttgaaatctgaaagtaaaaaaagaagacaaagtaaggacagttttaatggggttttaggacagagatggcctatgctatttagcttgagtgtagctgaacataatacaaagctctcaaaattaaaaggaattttagaataatacgtgccactttatgtgccaagaacagcacaaatgtttgattgggctggcctgaagaactttactgtatagtaacaacattcactactctaaggacctagagcatggtagagttatgtccacttgaatgttatgacaggagaagggattaacgacatttatttgcctggtattaagaccctaaattataagcagccccattccaacacacacacacacacacacacacacacacacacacacacacaatctgacttttgtttattttgaaccccttttacaatgcctacctatttaaccatctgatttgctttgcgtgacataggggcatagagtgagctaggtargtttctgaaccctatgctttgactatayttagttaatctcttacctgaatgaaagccttaggtttctcatctgtgtaatataaataaaaacacttaccttgtatgattattttgttttgaagtttaaatgagaaatagatgttctaaaaattactgatatgatactttcttagcaagcattaatcttcccccttccttacatttctcagagttatgttgtgaggattcagtgaactaatgtgatatatcatgagaggtgaagagcatagaatttgaatcagatctgaattcaaatcttggccctgctacttatcaactgtgtgacactggggtattatttcatcttttaaaatatttttgtttttaaattttaaaatgggaataatgatcctagttcatgcagtttttgtgaggataatgtaaaatgcatatacatttccctkggctagacctggtgttttccatacattactaagctattattaaaacactaccccagttactatctgtagtctgatttatgttcagcttctttgaagatatcttccaaactagatcatgagtttctggagtgttaggaggcggatttgactctgttgaagtctgaagaaccattggagtagtgctaagtgcattatgctcatgtctgttcaacttttggccagtagaataaatgcttggggttttctacctacttagctatcagtcactatccttccgatggccaataggagcaaaaggtttgggtaaattattaatgtaaagaaagctgaatcaaattcctaggttgtctaagtataatatcccagcaattgtattgggtgactagaaacttataaatgattagtgacaaaaatttggctcaattttgtataatatttatcaatttatctcatacataggctatatctactgtattactttaaaaaaaatgtatgtttgtgtgtggtctactatgatgtcatgtaatgcatgcccctgacatgtactgaatgctccctaatgacttcatgatgactagttttaaggaagaaaataaaatttaaaaaaggaagtgagcataagcaaagagggaagaaaggaaagtgatcaggatgaggagatggtgaatacaaccagagactggcctggtcattgctttcctaaccttcatatatggatctcttagtatcattatacagttttgtttaaaaatattatttttgtaaaagcatcatagctgttatttatttatttttgagacggagtttcgctcttattgtccaggctggagtgcaatggtgtgatctcagggtcaccgcaacctccgcctcccgggttcaagcaattctcctgcctcagcctcccaagtagctgggattacaggcatgcaccaccacacctggctaattttgtatgttttttagtagagacggggcttctccstgttggtcaggctggtctcgaactcctgacctcaggcaattaaactactaaaattaagtatttgagagcatgaaagataatttaaaaagcatgtactgtaaaccaaccaaaaacagataatcttggaaataaatttttccttagtattctttaaaataataaaatatactgcaaaattttcaagcatttccaaatcttactttgtcatgcaatacttgcttatgcagcagtgaccttgttgatgctatgtacaatctgtcattttatggattatccctactaggtagatgttaaccacttcttgacaagaaaggcaggacacagaaagttgaatggtttgtcttggtttctcacaaaataagaaataatcagaatgagatttttatggtgtgggctctcctgcctgatttattattttgaactttttatgtggttctgtctatggagaaattgaaaagtaaacagatttagggactgattgctgtatatacattgttttcagaccataggagagacaaacttccagttccagttatttctgtttaacatttctctgcaaatcagcaaggcttgttttatccaggcttggccaagttaaatatattccctgtatttttcccttatgtttggatatctagcaaaatattcctcattatactgtttattgaagtgaaaacttgtatgtgattgtatgaatgcctaatagtcttgaagtaaaggccatcaaattcaataatgcctggagagattgcatgtattcttctctaccacatatttatagcatttgtttggagtgccaaaatttttgttttagttctatagataagaatttctcaaaattttttaagatttttcaatttctcctaaacataatacataaggaacactttttggataaatgctgtgtaaagttagcaaacaaaaacaaaaacaaaaacattattttcttttaccgtgtcccctgatctcaaatcttttcatttctctgtttgtttgttttaaatgtaattttagagggctgctgaagtatcaaactaatttagatacccaccctcccggctgcatcagtcttaaccgaaccagctctcagaatatttccttaccagagtatttctcagaacattttcatgaacctttccctgaaggattttcaaaaccggcagagtttacccagcacaaatttgtgaagatttgtatggaagagcccagattccaagctaattttccacaggtcagattaattttgtgtttgatctccacaaagtttgtttccatttgactgatcaacatcacatataaatgtgtttttcaagctatatattcatgcataataggatatttcaggatgtttcaacagtaagttagtacctattattccattacaggtacctgagagttcaatgcaaaaggtctatgatattagaggatatataacatttctacttaactgaccatatgacctttgcatacaacagcattggtgcttgcagccaagagatgacaaatattttttcccatcatttgagaaaagctgattgaataataaaaatagtagtwaaaaaaacctaccaccaataccacaaattattattttattgtattatattattatgtataatattgtaaatagtaaatagcaaaatcaatttattgaatgcttaatattatctgccaggcattgtgctaaaatgtcctgtatgcctaatacagaacacttattagacatacagaatgtttcttgcaatattcgcaatgactatttgaagtaattaatatcaccctcgattttctgataaagaaattgtacttaccttgatcaaaatctccaaaccagtaagtggcagaggaagcatgtaaacccaggtctttgactaatatgcttgctcctggtaaacgtccataagtattcagcgattagttcaataagggcccttatcttcctctgtgcctgtgagaactgcccccgtgcaaattacaccttttattcctcacctataaaaagtggaagtaggaaatagtgatgtcaaatgtctctattggaagagaagaaagagaagtcaaaagctagaatgaatttgtagatgactttggaatagtgtattagtcgtgtttattattattaataataatcctctagatccctattagcctctataattttcagaacttttctgagtttcacataatattcacaaatattagggcaggtatggcgactcccattttgctcatgtgggacctgacactcaaagagtaagtgattgtctcaaaggtgcaaggctgctacattgcagaccttgtcttgyagtgctactcataacacagtgtggggctaaatgttattatatgcagaagaggcatgrtctgtctgcatgaaagaaggaagatttgaaacaactaaagtgaggctttaaaaagtgaccattaagacaagttttagttggaggcctcaaagggatgtgaaagataaagtgtgtaattttaggagaacagtaagccacataggcttctgcacttcccaaagtttgcatgtgtcctgggatcagggctaaccatgcaacacatattcaaaactgtcatggtttccaaattataaatattattttatgttcttattatattatataaaagtaagtggtaaacaacatgcctagcatattgcatctttaaacatatgtgctatacatatttaacatatatatatatacatattatatgtatgtatattatgcatatacattatgtacattaaaaatctagggttttcttatttaataaacattagactgttaccttatttctaaaattatccccagatttatcggagattgttaactcycctttattcttttattaaatatattgtgtatatacattacatatctgtaggcatagaaaggtgtatgaaagaatatatacttgtttgytcatggatagttacacccagrgcatgagattgagggtagggtcttgatattactttctgttttattttatacttttgtttgtttgaatgatagtgagcatctattattttttaytcatttgttatgttttcttatttaaaatacaaattaaaatactattactgtaatgtatgcaataagcaattgggcagggtgtagatttctacaatatgagtatttcttgaagtatattttcaaaaatttgtcttagacttggctttggatttctggacctttgtgcctgtactgtgccgaaagactttacaggtatatccggagcaataagccagtcaccatcatttcggtcatragtcatccctcagatgtcatggaaatccgaatggtcaaagaaaattttaaagcaagacctggtcaggtgagtcagtggtcagcaactttttaaatagcctttatccttatgtaatttttggaatttagcaaacatagcatcattgaaatagttgaaattcttaattggtcatttaaaacttatctgtttgttgctttttagtatattactctacattgtcccagtgtatctgcattagaaaatcatccatttaccctcacaatggtaagaaacatatctcttgctttttcacatttgtagggtgctatgcatatttttctttttttgtgtcctgtctcattctaaaaggtattcaaggctatcatagtactcttgatgtttaagtaagctatctttttacaaggaaaatagttatctgctcaagaactgtgtaactacactttattattttttgacaccttgcaattcaggaagtaatgaattaaaacgtattaaagcttgttgattcaaaatataggccaagcacagtgactcaggcctgtaatcccagcacttttggaggtcaaggtaggaagaccacttgagccccggatttcaagatcagcctgagaaacataaggagacactgtttytacagtaaataaaaaaaaaaagccagatgtggtggtacacatctgtagtcccagctactaggaaggctgaggcaggaggattgcttgagccccagtgtttgaagtttcattgagccttgatcccaccactgctctccagcctgagcaagagagtgagaccttgtctcaaaaaacaaatatatatatatatatatatatatatatwtatatatatatttaatttcttgaatatttacttttctccttttatggagtattttaatgtatatggaaatcttatatatgcacaattttctttggagatggaatttaggggaaatacggatactctgggttgaggtggaaacattaaacaaaacaggcagtgtttagaaaaggtaaaatccagtgtaatgggagagagaatggaaataaaattagaaaaatcaaatggagtaaataatggcatgggagggcatctagctaaataatggacaccatcaaatatgattagctagtcagcatatcatttaatattattataattataaaaatagcatgagttcattataaacatttagacaattcacagatataaaataaaatacaaacttaaaaaaatttttccccactttccaatccttttctctactgtttgacatatgtctttccagatattttcccatatgcttctgcatacatgagtttctaacatttatttgctggatcatattgttttgtaactgrctcctttcactcaactacatgtgatggacatctttccatattactgtatgtgcctcattcatgttaatgaccatataatatttcacagtaggaaagtactgtaatttatttaatattctcattgaagttggatatttggactttattcattttctaagaaagataattgagaacagagaccacatgtttaaatgtatacttaagaaagatagcaaaactattttatatatatggtatgtatacatgcagacagatgggaacatgttgtaaagcatgttgtaaaacatgttcccatctgtctgcatctatacatcccatatacatgaaattggtaacatgaaaatagaagggaataattgaaaagggagaaaatacacaagtaagtttgtctttacttaaataacttaagaagttttgcctaatcctgagttcataagaaatttacttcagattgccctggccagaacttccaacactatggtgaataggagcggtgagagagggcatcactgtcttgtgccagttttcaaagggaatgcttcmagtttttgcccattcagtatgatattggctgtgggtttgttataaatagctcttaytattttgagatacgttccatcaatatctagtttattgagaatttttagcatgaagggctgctgaattttgttgaaggccttttctgcatctattgagataatcaagtggtttttgtctttggttctgtttatgtgatggattacatttgttgatttgcatatgttgaaccagccttgcatcccagggattaagccaacttgatctcggtggataagttttttgatgtgctgttggattcggtttgccagtattttattgaggatatttgcatcaatgttcatcagggatattggtctacaattctctttatttgttgtgtctctaccgggctttggtatcaggatggtgctggcctcataaaatgagttagggaggattccctctttttctattgattggaatagtttcagaaggaatggtaccagctcctctttgtacctctggtagaatttggctgtgaatctgtctgatcctagacttttttttggttgggaagctgttaattactgcctcaatttcagagcctgttattggtcttttcagggattcaacttcttcctggtttagtctcgggagggtgtatgtgtcgaggaatttatctatttcttctagattttctagtttatttgtgtagaggtgtttatagcattctttgatggtagtttgtatttctgtgggatcagtggtcatatcccttttattatttttattacatctatttgattcttctctcttttcttcattattcttgctagcagtctatcaattttgttgatcttttcaaaaaaccagcttctgcattcattgattttttgaagtgttttttgtgtctctctctgcttcagttcagctctgatcttagttatttcttgccttctgctagcttttgtattcgtttgctcttgcttctctagttcatttaattgtgatattagggtgccaattttagacctttcctcctttctcttgtgggcatttagtgctataaagttctctctacacactgctttaaatgtgtcccagagattctggtatattgtgtctttgttctcattggtttcaaagaacatctttatttctgccttcatttcattatttacccagtagtcattcaggagcagtttgttcagtttccatgtagttgagcagttttgagtgagtttcttaatcctgagttctaacttgattgcactgtggtctgagagacagtttgttgtgatttctcttcttatacatttcctgaggagtkctttacttccagctatgtggtcaattttggaataagtgtaatgtggtgctgagaagaatgtatatgctgttgaattggggtggagagttctgtagatatctattaggtccgcttggggcagagctgagttcaagtcaaggatatccttgttaaccttctgtctcattgatctgtctaatattgaaagtggggtgttaaagtctcccactattattgagtgggagtctaagtctctttgtaggtttctaaggacttgctttatgaatctgggtgctcctgtattggatgcatgtatatttaggatagttagctcttcttgctgaattgatccctttaccattatgtaatggccttctttgtctcttttgatctttgttggtttaaagtctgttttatcagagactaggattgcaatccctgcttttttttgttttccatttgcttggtagatcttcctccctccctttattttgagcctatgtgcatctctgcacgtgagatgggtttcctgaatacagcacacagataggtcttgactctttatccaatttgccagtctgtgtctcttaattggggcacttaaagggtattcagttaggaaaagaggaagtcaaattttccctgtttgcagataacatgattgtatatttagaaaaccccatcgtctcagcccaaaatctccttaagctgataagcaacttcagcgaagtctcaggatacaaaatcaatgtgcaaaaatcataaacattcctatacaccaataacagacaaacagagagccaaatcatgagtgaactcccattcacaattgcttcaaagagaataaaatacctaggaatccaacttacaagggatctgaaggacctcttcaaggagaactacaaaccactgctcaacaaaataaaagaggacacaaacaaatggaagaacatttcatgctcatggacaggaagaatcaatatcatgaaaatagccacacttcccatggtaatttatagattcaatgccatccccatcaagctacctatgactttcttcacagaattggaaaaaactactttaaagttcctatggaaccataaaagagcctgtattgccaagacaatcctragccaaaagaacaaagctggaggcctcatgctacctgacttcaaactatgctacaaggctacagtaaccaaaacagcatggtactgctaccaaaacagagatatagaccaatggaacagaacagagccctcagaaataacaccgcacatctacaaccatgtgatctttggsaaacttgacaaaaacaagcaatggggaaaggattccctatttaataaatggagctgggaaaattggctagttgtatgtagaaagctgaaactggatcccttccttacaccttatacaaaaattaattcaagatgtattgaagacttaaatgttagacctaaaaccataaaatccctagaagaaaacctaggcaataccattcaggacataggcatgggcaaggacttcatgactaaaacagcaaaagccaaagcaaaaaaagccaaaataggcaaatgggatctaattaaactaaagagcttctgcacagcaaaagaaactaccatcagagtgaacaggcaacctacagaatgggagaaaatttttgcaatctaccaatctggcaaagagctaatatccagaatctacaaagaacttagacacatttacaagaaaaaagcaaacaaccccatcataaagtgggcaaagaatatgaacagacacttctcaaaagaagacatttatgcagccaacagacacatgaaaaaatgctcattattactggccatcacagaaatgcaaatcaaaaccacaatgagataccatctcacaccagttagaatgatgatcattaaaaagtcaggaaacaacagatgctggagaggatgtggagaaataggaatgcttttacagtgctgctggaagtgtaaactagttcaaccattgtgggagacagtgtggcgattcctcagrgatctagaactagaaacaccatttgaccctgtgatcccattactgggtatatacccaaaggattacaaatcatgctactataaagacacatgcacacgtatgtttattgcggcactattcacaatagcaaagacttggaaccaacccaaatgtccatcaatgatagagtggattaagaatatgtggcacatatacaccatggaatgctatgcagccataaaaacagatgagttcatgtcctttgtagggccatggatgaagctggaaaccatcattctgagcaaactatcacaaggacagagaagcaaacaccacatgttctcactcataggtgggaattgaagaatgagaacacttgtacacagggcggggaacatcacaaaccagggcctgtcatggggtggggggctaggggagggatagcgttaggagaaatacctaatgtaaatgacgagtttatgggtgcagcaaaccaacgtggcacatgtatacatatgtaacaaacctgcacgttgtgcacgtgtaccctagaacttaaaatataataataataaaaaaattacttcagaaattaaccttcccttgtgttggcaactttattttgaaaatcatttcttcaccataacattaaataggaaatatggaataagaaaagaaatcagttgctgagtgtcaagtacagagcagcaagagtttttttkttgttgttttttaaactatttttcaacataaacaaaagtagagagaatagtataatgaatccttgtattyataaaaaatatagaggttagtttactttttagtatatactcaatcactgaaaacttttttactttcttaaaacagtgtatcaaagaatttttcacctatgttcacactgaagagaggcttctagatcaatttctttcagcaggcctaggcccttttcacaaggcaaagggaaaacacaaaagaagtagtgtgtagagctggaagggctttaagtaagtcccttctatggcctggcctgcttcttaagatgtgattatggtaacagatgtgatagccctgtggccagcttgaggcaaagatgggaagaaaaggaagaggagagaagtgaatgtaggtacagacagaagaaaargaactggaggtagaagacgrctgagaaaggaaaattgaattatatgtgaaataaaatagtagtaactattcagacaaagggcaaggattttagaactcaattccagatccctcacttgttacttctgtgtctgtgaatgtatctctcaaccttgctaaggctcagtttcatcatctgcaaaacagtgctagtgatacttacctggaagggcatctttgatattgtcaatattagtttataaaataatgtgtataaaacccttggcacatcattagtggtcaatacttggtaatacagatattattattactttcataatcttaaaatacctggttttaacttggattattgctttcatttctgaaattatgctttttttgagaagcmagtacaagacwtgagcatgtggcttttcaacttgaaaatgagaaacgggaatatgaaagtagtctcaggtactgaaaatctgtcgtgtgggtgaaagatttgattttttttttcctttgggatcccaataggcagaaagttttaggaaaatacatttttatttaacataataaagacatttctaacaatgagaccagtctagaaattacaaagagctatctcacagaagtgtttgcaaggattattgcactagatcaggatttttcaatcatggcagtattgacatattggatcagacaattcttcgataggatgtgttgttctgtgtattataggatgttttgcagcatctttagccctgacccactagaagccaatagtatcccccactgtgacttccaaaagtgtctccaaatgtagccagatgccttttgaggggcaaaatcacctacagttgacaaccaccgcattagatcgatagttgtccaacatagcttccagtgctaaaggtcttcagcactttagaggccactgtgagaaaggagaatttaagcacaatagagaatttgagggatgggagtgcttatcttttgttctggggacaccgatcatgtcagtgagaacagctcacttccaaatggtctctgttatgaggattctgctaaagtactcatataaacatcatcatctaaaaacatattttgcttactcaacttgaatcctttttggaattccatgaaaattattttggttaccatgagctcctgaatactttcatgtcatgtagacctttgaaagagaatttgattacttttaaaattcagaattcttttttttcatattcactgtcatcaatgcccaaataacagtttggatatgaatcaaaaggaaaagtgggatagcagtataaaactctaacacgttcatcaataattaaaatgacatgaggatagcctcatgtacttgatatttttgtcatataaatgaaaggtttgttctttccccctgtggaatctcgaagtgtggaaataagaacagtacattgttcttggagaacaaatactggtttagtgaccactttgggaaataatgtgtttgggttggtgaaaaaagacaagagagcttttcctcacctcacggaagctccattagttatatgaggctctggagcctccctatgggttgcctcctacagcaaaggacatctcacccygggccttcactcttgaggtggcccagggagccctcagtatgaaggctctgagtccattgcaggcttgtttcagaagattcaggttcagaagtgcaagagatgaagataaagaggttgggtgtgtacagtctatatccatcatagtttttcttttcttactttttcatttaagaaaaaaaattgtcttatttcttctggttctgtaagaatattttaccaaaatgacagagaggagaaaaaaggataattgtagtaaagcaggttattggagaccacttcttccattcttttaaagaaagattgttctctggaaattatcccaggtcgggagagggggcacaggaggaaggaaggaaggaaagaaggaaggaaggaaggaaggaaggagaaggggaaggggaaggggaaggggaagggaaaaggaaaaaggaaggagagaatgaaataaaatacatttttcaatggcctagtttggaaaatgctgattaatatgtattttaaagtgcatagtgcctactaatgtattaatggttttgaggagttctttaatatataatctcattaattttttttctttctttctttttttttttttttttgagacaaggtctgcctctgtcacccaggctgggcagcagtggtgtgatcatggctcactccaacttggacacctgggyttagcctcctgagtagttgggactacaggcacatggcaccatgcctggctaaactttttaaaaaattgtgtagagatagggcctcgctatgttgcccaggctaatctcaacctcctagcctcaaacaatactcctgcctcagcctcccaaagtgctgggattacaggcatgagccaccccatgccgccaatcccattaaattttgttcactcatttagttaatgctttctcattttcccacttttgggtctcaccctgggaaacaacctcattttcttccatgtattcacaccttaaactccacccattctctttgtctgggaactcttactcatccttcacatctcatcttcatatcacttctgctgaggagccttcactgacccttccctattagattaagtttcctgacctttccttttatgagcatcccatgtacactcttcaacaccagtcattaaattatttgtttaattaatatctgttctcctcatagaccataagctccatgagccctttgaaagatgaattcatagcacagtatgtggtgcataatcaatgcatatctgttgaaagagtaaaaaccacctaatatatagagttcaggacctagcttgagaaatgctttgtagacagagcctccttcccccatctctttatagcacagtcttccttagagggtgcaactacagaaaaggaaatgttggagggataaagaagaaaggagaaatatttatttccaaagtggctstcatttggagtagactgagtcagaatagagtatttaattaaagtctaatatttgagatcatggtgcttatttctctctaacaaaagaggaggggaaaatgtacctatggcaaaggtctttagaaagaaccaccaaagacaaatagacgcaatttgtggattatatctggtctatgatgaagtcatttttcacctcacctcccttattctcagcacaaataataacagaaaattacttgctcctaattctgtgcttatctgacaaatgccgtcaatatttcttggattcatctagcaccttgtaggctgaartagaacttgactctacaaggttaggttttgcattcacattcattcatattttaaacatcagtttctgtatgttttacttatgctttatkaaatctcaattataaatactaactgttttcttaaaaccactctatctcatagatattttaaattgttacmatagttggctttaaataaaattttaaggcaaagaaattatttttatcagaccatctgtttatcatgtaggcttaggaagtggtttatagcttccccagatttggggggttacaagctcgctcatttgtactatcccccaagggagtttttgttttcataagtggaaaataggcaaacttgctgctacctagaaatgaatttgagtagggcaaatatttctaagctaaattttacattatgctattatgctaatttacagtctcttcctgccatttccttctctstccaattacttctatttggcacttagaaatgtaaaatgcatgctttcaaacattttcactgcatagttgtcttaagagttcccttgaagtaaaacaaagcaatttcccatatggtgattcccactaaacagtgagtatcacatctttgtcaaagataatagtacctactaattaagtgcctaagaggttctttcatagcttttgcaaatattatattatttaattcttattatattcctatgagacacgtattgttaactcggtgacacagaaaagaatgtggctcagagagactaaatagcatgcccaaagtcacacatttagttgaggtagaggtgagatacaaacacagacctgtctggctgaaggcatgttattaactgttctgcactgtctctctcctgccacactatccttccatgctgagggctttcatattgctaacactgctcttacttttggacatctrtgttgctggagtcagaaaacaaaaataagtaaaattaccatttcgaactgaggtttattgaaagcacaaatatgtgttttctatagtaatgtgaaagctttcgattgtccatactactamgctcttctaatattgtgaagtggtgaaatttgaataaatccccctgtttttaaaaagtctaatacttattttcatatactgtgccagttagaaacaatcaaatcaataatatatacagctattacaaattcagtagtttgagttttagctcactttttaagatggagattaagcttttcatactgaaagtataacttcaaagtacaaaagacagggcacagaaatactattttggtcaaggtaaagctaagctttaagcacgaatttattaggagggcaaaggttggagttttgattatttaaaatgcttcactatttttcatasatgtcattgacttccctacacaagaaggatatcctgatttgatgggttttccaaggaaattgtgattgtttcttgctgtggtacacctatattttctcatggtaaaatctcacacacatgtttgctgacaagattgatggaaattataggaccttatgtagtatcagatcatggattttggaataccacagcttgggatggagacctgtatgctctacttcctagtattatgactgtggacatgaaaattaacataatcttttgtttacttctttataaaagtgcagttaatgatagcaacttctccatggagttactctgaatattaatccaaaacatataattaagtggtatgtgtggtgcttggaatatagtaaactctccataagtggatttagttatggttgtttcagatagtgactaagggaccaaagacatggattaaattaagattttttgcctcgttcttcagtatgtagtaactgactaagctttggccacagattggtgtagaaacagtcatttgaggggaactgatgacttatttgccttttatggtcttctagccttaaggatgaatgacgttttagrttaggtttccttgaaaacaggctggcaggcatattgcatgcagcagatttgttgggaaggatgcttaggacaacagtcaataacgattgactaaaaaggcaaggcagaacttgaactatgtgatacaggtccatagaggtctcagaagatctgacaggagctctgcagatgaaatgatagcttatagtgtcctgtcttgaagtcagggggccaaatctttgtaacccccaactgaccagtcattggatttgagatacctccatggtgaggcacttagacataggcaaggaagctttgttctgtggattcctggggcaggtctcagtggtgagccctcccaggcaaccttttcagaagctggaagaatggtgaatgagtgtgttgatcctggaagttgggcagaggttgggaagggaaagggtctgagcagtgcagcacagtgtccattaagtagcttttaaaaacatagatcgtttatgagataattctccatttttaaaactagaaattaaatttgaggtacatataaactctagtttatctatactaattgaactttaaaaatctgttgtccaaactacaaatttatttacatttgagaagtctaaagcatagactgttgaagtgaccaaagtaatcaaaataatacaatcaatagctggaacccatttgttgactcttctcctgctttacacctttattgatttaaaacctgtgtagaatgtaacgttttgttcttcaagtatgtaatggatgtctgcaagtattttccagctgtgctctgtgattaccaaatttaagactttctaccaaatcaaatcctttattaaggtgtgctctcacctaatttacctgtataaattagagatgattggaaaaagccctaacgtaagagagcaagaaacctagtgcttcctacaaaatgtagcatcttttcatatttagctgaggtagacattattttcatactaatttcatggattctcaattatggaaataatgcagaatctgccttttaaatagaagtaatgaatcgatgtttacatgaatacctctttattcttctgttattatttttattcaggaacaaactgtcacatgcgtccctgtgaagagaccaccaaacaggctttgtgtgagcaataaagctttttaatcacctgggtacaggcaggctgagtctgaaaagagagtcagtgaagggagacagggrtggggccattttataggatttgtgtaggtaatggaaaattacagtcaaaggtggttgttctctggcgggcagggrtgggggtcacaaggtgctcagtgggggagcttctgagccargagaaggaatttcacaaggtaatatcatcagttaaagcaggaaccggccattttcacttagtctgtgactcttcagttacttcaggccatctggatgtatacatgcagtcttgggctgagaggcctgacattcctgtcttcttatattaataagaaaaataaaacaaaatagtggtaaagtgttggggtggcgaaaatttttgggggtggtatggagagataatcggcgatgtttctcagggctgcttcaagcaggattaggggtggcatgggaatctagagtgggagagattaagctgaaagaagattttgtggtaaggggtgatattgtgggattgttagaagaaacatttgtcgtataaaatgattggtgagggcctggatatggttttgtattaattgagaaactaaacagaagacacaaggtccaaataagagaaggagaaaaacaagtattaaaggactaagaattgggaggacccaggacatccaattagagagtgtccaagggggttcagcataattacttgcttggttggagagtttttggggctctatccttgagtttttttatgttgtcatacagcaggccagattgatttaggtaaaaacaacactcttcatttaaaaatagagtcctctttttttagcagtgagtaagtcgaggcctccacgattttggaggaaagagaaatgcaaagccagcaattgtttaagaaggattagaaatggctaggagagagtgagggagattgatggtgtggtggggatagttggggagaggtagagtgtggcataagaatgggaacaagaataacagtgcgtataaaagtaaagaataggacttcatcagggtgaaagttttggagggtaccctgtcagcaaagatcatctatcctctttaagagagaattaagggtggcrgtttgaggtaaaaccaggagatatcagttatgatggtttgaaggaaaagtgtaaactggcagtgtaaacaagggcaggatatttatgagtagttgagaatgatgaataggagtttgactagacagaagatagtagggatgacaartttttggggtgyggttcaagttgggctggtgtctagaatgagactggggcctaataaaaaggagcatccatacaggagctcaaataggctataccctgtagcatcctgaggacaggccagaattctgagaagggcaagtggtaaaagtattgtccattcctttttaagttggaggctgagcttgatgatttgtgtttttaaaagaccattagtccattttacctttcctgaagattgaggacagtaaggggtatgaaggttccactgaataccaagagcctgagaaactgcttgggtgatttgactaataaaggccggtccattattggactatrtagaggtgggaaggccaaaccaaggaattatgtctgacggaagggaagaaatgaccatggttaccttctcagaccctgtgggaaaggcctctatccatccaatgaaagtgtctacccagaccaagaggtattttagtttcctgactcgggtcatgtgagtaaagtcaatttgccagtcctggtcaggggcaaattctcgagcttgacttgtagggaagggagggggcctgaaaaatccctgaggagtagtggaatagcagatggaacactaagaattgatttccttgaggatagatttccatggtggaaagaaaatgagaggttttaagaggcaggctaccagcttgtaacctacatgaaagacgttatgaaatgacaacagaatagaatgagcctatgaggctggaaggagatccttggtccaagaacaatttgccttgtttgggaagagattgatagttggaagtttcagtgggggagtaggtgggagtgactgatgagaaggagaaaaacttccatgaggaacagaagttggaatgctagctgcttttttagctaccttaacagcataagcattaccctgagggatgggatctgatgccttttgatgacccttgcagtgaatgactccagcttcctttggaagtaaagtggccttgagaagtgtttttattaaagaggcattaatgatggaggaaccttgcatagtgaggaaacttatttctgcccatataacagcatggtggtgcaggatatggaaggcatatttagagtcagtataaatattgatgcatagtcactttgcaagagtgagggctccagttaaggtaatgagtttggcttgctgagaggtagtggaggggacagagcggtagcctcaaggatagatgtggaagatactatagcatagcctgcctttgctaatgagtggcaattaggcctggtggaactgccatcgataaaccaagtgtgatcagcgtgaggaagaggaaagaagaaaatatggggaaatggagtgaatgtcaggtggatcagagagatacagtcatgggggtcaggtgtggtatctgaaataatgcgggggccagcctaaaacagtaaggtcaagttgtttggacagaaaggctacagggtgcggtcccagctcttgtgtaagaattctgactgcacagccctgtactttggctgtgtgtaatgaaaaatggttgggatgagttagggagagctagtgtgggagcagctttagggatgttttttaaggaatggaaaggggagtggagaaaggatttaggatctatggggtcacctagatttgctttggtgagtttatataatggtttagtcaggatggtaaaagtaggtatccaaaggcagaagtagccaaccatgcctaggaaggaaaggagttgttgttttgtagaagtggttggggtttgggagattagccagacatgatcagctgggagagcatgtgtgttttcatgaagaattatgctgagataggtaatggatgaggaagaaatttaggcttgacggaagtaatgggggctgtccgtgaagccttgtggcagtacagcccaggtaatttgctgagcctgatgggtgtcagggtcagtccaagtgaaaacgaagagaggctgggatgaagggtgcaaaggaatagtaaagaaagcatgtttgagatccaaaacagaataatgggttgtagaggggttgtggagggaggtattgcagataggagagtatatgggtttggcaccatggggtggataggcaaaacaatttggttgataacgcacagatcctgaactaacttgtaagasttgtctggtttttggacaggtaaaatggggaattgtaaggagagtttataggctttaaaaggccatgctgtaacaggcgagtgattacaggccttaatccttttaaagcctgctgtgggatgggatattggtgttgagtgggttaaaggtgattaggttttaatgggatggtaaggggtgcatgatcagtccccaaggagggagtagagttatcctatacttgtggattaaggtggagagatacaaggggaggatgtaaaggaggctttgaactggagaaaagggtggcagtgaggtgtggctatagcctaggaatagtcagggaagcagataatttagtaaaaatgtctcatcctaataagggagctgggcaggtggggataacttaaaaggagtgcataaaagaatgttgtccaagttggcatcagagttggggagttttaagaggtttcgaagcctggctgtcaatacccacaacagttatggaggcaagggaaacatgcccttgaaaagaaggtaatgtggagtgggtagcctccgtattgattaagaaggggatggacttactttccactgtaagagttacccaaagtgtctgtgatggtccaggaggcttcagaggcgatcgggcagcattagtcttcagtcactaagccgagaagacctgggaaggagtcagtcagagggccttgggccagagttccaggggctctgggagtagctgctgggcaagttggacagtttgatttccaacggggtcccgcatagatgggacatggcttaggaggaatcctgggctgcaggcattccttggcccagtggccagatttctggcacttgaagcaagatcctgagggaggaggtccttaaggaatsccagaccgctgtggcttaggcgttttgaagttcttgtgtgctgcaaatgtggctggggtttctcttacagcacaggcaagtaattgcaactcctctgttattgaacatcttgaaggcgaggttgattaattcctgttgtggggtttcagggcccgattctaatttttgaagcttttttttaatgttaggagctgactgggtgataaaatgcatattgagaataagatgaccttctggcccctctgggtctagggcggtaaagggtctaagaattgtggccaaatgggccatgaactgggctgggtttttatatttgatgaaaaagagcctaaatgctaactgatttgggagaggttggataaagaaaaaggagcattaaccttgactatgcctttagctccagccacctttttaagaggaaattattgggcaggtgggggagggctagtcacagaacraaactgtaagccagactgggtgtgarcaggggaggtgacagaagaattatagggtgggggagtggagtctgaggaagatttggagcctgattcagcctggcagggagtgacctgaggaggagcagtcttgggaggaggggagaagtcagatgggtcggtagaaaaggaagattgaaaagactcagcaacacttggggttgggactgaggggacaggtgggagggaaggaaggatttgggatgagtcgcattgggaacagagactarggagggaccaatgtgtaaaagaatgcctggatgtcaggcacctcagaccatttgcccattttacgacaaaaattatctagatcttgtacaatggagaaattgagagtgttttctggctatttggaactattgtcgagtttgtattggggtcaagtggcattgcagaagaaaataaggcatttaggttttaggtcaggtgtgagttgaagaggctttaagttcttggaacacaggccaagggagaagaaggaggaatgaagggtggaaggttgcccatagtgaagaaggcaagcccagagaaaagaaagggtagggacacggagagaaggggtggggggtacctgccctcccccctcaggaaagtggtacttgccactaaggtgaaggatcaaggcaggagtccctgcggtgatcagacacctctgaaacgtgggtgaataatcagrcaggtgtccccacagtgattaaacaccaagggaaaactgtcttgccgagtccgtgactggtgccggagttttgggttcacggataaaatgcatctcttctgtctctaccagaaaaggaaaggaacagaaattaagagaagagagagacccaagggtggcaccaagattgaaaggagaaagaggttgaaggatagtgagagaggctggagaagagtaaaaagagcctgcttacccgatttaaaattggtgatgttccttgggctggttggtctgaggaccagaggttgtaggtggatctttctcatggagcaaagagcaggaggacaggggattgatctcccaagggaggtccccccgatccaaatcacagcaccaaatttcactcatgtcagcgtgaaaagaccaccaaacaggctttgcttaagctaagcaataaagctttttaatcacctgggtgcagatgggctgagtctgaaaagagagycaaggtagggagataggtttgggtccattttataggatttgtgtaggtaatggaaaattacagttaaagggggttgttctctggcaggcagggatgggggtcacaaagtgctcagtgggggagcttttgggccaggagaaggaatttcacaaggtaatgtcatcaaaggcaggaaccggccattttctcttcttttgtgactcttcagttacttcaggccatctggatgtatacgtgcaggcttgggctmggaggcctgacacaaacatgctttcctgacatctgtattctaacttgtgtgattcattgtttttaagcttgaataacctgatttcacatatttttccatgagtcagaggcatgtctagctgttagtttgttattgtctgtacttttacatagcatgcctgcactagccatcatttttctactttgtgtttttaatcttttaaccrgtcactttgggaagagtttttccaggaatagtttttcccgttttcaaagaaaaccaggcaagaatggctatggatctcacaaagactggcaacattttgttgctattgtttatttaatttagtgggtttaaatgaaaccaggacatctgcagcagttttgatctctggtcttgctctcaactatttaaatcttaaaaattgttttgctctatgttttyataattttattgcttgtcaaaaatcagctgggatacatgataggttagcatggtgacaatgttatcttaaccatagatgaagcaaagtggtgaaaatttcctgagaagatgattaatgttcatgaaaaattaataggacatctgagtttcttgagatgtaaacatcatctaactgctctagtttggcttttttccaagggaaataaaaatattcccttagtgtctaataagagtctacatgataagtatgaactttagaaggttagtgtatttagggtaaatctattgaatattgagcttaatttattcaatccttatttttgggtgcctgtttttacctaagtaccaaaaggaaatgatcaatgaaagtttctttcctgactcacatcccttctagctactgctccctctctcagcaatccagttcctttcctctcattctcttaaatcaaccatcttttgattgttgatttaagcacactactaaaaatgtccaggttcagcagtgaccatgttattgttcagttctcactcttcaatgggtttgaccaataagcagctcttaatacagctgatcattcactttactgaaacacttttttccacttacctgtttttctccacattttctggctatttttactcagtctatttttgttgttccttatcatccccacaagctctaagtattacaacataccagtgttcatttcttcaacctctctttctctctagctgtacacatttctctggtagtctctctcatcttgttgatacatccatatgcttcatgtcccaagtttatattcctagcccagattttaactctgtaattcaggctcatatatccagaacatttaggcctttggcttttactttgattgataaaggagttgtgggagagtgtgaatggagaaatgacatgatatggcttacttttcaacaggatcactctggctgctgtgttaagagtagatgaggggaagcaagtgcagaaacagggggtccagttaggagctgttgcagtcatctagtcgaagtatgatgatgattttgaccagggtggtgatagtggaaatggtgagaagtggtcatattctgaatatattttaaagttagagttaacaaaatgtattccatggattgtatataatgtgaaaggaagtgaagtcaaggctgaccccagagtttttggtccgagcaactggratttcattaactgagatagggaaggttggggttggagaggaggttctgatggaaatttgtgcaactccacttaggaagtgttattttgagatgacacttagagtgctttcattaaatatttattgagcaaatgactggcatctcagccctgccttccacgaccagttatttctatacatagaggctttgtgtttcacgtctccttgtctttgggtttgtggagtagtagttacatggctggtgatcagagcaaagtgaatctggggataaaattaccccatatacagacacaaacagatttttttttttttaatgatgagccccaactctaacttcctcctattacactgagacctgggtttttccagtgttgtgatcaaaagatgggcttacttctcaaggtaatctctgtttgaaggcaatgagactttggtttcatatgttttgtttagtcagttcctaaatggctacctcatccacttgtcacttttcaaaaatgtgttgacatctctttattattcttatcactccccatgttatttttgccattgtggcatctatttttatatctctaaattgttattttagtattctgtttgcctaagggacctgagataaatgcacacgttcaatccaagttaataaaaattccacttgcatattcttccagaatctttctttttaatattgaatatatttttcattcaaatatacaattaaacacttttttctttcatacaaatgcaaaagcattaaagttttaatttgtcaaaatgtttactgtcatgatgttgcattaattgtgggagattcggtgctccgcgtgatctcctctcagacatttagagcaatcttcacttgtgaaattgcatgagctcctagcataatagtctctggagtattttggacactaaataaatatttcttgagtgaataaataaattctcgaagagctgcccacctttgacgtttttattctcctatatttttataggaggttaattctcccatatttttcttcctatatttttctcctatatttttcttccagtatttactattccattgatattataatatttattcaactgataccttctatgtgtaaggtgctgtggaatatataatactgatttagaaatagttcttgatctcaagacatttacagtttattaatatagaaaaatcatgtaaaaataaagggctagactgtaataaggagcataagagtcgtactaataatttaagggttcaggggagtgagaattttcttggcaagaaaaattaggatatctttatgaaatgatggctttaagataagccttgaacagttactgggattcaacctaagaaatggaaaggaagtcactctaaatgagtaggctagcatgtgtgaagatgaagggaygagaaaatgtattrgttgataagtattcgtttagctcaattagagtaaaaaaaggagaaacatggaatataaagccagaaagaatttgaaacagatgtgcttggccataggcaataggacagaaagaatatgggtgktttttcacagggtgacacaaaaggttaatccataggagattgctgtgatcagacattttctttgggaagcctgttggaaagaaatgaaaggtgattgaatgctggcaagagaaataagtggtatcagagagatttgagtctctgagaaggatgtaggttctatttccagatatatgggaattaggagaagatagttttggaagtattaataggataatagtaatyttagatatagtaaatttagagtgaatttcaggtataaatgtctaacatgcagtagaaaatatgaaactaagaacttgggaagaaagggttaaaataaagacaacaaaaatgattaaagaacatcatattatgtgatcactttctcaggtttaacacatttagtttttgaaaagttgctattttggaatcatttttgatttttattaaaaggcgcttctttacaaacaaaaaatgcagcttgtaattttttatattgaataaattcatatttatttaaaaataatgtgcagttacatcatttttacatttaattcccaaacatatgacaagttacaaatatctttttatattttgtgggactgttataaaattattagtcatttgtgcacattaaaaacccaatgccatattgaagaaataattggaaggtaaaggttatattttctccaggatattaaaatacgtatttctccagatctgttgttacagtcagattgtcactttttatttttcttatccttagacttaggtgaatgtgtattctagaatttatattaaggtcgacatgatccaaactttatgtcaaaggaactagatagattcagcaacattttcatgtttacagttaaattaaaatttcaaaatacytaaaattattatcatagcaaaggcttgtgataaattttaaagcatagatgtgtatgaaatgattgtaagagttcttgttttctctgtcttcaattatacttcccaagttagtattcctaaaatttgattatataaatctcttcaatgagaaaaaaagcacaaatatctgtctttttattttttatgcgtgtatttatttatttattttgagacagaatctcactgtgtcgcccaggctggactgcagtggtgcgatctcagctcactgcaacctctgccgcctgaattcaagtgattctcctgcctcagcttcccaagtagctgggattacaggcacctgccatcatgcccagctaatttttgaattttttatttttattttttgagatggagtctcgctctgtcacccaggctggagtgcagtggcgtgatctcagctcactgcaacctccacctcctgggttcacaccattctcctgcctcagcctcccgagtatctgggaccacaggcacctaccaccaygcctggctaattttttgtatttttagtagagacasggtttcaccatcttggtcaggctggtcttgaactcatgaccttgtgatccacctgccccggcctcccaaagtgctaggattacaggcgtgagccactgcggccagccatgtttttattttaatattaatatgtgcttaactacacatattatactgtaactttttaactgaaaaattgccataagcayatcttttaattcatgttttaggagaacgatagagctgtagatatcaatacttgtattatttcttccctttgagatgttttctaaaacaaaaagacagtgagaaaacaatgaatcaccacaatgtgatctaggcaatattagtgaatctggatattttttatgcaaagatactaaaatgtgattctaagatcttcattcacgttttcaaaccacatatactgaattcattctttatgttattctgtgaagcctccttgcaaatatgaggttacatgcttaaagactgttaaagtctgtcttagtttggagaagtatcagtgacttataaagacttcatttccaagaggttgagagaaacaatattttgttttatccgttcaaaaccagattagcattcgaagatatattgataccttggactggtacttagaagggagaagtttacagtttcctatgagacccagygagatattaaacattgtgtgtaattaccttttacagtatctgctttgaaataattgaatagagatatgaatatttggcaaaatatgtattttattttagaatgcattatgagattaactcaagccacatttgccctcaggcacacaaggacaaacattctttgccttccattctgatatcttcttggctataggtcatcttttcataacctgagatctagttcacagtgaaggacatccagtgacatgtggacaatcggattggtagctcagatctctgttgggtatcttgcgttctgagagctacaacttttattatacagagactctggtcagccttcagtagtatatagttaaatcgtgggtggtttttgcagataatattttatttggagatttactgatgacaaaactgtttgctttcagagttattaaaaatcacagtgtgggctgggtgtggtagctcatgcctgtaatctcagcagtttgggaggttgaggtggatggataatatgaggccaagagtttcagatcagcctgggcaacactgtgaaacccaaactctactaaaaacacaagaaaaatagctgggcatggtggcacatgcctgtaatcccagctgcttgggaagctgaagcaggagaatcgcttgaacctgggaggcagaggttgcattgagccgagatcgtgccactgcactccagcctgggtgacagagtaagactcaactatcaacaacaacaacaacaaaagttacaatgtaaataaaacaattaagtacagaatcacacttataaataaaataattttaataatacaaatatttaaacaatgttatttaaaaatatttcaattttaatattttatactactgttagcagtaaaaatcctataagaaacactgattgtaaagtagtagcttggacattccatggtacattaattccaaaccttggacatagattatgtgctttcagtttgttcataatttattatgaatcaatgacaaatacctacctttatatttagtgttttcactgatttttcaggctaccgttcctttttgcctaatgagttgttaacataagatatggtacttttatcttcatttatttctctccttatagcatccctacaagacctacattaactagtcagcacagtgagctctgaagtcttggacttgctttatgtaacccaatcgctaatcacagggcccttccactgccrttttctttcacctgtgccataacttcagcccttatttccttttaattmatattgtggcataccaattctactaatgatcaacacatgccttttttcctcctatttcrtttgatttcttatgcaactctcacccattttatgtatctttrytttaatagagacagtgacctgcaataattaagaattaagagacctggatccaaattttgtcttgtctttttattgggcaagtcaatattttaagccttaattactcaattttcttatctatraaagacaactctgtaaagttattgtagattttgaaaataaatcacttaacacttcccgtgacacatggtacttgataaaagctgggtagtcgcaggcagatggtcccttacccatagcccttagtttagatgcatttttagaattcagaatttatggactttaaaaggtatgcatatttcatatcgtacttaatatatccaacaggatgttagtcagcatctcaaacaagtggataattctgtaggacaatgcttatgtgtgaatttttacacagaaatattagcctcccattaattaaagtcaggtattgttaccaaatgagttatgaaaaaaccattattcaaattttggaatcgagggtaagtgagtaggaatccagaaaacaagaagaaatttttcatttttcttattgtaaactaaattttgttctttcattttgactacctggatgttttctaggtttcctaaatatgggaccataaagcactttttttacctacacttccacaactcatccctctccccagctaccctcaccactccagatgtcttctgagaattaagggagggaatgaaatagagttatttctgtaggagcataattgttgggcatggaaaattaatgtcacattaagaatttttttctccctggaatttgttagggtaagtatatattatctagggagaaaatgacacaaaaaagcattagtttttgtttcttcctttgtgatttaaaactggcttttcttatatatattttaacttagaagatgttttagcaagatttgtagttaaatgaaatacactagcaattttaacgtgtgtaatttattgttttacataagtatttttgggttttagagaaatgtagattgtcttactgacctgttgacattkatttttttttcttccactaataaggatctgtatagattttagtctgttccttcctgttatctattgatatgggggacttgctatcaggataaaagttgtaattgaattataatttcatattatgtaattattaatcacaattgattctagtatttttttttagtgtccaactgaaaccaaagcaacatttggggttcatcttaaaatagtaggagactggacaggtatgtagaacatacagttttaagatacattctttgaaaatagtggaatgtaataatttgaatgtgttttaatataactaccagcatgtatagagatgtgtatgtgtttcaagctgttytgggkttttttttgttttttttttttttttttttgcttgtacagttttgacatctgtgttttctcttttaagatgcatttttgcaatcagaatacctttgatatcagtaattattaataatatattgttcagtgtgcttgcaaatcataagtttctacctacttgtcaggtgtgctggcaatagtgggaatgctgaaatgtgtttcttagaaaacatgagtcaaaataatcaacacctgatattgagatcacacaaatcttccagttcttgcatgacattttttgtggtgttccagtatatagggcaacttcacagtaactttggaatagatatttttcacagcaggcctgttggtgatactttacttgtcttcagtaaatactttttattacctgagagatgcattgtagtaagagctttgagtaaataaaagaaacattattctctcttatattaatatttccttgacccgccagagtaactgacaagtgagtactcagtaaatgttggcttgttagttggttggttatgttattgttacaggaaagaatgcagatataaacatgaatgcaaaagtaaatttaaatattcttatacttaggtgctaaacgaggagttggtaagtaaaatctgtagggaaccagaaaagtgtagattaaatgtggtctagggctgtaagagaagcttcacagaaaagacagaatttgaactgaagcttaggagtcaggcaaatgaagaaagatgtaggtaatttaagtgaaagtcacagtgttgtcaaaaatcaggaaaggcaatgattaactctctttggaaaggatgaatccaatcagtctttaatcaattaaacaaaagcaaagtcaatcaaacaaaatgaaacaaagacaaagtcaatcaaacaaaagcaaagattttgttctgggtagtagcacagaaaagccatttagggccagcttggtgaagattatgaatgcctcagcaaaatattagagtaaccaagggactttagggaatttttgaagcatttgaagcactatgatgaaaatggtattaattaagttgctagttggacagattaaaatcaagggaagacttgaaggtacttraaggcagaggggaaggaggcagtggaggggtggggatggaaattggaagtaatggatttgtgaatacaagtkaagaaggtagcattagaaggaagaacctaatatctctaaaaaccagggaaggataagatgttggataataagaaagatgtgttttgaaatgaggagaacaatagtttatataaggaggttatttcatagagttaaaaaaaataatattggtatgtataaaatgtaatgtctttagaaagggtagccagcttggaattggagacttaaaaaaaaggaaggaaatctgcaacataggatttaatgggcaaacatctaagtgaattaaaaagatctttgagcagtaataactcattcagagtcatgaaaaaccaggcttacatggataattttcagatggtagcattcaaaagagatcatggtcgtcctctgataggtatacactggtggagtatgaacatatgaataatcacaatatgcccaatataagttgatattatcacagtgttttttttttctactgttttggaaataaaaaataaggaaagttcttttctggtgagaatcccaatatagtaggaattaaattcagtcatgaatggtaaattgatagaattctatatctgaaagaaaacatgcaatgaaaacataatttaattcataagattaagcagaaactcctgatggtttattattagctattgttactgagttttttcacaaagttawtttttattaccagtagctcattaaaataaatgatgtcttactattttaatcatctctattaggawcacttaatagtgttaattttattctccctttttaatgtattatgtcactgagagaaacaagatcattctattcagagttcagttctagtcagatgcttttcaattaatagaccttctttgttgttgacttgaaatatttgttgacttggaaaaaaatataagcagtcatgcagagaacacctaaatagtcatgtcattatctgacactttagttcaaagagatttagctgccttacaacaatgagattacaactattgaaggaaaagtaggagcattaccttcaaaatcaagaatcattggtttttattctaaaagaattgattaaaactcggtattaagagcagtaggtataggaaataccaaagagatacctaagaggttgaatatcaaaggtttatttttttaaaactgacttagagatatttaatatgactttttatttgctgaaatatgttctgcattggcagcatacagggactaaagagcaggtttaaaatagctccagaaatgatctctccaagactaatcaactatacctagctatagagtgctggaggagcaagggaagcagctatgcggcacaagacaaagaagcaccaagtctcatatttgttgtctagattttcattttcaccagacctctaattgcatctcctagatacgtggaagacctgttaaagtttagaagacccttaaaacattttagacatgattcagtgttttttcttgaaatgatgctagtacagtagatggagtggattacccaagtagatttctcttttaattgaatgaataccttattgctcttctagaagcagccattctttccagtttcaaanrtatggtcagagattattgacttgattatcattttaagtgtacaaaaatgttttgttaatttcttcgttacatatgattagtattgattaatgtctgagataatgctatacccttgcttattttggtggtctaaatagccacttattccacaggtgtttgtgttgtgctacaacagaattaaatacataacatccacatgtaattaatgtaaactttctgccattgatcccttcagcagttaatgaattagcaataattgtgagtaaatattcaataaaggacttgtagcatgtatcacatgatgtttctatgaatcttgggtataaattcccmtgttgtctactggaaaagttttctacagtgagaagatatggttatcttttaggattaaaaatgagaagacagggccatatattattgtggatttgcctcagtcacataatatattgacttctcacagtgcaagtaatcttaaatataggtttagttaaggactgggccacaaaagagttgataactctcttatttgtttctatatcactgtaggagccagtcgtgttataggctttattcagatttttcatgaaaagatttaaacagaacatgtgttacgtgtttaaagtattttttttttcatttttggaaactccttgtaagtcagattataaccacactaatttatattaatgttattactttattatgacaacatattttaggccaattacatcaaccacyttgcactagatatcactgtgaatggcttttggttgctgcaagaagccaataaataaataaayaaacaaacaaacaaacaaataaataaataaatcatatttggatatatggartctcacagattttacataattcatattcatacaatgtaaactttaagcttataacaaatattcattatcaactgctatatacccaaaggagtgcctggaagtactctttttgttgttgctgttgccatgactagtgaattacaacgattagtcatttgtggaagataatatttaaactattaactttggctaataatcaaatgtatgttaaacagctmctgtgttccagactgtttattagtcactggagatacagcattgagcaaaagtgacaaagtctccgctcttatagagattgtgttttggtccatggggagtttatcattttttttggagatgttttggtgtgactctatctcctgccacttagccatggtttatagattgtagtagcctcacctataccctatgtcctcccagcccctgtggatggtagtaattttcttccactctttgtattttttcaccatcctcaatttggcttctcacttcttccctcacctgagtcattagttccctctaatgaacttcttccacttaacttatgcagtcatgtttctgcctggatctgcactgttacacaaggttagaaaagctctctgaacagagccctgaataaagaggagaaatatataggggaattgcatttgcagcatacaaggactaaagaacaggtttaaaatagctccataaatgrgttattttaaaaatatatatcttaaaaaagtttaagagataataaaagtaagagagtattttatatctataaaaatatatctttaaaaagtttaagaggcaataaagtaagagaggatgtggagttgttaagtatagaccagtctggcagtatgcttgggttacctcctagggcttgagagaagtgcttctcttcccacctccatagtcagtgaagtcatgtctgatagcttcccatcactcacagtgatagtagttattccacagaaattgaccaacatcattcccatggtgtgaatgtgtcccctgtaattcgtatattgaaatttaatcaccaatatgataatattaagaggtaggacttttaggtgatgattaaatcatgagaataaagccctcatggattagattagtgccttatgaaagggattgagggagttgattgactctcttctgctcttctaccatgtgtgttcctccccctttgctcttttgctcttctgttatgtaaggacacagcagtaaggcaccagcttagaagcggagagcagactttaccaggcatcaaagctgctggtgccttgatcttgtacttcccagcctttagaactgtgataaataaatttctgtggtttataaattaactaatttgtggtattttgttatagcagctctctaacaaagacaaccataaagtaggtcttatgtatttatctatcattagacctggctattaaacatttgccagaataccactggacaaattctaagaagtttgtatgtaaagtgaaataaagaaataagtcagcagctgaaaggaggaaataaggacgaagaagatataagttaaagatatatgattattttataataattataacaatatactaattatgttataatatatttatacacttatttgaatgatgagaatgaagtggagacaggaagttttatattgctggagagatttaggatatagttccaggagcaaatggaagatgtacaagtttctgggaagaaaacttgggaggctttctgggtcaaactgagtgttagagatatatagaacttgcctagagtgggggattattccacggagaaaaaatagcttgaatggctcagaagggtgaactagcttggaatgtcaggaaaatgtcatgctattgggaggcctggctggggtggcatccaaatattaggccaaggaagagcttgtagatcttgctatgaaacttggtcgtttcccaaaagatgctggtgaaatattgaggagttttaaacaggaactgaaatcaaatttgccctttatatgggtcaccctgccaatgttatatcaaatagaaaggaagaagactaggctggaggcaaacacatcacattaaagattttttagtgtcaagcaaatggaagactttatcttttgagttttgagaaaggagtgatctatgattgctgcaaaaagccaataaataaataaataaataagactgagcaatatcactgttagcctcataaaaatcatgtcattaggaagatgcaaaggaaaggtctggcgatggtacatattgctgcgaattactgagggcattggagaccagtaagtggagagagttagtgtacaaaaagaggcacatagcaaatgggcctattgctaaattcttcctgtttctacatttccccagaactatgagaatgattgatttttatactgatctggcttgtgattagcagcagaagatgaatggcaaatacagatgtaactacctgtgtatatatctagatggatctgtgtcaggatgaggattaacctattgtatcttaaagtatatatgctttgtataatgaaacactgyagttctggcctcttgtgagtctatgtggaaatcatttaggataatgatgaaacttaacatggcttatttactatcacaatataataaatcattcaatgaatgtgaactgggcataaattctacagcctcagaaatcaaggaaatttttttatcaggaaaatgagaggcacattatatgtgtactacaatttaagtgcccatccattctcaggaaagaagataaattgtttttcccttggtttctcattttatgaacgttaaatatatgctgtcatgttttttagtaggttacagctcacttaaaatactacaraaatataaaaattgcttagtaaataaagaattcaccagtcattaagttttattcgttccagccatttcacaaacccaaacataggagtaaataccaaatttttgttttctatccaattttcacaatgttcttttttttttttttttcttttcagtttttagagacaggtcttgctgtgtctcccaggctagagtgcagtgatatggtcatggctcactgcagccttgaccttccaggatctatggaaggatctatggatcctcacatgtcagcctcctgagtaactgggaccacaggctcagaccaccatgcctggctaatttttatattttttgtagaggcagggttttgccatgttgctcaggctaatcaaactcctgggctcgagcgatcagcccacctcggcctcccaaagtgctgtgactacaggagtgatctactgtgcctggccaaaatgttactttttagttttgaaaataaacaaatcatacaattactggacctggaagtagagttattgtggtgaagtggtttctttttatggattgttatatttttattagaattgttctgttcctaaaagttgcttagagtctctgttatccagtattttctacttgattttactatgtaacatggaagaaaataagaattatgagggattttcttggtaacataatttattaatcaatgtcaaaaacaccacataatgtactgaatggctaagaaggcatatgtcagtttgccaaatgagcctagcgttaatggactaagtaatttcaaaggaagcaaaaggacaagggttttgtgccattatcattattatcaggaacatttttaagtactcattttcttgatacacttgctaatcattttatgtatttgcttgttgtttttccctgatccatagtcttggtcttcggccaagacatcttctatttaagaacagagaagactcactacatggctgttttctattggctttaaaggcccatatattgcatggcattgattttatttgctcggttctttagatttgaacttcataaaacataaaagaaaatctcctggtttttttttttttttttttttttgtgggggtggtcttggtcttggataaaatggcctgttttttcttgaatacacatctaagatatattcagtttctgcagaagccaggaactgaattagtatggagctgagtcttgatcagtctgaggtgtttcttttgatgaaagccaacattgttaaaaaaaaatgcatttgatgtgacaaatgaaaatataacatttttcttaaaaggtggattgtagaaagcttagtagcmataatgtgtttacccaacaatgtctgttatttgccttcactttctttgaaactgttttttttttcccaccctctttcattttttgttatagtttagcctctgtggcaataaacgccaatttatattttataagaaatccagttctaggcattgattcattgatgtatttaggggccaagaagtctgtctgtagttctttcaaaaactgcttttgatttttttaaaataaagtgttaaacaaataagaagcaaaataatgagtatcacagaaatagacttttatcactctgctmcccctggaaataaaaggatccattaaatattcttcctttgtgtaatactgcattgtctaccttcagaccttacagtatttaaaagtaccagatgttgaggcatgcagatggcatatgaccctgctaagctttctcttatcctgtaatccttaggcaagaagaaagtaaaaggagggaggggagaaaagggagtactgtatattctcgggagagaataaggcagtatgayggcagtggaaagaaccctggactgtgagtgtttttgttttgtttttgtcttttctttaagtatctttgcctctttctagccatgtgaccttgagacaatcagccagctggttggtttttagtttccttgtctacancataccaaattgagggagttgtttcctaatttctcagttcattattgctgtaaagtggtataattattttgaaagaaataaattctaagatacagataattcaattccacataatgtgtgaatgatagtagataaattttggtatagttcagaaaatattacaggaatactatggagaatacatgtcaagtagaggatttttatgttgcttattttgttttcctattagtgttcttattcattcattagctctggttgtacatacatctcatcttctgaaaattacatgtatgggtttagggatttttttccccttatgtaagacagtataaagttctgttttttatattgctttgacatggccttaatatttgcaaaaaagatagttttatataaccagagcatgcgagtgatagggttttttcttctggaattgtaaatcattttattttcttctagaattataaatcattttcatttgaatcctagaatcttatgasacaagatttgtctacatatgtaatatatataggcaaatatatatgtgtgtgtatatatgtatgtgtgtatgtaaacatatatatacacacaaacagagagagagaaagagagagagagacagggtctcactctgtcacctaggctggtgtgcagtagcataatcatagctcactgcagcctcaaaatcctgggcttgagcaatcctcttgtctcagcttcccaagtagtgaggactacaggtgtataccaccacatctggctaattttttaaactttgttgaagagcaagggtcttgctgtgttgcccaggctggtctcaaatccctggcctcaagctttcaaatattgggaatgtagccatgagccaccacacctggcctgcctatatctttaataagttgcaacttgatttcctggtttatgtaaagtagtactaatttgagagcctctcatgtttatctgaaaccaatagtttaaatagcaacattgttactattatattgttactattcagttaccatgtattactatgcattaccatgtattattattgagttaccatggtaataaaggacattcgcttratttaaacaaacttttcagtagggagatgtatgctccatatctttctagttggtatggatatactctaagtttgccctttaattcttctttttagaaggaatttgtttttctaagattaatatgcatacttctaaggaaaataaatascaaattttgacaaaccattaatttctttaaatccctaganataatgtgcttctttccctttttaaataattttgtaattacattctaaattcttttcaagtagctataatggcattgaagttcttttgttgtcctggcattttttgtgtgtgcttaataaacagagctgccttggtgataataatttgttttgttcacagtatgtgacaaatgataggtactcaataaaagtttgttagatgagtgaaaaagtgaataaaacatgctttaactgatgaaattctgattatccaaaatattgattttattttcaattctaaattttctatcattatagattattgatatatatgtaacagagcaaaaatattcaccttatctagtaccacggctcaaaaggacttcctttgttggtttgttttattttttataaaacctctccgcttcttttgctttttgttaccagcatatccaggctaagttgactgttctattccaaactctcagagcatacctttagcacttatttacttgtagcgtttgtatcttttgataaataatttagaatgcaattacaaaattatttaaaaaaggaaagaagcacattatttagacctcttctctgctagacctttagcccatgaagaacctcagttggtgcctgacttacagtgcatgctcagaaatgttactgagaaattacttattttaggtgttcacattttgtgtctacatatttaaatagtaattcctacatgttgtgagaaaactcatttgtaccttctatttcaagcatcatgtgwgtgtgtttgtgtgtattgtgtgtctgcattggtgtggtgttttccttggtaggtggaggaggggataatactccaagatctataatatggggagtatgaatgaatgacaactactcttgaagatatgttcatgtgtggtagtgtgcacatccatgccctacatctactctttaaatatatatctatatatacacacacacacgtatagatagatgattgayagattacttttagataaatactgaaaactaaaattcaaayaaatctaaagattaaaaattcaaacaagatatagataaaataaaaagctattatatatgatcaggagccaacaggcaatacttaactgatagagtcaaggtgggcatgatcaagatactggacagcatggctggaagagtaatcaaaatggattgacagtgaccgcctgcacatgccacagaggtgttatttatgtaacatctggaaggttctggaaaaagagaaatgatttattgctgatctttattctacttaaacacatgcacatgcatcacaccccacagtagcygagaacttggtagaagttctcagtacaaagtggagatctatgaagcacctgtgtttcaggttggattagctagaaggtgtgtgtgtgtgtgtgtgtgtgtgtctgtgtctgtgtgtaatgtaaaatgcttattagggatcaatacccatgacaggaaagagaacaaagagggtttgggggaaggaagaatttgaaacaaggcaggttcaacaaagcccagccaaattggtgggaagaactagagcaaatattgcccatcagagttgcctgtgtagtgctgaaatatccttgccttgttcagtcaatggatgtgagctgctctgtgagaggtatttgctttgcatctgaggccgaccctgatggaagtgacagatggagattgcctgccaactgcgctctccacagctgggcaacaagttcttcactgaagaggcacttgggggatacttctctgtatcaactacatgacccctagcttattttcttattaatatttaattaaaaataaaatctcatgtgaatatgaaatggagcaggatgctaggacagcaggmataaaccagaatagtctcagtcaaacaaagacatgtggccccactccctttcagtgactttaattaagatttcttttcattccttaagcaaatattcttttttgttttgttttgtttcaatagtttttggggtacaggtagattttggttccatgtataaattctttagtggtgatttttgagattttagtgcacccatcacccaagcaatgtacactgtacccaatatgtagttttttatccctcacccgacttctaacattcccgctccagagttcttaaarttcattatatctttcttatgtctttgagtcctcaaaggttagcttagctctcacttataagtgagaacacaggatatttagttttccattcctgagttacttcacttacaataatggcctccagctccatccaagttgctgcaaaagacattattttgttcctttttatggctgagtagtattccatgttgtatgtataccacattttctttatctacttgttagttgatgggtgcttaggttggttccatatctttattgttgtgaattgtgctgctgtaaacatgcatgtgcctgtgtctttttcatgtaatgacttcttttcctttgggtagatacctagtagtgagattgctggactgaatggttgttttactttaagttctttaaggaatctccatgtattgtacatagtcatttgcactaatttacattcccatcagcagtgtaaaagtgttccctttttaccacatccataccaacatctattgtttttagactttttaattgtggccattcttgcagtagtaaggtagcatctcatcgtgattttaatttgcatttccctgatgattagtgatgttggccattttttcatgtttgttagctgttgtatgtcttcttttgagaaatgyctgctcaagtcctttgtccactttttgatgggattatttgtttttttcttgttgatttgttttaattccttgtagattctggaaactagtcctttgtcagatgcaaagtttgagaatataagcaaatattttttaagcaactcaaagttaaaaggtggcttaaagatcactgaactcatctgactcagttgtgagttcagaaaaggaattaagaatagaggcagactaaggtcaagaactcaggctctctgacaaccagttgagtgttgtttcttttattttttctttttccaagagaatttcttttctgctttatttaggtataattgacaagtaaaattatgtattttcagggagtacatatctctggtatacatatgcattgtgaagtgattaccacactcaagctaattaacgtatttatcacctcaaatagttacctttgttgtgtgtggtaagaatacttaagatctacttggcaacggtgtcttttctcttatgacctgttgctgctaaatactgcagactgtatgagtgaagaaagatttgtcctttggtatctcctttctcatgtatactctctgataatatttcctgcattaagaagtaatcctcagcctatattgccaaaacaatgtgaaataatatcgatattatggtgcattcatcttattgaccctttttggggtatgaagtactgtctgattccttgcaatataacttctaatactattaataggttacaatatactaggtgttcttaaaactaaggtaaagactttaatagagtcttaatctttaatgtccyttaaggatttcgttttgatgccatttaaaaaaaattaaaactggcaaattagtataatgtgagcattaacagaaagataaaaaaattaacctattaataaaaatgcaaagaacttctgttcaagtaccktttgtttagggaaatactgtctctcttagaaatattttatatgacttcttttattaccctgaaaaatctaatactcaaaacagttaaaatattcatttttatagaggaggttatagagaggcagttagggaagggggattacctgaaggaaaacaatgatttggaattggcaaaacctgtctgggtctctctagcaaacaataggtctttcttaggttgctgttaaaaaaactaattatgtgacagtgatcacatctctagatgcaaaggatctttaggttatacaagaatagcattaatcattgttacttttgttttttatatatttttttctttcttttttttgtagtggtaagaggttttattttcttctcatcycaggaataggtttgcatactgctaagttgcagtgagctgagatcatgccactgcactccatccagggtgacagagcaagactccatctcaaaaaaaaaaaaaaaaaaatgcctactgctttttattgttatgtaaatccttattgcatttggtatattctgcatattggggtggattagagattggtcattttctgcaaaggagaaaatgaaacatcttggtcacaaaaagatgtagaaaaagtttcaattagaaattgaaagaggattttaattttctcatctttgttttcaaataattaagtatattgtgtcacagttgattaaccagagaatgcaaattaatataattgtgtgcagtatgtcatccaggtctaagggcctcataatctttttgttgattgaatgggagaaagaaagagtggatgaaggtctacaaaagcttgtgttaattaagatatatctcctactggtagaaaatcacgttcagacattatcacatcgttagtcagctcatcacggtatcacttcgcagaaaatcctgtttttttttttccagtggctttaatgaatttcttctaagaagtcctgtgaaaggactgagctgtagtattkggataactgtgccattttcttaagaaacagtttgagcctgctgagaaagtaggtcatctggtttgacattttcctgcaaaagaagtagcattaatatatctttttttttttttacttaacaaataaaacatcaaattattttggccttttcctcataatcaaatagacaacaggatgctaattaaataactgataggcaaaaatctgtgagactaaagaactaaataattataaataatttttccatttacttgaacttttctaaggataattgttatcatttatctatttttataaagaaataaatgaataatcagtatgcctttataagataaaattaattgttcacatttaagaatttattaatataatgataaaaataaaatttttttaaaagacatgcttttaaagttctgtgtttactttctgtttatgtatatatgaaccctttcttttcttttcttttcttttttttttttttttttttgagattaagttatactcttcttgcccaggctggagtgtaatggcatgatctcagctcactgcaacctctgcctcctgggttcaagtgattctcctgcctcagcctcctgagtagctgggattacaggcacccaccactatgcccgactaattttttgtatttttagtagagacagggtttcaccatgttggtcaggctggtctcaaactcctgaactcaggtgatccacatgcctcagcctcccaaagtgctgggattatgggtgtgagccaccatgccctgcctatgaacctttttgacaaccacgatagctattcaagatgtttgcttggtattctttgtatttctgataatctgattaaargatgttccaaatataggaacattagttataggtttccttatagctttataagtgatgtcttttttgctgcttttgctgtatgtgtgtgtgtgtgtatgcacacacacgtgtgcatctgtgtatgtgtttttagtcctgtcaatatgtcatctgcagagattcttttctctggaattattgtcatatgtcctttatggttatgtaaaaagagaaacacttattgctgcgaaaaggatgtattatattatagttgtgtgcattaagaattccgaattttgtttgcttttaacaagtttgggagaaattcactaaactttaatttatactattacctttcaaggaatatcataacacatatagctgtttgatttaacrgttctttacctgatatgtaaagttcttgtttgctgttgggttttggcttgatttttcaagactcattttaggaaaaggctaagtgggaaaaaaattgaaaagatagagcattacacattactcatttaatgagtactgcataaattggcaagtagactgaaaaccaagggttatttatcatcagaaagtttactagtcatttgattgaaagaaatgttaattttgtaaattaaacagagtaatatcagcccaaatatcagccaataatataatatttaaaaatgtgaactaaaagagtataattcgagaaaaacacagagtatttttttggatttctagacttcagagtgtaagcacatctgtgtttggatctcattagttcctcctcatctatgttgtaagaaatgtcagaattttgagagaaaaaaaaacagtagaagccagttatgtatctctgattcagtatgttttaataaatatgaagataaaatatacattctgcttctcaggaagcactggccactttgtgactgccgtattccaaataatttaacatctagttattcataaactaggaaatggcaattgtcatcaagtgtatattttcatcattttgtggaaatgctcaccttcagttagtgaaggatttactgcagctggggagtgttagctttgcatactatctaagcctgactgtgcgaccgtatcaagacaggagtatgggtccacttgctgttcatggttgatatatgaccgtttggtctctgctgggagttattatgattaaccttaacaaacagttttctccagtaaaaatagatgttggaaatatttcttcaacaaatatttatccagcaccttaattatgtatcagataatgttctgtatcttggtggcacaatactcatctactagaagaagaaagagggatagagagataaatacatataacaataaaacatagtgtgataaactctgtgaangtggargcacaagttgtactgggartgtacagtaggtccagcctattccaaattgggcaggaggagagaacaaaaaagtaatggagggatcaaggaagcctttccataggtatgactctagaggtaatgcatacctattcctgaaaatgtgcatactctatgccatgcagatagctatgcaacgtaagtatttccaaggtaacatctaggattttttcctttgtccttctttttttttcccccttcctcttcccctccccctcctattttctctcttttcttcattwtgaattcatatgcactgaagtttactaaatcaattcttagctsatgatatgcagtcattattggtcttttcctggccgtcattcacttatttatttattcatttatgatattacaattaatacatatgaaacaccaacaattacttacatttacccttttgcttctctcctatttcatccccctacctttyctaaaagatagtcattattctgaattgtgcatgtccttcctttttaattggtttgctttatttcatatatatcatacttaaataatacattgcttagttttttaactcaataaaaattatgttctgttacatgcaatctgcggagattttatttcactcaacattatattaatatgattcattaggtttttatttataaataaaatcattcagtttcacttcagttagtacttcattttgtttgcgaataagcacaaatgtccattctctcatgtcaatgagcaactgagctgcttccatttatgttgttctatgagtggtgctactgtgaacatgctcatacttgctgtctaagacacatgtgaaagtttctgcagggtgtgtccctgagaatggaaatattgggccacagactttgcaaaagtaaaacttaaatgataatgccaaattgtcttcaatagctattgtaccaatttggactcccaccagcagtacataagagcttaggttgatcaacatcctctccaacacttggtcttgggagactaatttctgtcaattgaatgctacatgatgtaaatgctagttaatggtgtctggttttgattcacattgcatgggttactaaagagactgtgcatctcttagtatgtttattggtcatgtatattttctctaacctttcaatgataagatttgatcataaagatatatgttaccattaaggaaaaaaaatatatttttatatttatatatgagaaatatctatatgtagaaatgtatatattatgtatatttataggataaatataactatttcaaatattaatccaggcttaattttatatatttaaaatatatatatgaatatatattatttatatatttatacctatttatccttaatggctacatatatatttatgattaaaatattataatccatctatatatatatacacacacacacatacatacactatgtatatattagtaatacataaaatggtgggtaaatttctaataaaggatggatatacagtcaaaatgtctaacaaaataaaccaataggaaatacttccattttgaaattattttcatgacttttatcttttcacagcttgatgtttatttttcttttgacagaacgatttcgagatttactactgcctccatctagtcaagactccgaaattctgcccttcattcaatctagaaattatcccaagtaagcaaaaggagttcactgggttttgatgaggcaatgggcatagtgctgggagagatttgggcaggcaaaaacaaaatgtaatctttcttaagatttctgaaaatcttgaataacttaccctaactaactaagacatcttctgcaatataatgtctcaggctccttgcagctgggtcatagaagaaatacttacttgtaattgcaacccagctttgactgaggagctgccgcacagtgcagacaacatgctgtgtgcatctgtgtctggttctttttgcttgatgtcatatcaacagggacagtattttgtcagtgatgcctcatctggttttctatttactgtcctttaaatgcaaggattcatttatattgtagcaagtcattttcaaaatagccgtgggctagatatgatttttgacaatctctacatattcttatgatttttgacaatctctacatattcttatttatcgtattgaaaacwggggaartgaaatcttctgacgctttgttatgtgaagcagacctttccttctcatagatgccccaagcgtatgtccttgttgaaggaatatgccttcatcttcccgaaggttaaggaaataccacgactcttataacacatctccttccctaaagactgacgcatgctgaatcttgatcattcctgtggcatcttggggcctcctctatgagtgtttaactctctttaattgttagtgtgcaacaggctaaagaataaataaactaatatctaaaatagaaaagaaaggccatcaacttaaaggaatagaatttggtttatacatatttcatctaatcactatgccaaattctttcatcgctttgagagttttttcaagtattcataaactttgctttccggggaaattattttccctctaatacttagctttgataatactcacttaattatgatcacaaaaataaatgcagaatcctaattatactgcttgtgcattgtttcaaattttaatccaggcttaatttttagcaataaacttgcaatcccctgataacacacacaaagacatacatgtgcctatacagccttgaatgcatactttgctctatacgtacatgttgaccaggagcatgaatgtgcctaaaaggattggtgcacgcctatttgtatttttacttacagtggctgttggcagaggctgatgatgcctgcttttctgcctcttaggcttacagtttgcctaatgcctttgcttgaagagggtagtcatagtagtttctcaggtggttatctatttgcagctacaggaatacctcagagatattgtgggtttgattctaggccactgcaataaagtcaatactgcaataaagctgtcacacttttttttaagtttctcactgcatataaaagtaattttaacagtattctgtagtcttttaagtgtgcagtagcctagatatgtctagaaatactatgtacatcccttaattaaaatatactttattgttaaaaatgctaacaatcatctaagccttcagcaagtcataaactttttgctggtagaggatctttcctcgatgttgatggttgctgactgattaggaaggtggttgttaaaggtaggggcacctgcggcaatttcttagcataaaaccatgaagtttgctgcatcagttggctcttccttttacaaaagatttctctgtagcatgtgatgctgtttgatagcattttacccacagcttaacttctctaaaaattgtactcaatcctctcaaaccctgctgttgctttatcaagtaaattgtcatttcagcattttcatagcttctttaccaggagtagattttatctcaaaaaaactactttcttcctgtaatcccagcactttgggaagccgaggcaggtggatcgcctgagggcaggagtttgagaccagcttggccaacatggtgaaacccatctytactaaaaatacaaaaattagccagctgtggtggcacacgcctgtatttccagctacttgggaggctgaggcaggagaattgcttgaaccgaggaggtggaggttgcagtgagctgagattgtgccactgcgctccagcctgggcaacagagtgaaactcgatctccaaaaacaaaacaaaacaaaaaatgacaaacagacaacaaaaccaaaactactttacttgctcatccatagtaagcaacttttcatttattaacattatatcatgagattgcagcagttcaatcatatattcaggctccacttgtaattctagttctctatttatactatgtttgtagttacttcctcctctgaagtcatggacscctgaaagttatccatgagggctcaaatcacttcttccaaactcctattaatgttgatattatgacttcctcccatgaatcatgaatgttcttaatagcatctagaaggtgaataattttcaggatgtttttaaatttacattgcccagatctaccagaagcatcactgtctatggtagctatagccttatgaaaagtatttcttaaataataacaattgaaagtcagaatttctctttgatccatggattgcaaaatggatgtaatgttagcaggcctgcaaacaacattcatctccttgtacatctacatcatagctgttggttgactaggtgcattgtcaatgagcagtaattttaaaaatttatttgtataaatttttgtggtacgtatgtaattttgatacatggatagattgtgtagtagccaagtcagggcttttagggtatccatcaccagaataacatacattgtatgcaataagtaatttctcattattcacccacttcctagcccccctgcaacctttcaagtctccactgtctatcattccatactctacatccatgtgtacacatcatctagctcccacttttaagtgagaacatgaagtatttaactttctgtgtctgagttatttcattcagggtaatggtctccagttttatccatattgctgcaaaagtcattattttgttcttttttgttcctgaacagtatttgattatgtgtatatgcagtattttctttatccagtcatccattgatggacacttaggttgaatccatttcattgttattgttctggtgtgagctttgcttactgcctatgtgagtagtaacactttggatagaatcttctttttttttctctggtgggcttaaaatattcagtaaaccatgctatctataaacagatgtgttttcgtctggactttgttcttttatttatagagtgaaaacagagtagatttagcataattcttacgggccttaagtttttcagaatggtaaatgagcattggcttcaacttaaagtgaccagctacattagtccatagacaagagttagtctatcctttgaagctttgaagacaggcattgactgctcttttccagctgtgaataccgtagatggcgtctaccacttgatggctgtcttgtctacattgaaaatctgttgtttagtgtagtcaccttcatctattatgtcagctagatcttctggataatatactgcagcttctccatcagcacttgctgctttgctttgaacttttatattatagagatggcttcttttcttaaacctcatgaaccacttcttctagcttcagacttttcttctgcagcttccacatctctgtcagccttcatggaatagaagagagttaaggccttgttctggattagtctttggctgaagagaatgttgtgttgtggctggtttaatcatccagaccactaaaactttctccatatcagcaataaggctgttttgctttcttattattcatatgttcactgaagtagcactttaaattttcttcagaaactttttcccttgcattagcaatttggctcactgtttggcgcaagaagcctaactttatgcctatctcagctttcaacatgccttcctcactaagtttaatcgtgtccaatttttgattgaagtaagagacatgcaactctcctttcacttgaaacttagaggccattttagagttgttaattggcctaaattcaatattgttttgtctcagggaagaggatggtcccaggtaagggaataagaaggagaaatrgttggtagttgcagtcagaacacacacatttattcatcattgcagataactgaaagtcaaagaatttgtagctttgtaacataaaaaaaattctgtaaagttgaaaggtgagtcaaacaattagaatgtatttcattcacaaccactgytgtatgtatctacattgakattttttcctcatttttctgattgaaatatgttttaagacctaaaatatgggttacaaagcaacttccttgccctataaagttataccatatcacagagtatttacagatcattgcataaccaacatagatcataacatcactaacatggactcattgtgcactggttagtgtgagctgtggtagtttggatttggacttgggtttctatttagtcaacatagtgtccctataatctttaacttcctgttaccaagagacatctaacaaataatgaaatatggaaatgtatgtcctttatataggtgaaaaatattcatgaagagaactgactagttctgaaatgtatatgtgtatgtatgtatatgtttaaaggaaaggcatttaaaaaataactcctgcaatggtgcttgggaacactcttctaaaatacaagaatgttcattaatcaatttttacatttgtgagctcttatttgacccactgccaaagccagggcatccattctcatcaggatgtaattgtagacattgctccatgaaaattctcagaacatgaataggtgtgacagttgtcagaaagagacagatgagtggaaaggaataaaaaaagaatgtgcatctaatacaaaatgcatattgttgatttataggttggaggaaacaaatggagataaaaaacaagttttattgctaataaactctgaaggatttaggttcataacatgtagactagagagtagttataatatatttttatccttgtaaatacagcttggacatgtaaaatggttaagtacatctggtataattttatccacaaattacttgcaaccattttggcaattaaaccagcaaaacatgacccattggctctggaagttttaaccacaatgtaggtaaaaatattgtgaaaatacaagaataaactgtttctacttggttctcataaagatcaagttctctgagcttcctaatatcggaactgtttagagagaggaatatcatttatgacaaattttagagctgttcttttttgacttggtttgctgccaaagaacaaccttgattgtttggacaataaaagcaatgtcctacctcaatctcatttctaatgggctacgtaaaaatgacttcaaatggtgattttgggtaatacccttaaactgcaaagcctcagatgacctttccatagtctgttctccagcttatcctcctttctctttcctagccaagttttgagttcttcttcaagatatcatctatctttaataatttctgttcaatctgcatgtctgtaatgtacttgtcatctgatcctgagccaagttattttattttattttattttattttattttattttattttttagacagagtctcgctctgttgcctaggctggcgtgcagtggtgcaatttcggctcactgcaagctctgcctccygggttcaagcaattcttctgcctcagcctcctgagtagaagggtttacaggtgctcgccaccatgccgggctaatttttgtattttyaatagagacaaagtttcaccatagtgaccaggctggtctcaaactcctgacctggtgatctacccgtcttggtctcccaaaatgctgggattacaggtgtgagccactgtacctggcccaagttatttttgtttataatagtaacacataatgagcactacacatccaggaattgtgctttatatgcattattaatttaattcttactattcctctataagttaggtagtrctgtttccctaattttacagataagaggactgagattcaaagaggtaaatgccctacccaaagtcacatggcagagctgggtctccaatccagatttgtttggcccctcaaattatacttaacttagaagtggtgggtcattgagggattactcccaggtggctgaaaactgtgtatgtgtggagcacgtgtgtgcatgcatgtgcaagcacacatacacttggagtcgaggtataaggagaaatgtggacagggcctagaataccctttgtcttctgaggcaaggtctcactctgtcacccacgctgtagtgcagtggtgccagcacagcccactgcagcctcaacatcttgggcttaagtgaacctcctgccttggcctccagtgtagctgggaccacaggtgtgtgccaccaggcctggcatatatatatatatatagttttttttttagagacataggtttttttttgtttttttgagatggagtcttactctgttacccaggttggagtgcaatggtacaatctctgctcactgcagcttctgcctcccagattcaagaagttttcgtgcctcagcctcccaagtagctgggcttacaggcatgtgctaccatgcccagctaatttttgcgtttttagtagagacaaggtttcaccatattggccaggctagtcttgaactcctgattctggtgatccgcctgccttgacctcccaaagtggggattacaggcatgagccaccacacctgaccagagacataggtcttatcactttgttatcacaggcctggtctttgttgcacaggctgctcttgaactcctagcctcgagcaatcatcccacctcagcctcccaaaatattgggattacagatatgagccactgcatctggcctggactgccacttaaatgaccttggactttgttgtaaagacaatgaagacccatgaaaggattttaagccaaggagaaagataattagacttacatttttatagatttctcatgaaactagagaggtacatgagctaccgcatggggccagcacactagctacttggcaatttcatattcaggcaagaaatgataatggtttgtactgtggtaatagtaatatggaagatcagatagatgtctaagggtgttcggaggcataattaacagaatgtgatgactattatgcaagaaggagaggaggagagagagggagaaggaaagagctttgggtggcttcaagctttttcccttgagtcacattctggtttaagtcctcatgattgagggagagtggcaatctgagcatctttatgttgactttttgttctgtattacaaatgatgataatggagataccttccttctaatgttgctttgaggaatgcccaatgcatgacacaattctttcttgtaagtctttgtgatatttaaataaaattataaaaagcacctggcctcttgcaaaagtgaattctcatcaccattctcgttgtcagctctgttctgccatttctcaaagcaattgcttgcctcagggcagggggaaaggctctgccatgtgggctgcttttatatcttcaatccattctaaatcctgtcagaagagatacattgtcctgtctggtagaggtggctctgggtgatatgctctgcttagattagtcaggaaggagccctttcccttgtgtgtctgcatatttgtggtagtggttattccggtacagtttctacaagcacagtaattcataagattttccacagtatacataatgtctttcattaaagaattactgtctttcatcttctaatccttaaatttaggctttcttttatatagtatgtgaaattcgaatacctggatggcaagagatctaaaaggtagtattctgactagagtgtggaatgtagttrtaagaatgcctaatgctactgatgtttgcaaaactacgcaagtaggatgtctgaaggacgctggtctatcagcaggtagtggatcccaacccctgggctgggattcacaaggctaaaccctgtcatcaggactgtaaaactgaggcactgcttaaattgtaaagattttggytcagagatctaagtcaagaagctgtgttagcgcaagactaatgagcaagcaataaacaagccttagtgctgactgagagcacaactcattcccgactcagataagaattggttgaaggatagggccaagccgagtctatagctggaggttaggtggctaaaatttcagaacaagttggggatgtagccactttctggagatagattaagcacaggtaattctccatctttctttctttgttaccccatcctgcattcagctgccatacatcttttcagactctttagtttttatgtttgagggatttttgttgtttatttgggktttttttttttatttttaggcagaaattgtcagtcgacaaagtagcctaaagtccttcctttcttaaaaatcttatattaaatgtatccattcataatggttaytggagcataattttgttagcatgattattttatggggactccttgccaaagaacttttatccttacagactttaaattaattaatttgtaaggccttgactgaatcattcagaattccaagagataaacatcaaattggttttttttcaaaccatgttccttttaacatgagattgcattagataataattacaaattattgtaagtgggcttgagttcttgatttsgctctcagcttgaacattactggtacatggaaatgctgctgatttttgtgcattgactttgtatactgaaactactgaagtcatttatcagttctcttggcagagtgggtttttctaggtatagaagcaaatcatcagcaaagagagatagtatgactttgtttcttatttggatgcctttcctttctttctcctacttgattgctctggctaggacttccagtgctatgttgaataagagtggtgagagtgggcatccttgtcttgttctggttctcaaaggaaacacatccaccttttgccaattcaggatcatgttggttgtgggtttgtcatagatggctcttattattttgaggtatgttccttatatgtgtagtttattgagggtttttaccataaagggatgttggattttatcaaaaactttttctgcatctattgagatgaaaataggttatttgtttttatttatgtttacatgcaaaaacagaaaactaaacattgggtacacgtagacatgaagatggaaacaatagacactggggaatacaagatgtgggagggaaaggtgcagggattgaaaaaattacctacctgtattgaatgctgctgtacactgtagagtacagtattggttgtttaagctcatggtcatgtgtctggctggaagctgtggcagctgcccagcatcatgagagaatattgtaccaaatactactggtacaggaaaaggtcaaaaatcaaaattttaagtacagtctctattgaatacatattgctttcactccatcataaagtcaaaaacatttaaattgaaccatcctaagttggggaccctctgtaaaatcaccacctgtaccagctcactcctgatcctccttacctgctctatcagcaacatcagtagctcctgggggaatggtgaaaactacaaatgctcagacttctgagtcagcaagtcttggggtagggcctagcattctgtgttttaagaagccctacaggaaattctgatacacagtaaaatttgaaagctatcaagggagaaccatcatgggctttttaaactcattccttttgtttattgtttctattgatatgattatctcctgagactagaatggtctaaaactgccataccatcctctcctgaggaatagtttatcacactcacttttttcctacatgaagagagaattgttagatgataattgtcctggaagctttttttgtttttacctttatataatacccctcaccaaaataactggtaattgtaaagattattatctgattattaacaaactaagctttggagttagactcagaatgaatttagtaaaagtcatccccccttaatataagtgtgaccttaagaaaattatttaacctttctgagttttagttcccaatgcaacaaaatgggcattatactttcctatgaaagttgttgtgtggattaacagtgaaggtatacatagaacattcagtaccaaccttggattaaatgttcggtgaagagtatccattgttaatatagcttattttaggtttctgaggtaagagtctcaggcatgtcttgaaaaagaaaaaatttttggacactgagttttactctgtcacccaggcaggagtgcagtggtgtgatcatagctcactgcagtctcaacctcctggactcaagccatcctcctgcctcagcctccctagtacctgggattacaagcatgtgccaccgtgcccagctaatacttaagacaagggtctcattttgttgctcaggctgggcccaaaattctggccctaagccatcctcctgcctcagcctccctaagtgctgggattacaggtgtgagccactgcaccagacccttgaaattttttattaattaaaagaactgtttaaagtgacagatgatcagagaagattttaaaaggcaaatatttttcaaaaatttacacttatatgaacattaaatgttgtaaattacaaacctttacttttaataataatataatatttattatattattcttaaatatctaatatttatcaggttcttactatgttcaggcaccatgttaaaagctttaacaagtatattcacattcagccacataaaacagaaatgtagcttgaaactcattaaccttaataaaagatttaaatcagtttttttaaatgtaaataaattctactttcaaaggaaaaacttaaatgtcaaaaaatgtttatatacttttgagtgggtcagggaggaagatatctcttattcttagaattatcttagatacacaatccttcataaaggatcttttcattagttatcaacagaaatttaaaaatatatgaagttgatttcatctctactatgttatagcaagactttaaagagttgcctttaatttctacaatctggttacatatattatgataatagcaacataacattcttttaaagaacatgtactatgatagggagaaagtcactgctcataagtgaaacgcagtgtatttcacacatattaatcagattaaatatgtaaaaaaagtggtttaagtagtttccgtttccatctccctcaaaaaagtagatgtcatgaagtaatcaaatactagtaattttatcttcttattttttccaagaaaagcaaaattttctctctcctggtacaaaaaaaaaaaaatcaaatgaaaaacaactgattctctaagggccttgaaatcaaattcccacctacatttcccagctcatactggacttagcccatttcttgcatcaatactgggcctcccagaaggcctgtcagtatactgtaggcactcatkgataccgttaataaaatgtatttctgatatttgtgtggccctctacaattcttagcacactttttttctgtagcatcccaacttattgacccttttatagatgaaagaaatccagtttagaraggaaaagttatttgtctggaatcccagccttagtaaatgactagaacgctgagttctagtcgtcctgtccaaagttatttcaaaacaccaaagagtagctttgtggggagtggggagggtgtgtgtgtgggtgtgtagctcagaaagcagacaagtaggaaggagggggcagtggccaaaatatagtcacacagccaaaacagatgcagggagtctgagaaatgtagtattttggctggactttttgcttccctgaataaaattaattgtctgttactaagaaagaatgggaggatgaatattatatgaacaattagcatttctaytgcagttaagaaggatttctctatgctctctctctctctctgtctcacacacacacacttgaatatataaacatgagcagagtaattagagctgcagagcttcctttgtgattgtcctttacagctaaagaactatcagtttgtaagtaaagttttatacttatgaacaaccagggcaagaggagggacagtgttagattmttttccttactcctgctatttttctgttcacatagtaaatgtttaaataagtatttccagtactgatctagccattgaaaaaatgtttattgaatttagacacagtaaagcaattgttactttaatttagtcatatatagtctaatatatgactatattagacatatagtctaatatgatcagagctttaacttgtccttagctacctggcatgatcatatttacattaccctatacttttaattaatggtttcctcaaaaaagacacacttagaaacagacgtatttattttaatcttgacacttcataagcaacatttgctactcctttaggctaatcactatgagaaaccatgaaataaggcctgacccatcacaaaatctagagattgcattcagcatgtttgctatatggtacagaaaattaatttcacttattttcatttttttcccacctttttmtgactgctctacaggctgtatattgatggtccttttggaagtccatttgaggaatcactgaactatgaggtcagcctctgcgtggctggaggcattggagtaactccatttgcatcaatactcaacaccctgttgtatgtcattttgatctattttgttaatccaartagagaactgccaatatttctgatatctctctttttagtataaaataattccttattgaattattctacttgttgatcaaggacctccatttcctgattggtgaggggaataattcagtgattctcaacatgtggtctgtggctgctagcatattctcttgtagaaagatgtcatatcacagttatgcactcctctgtccttttcctctgttaaaagtcattcgcctccatccttcattttctatgtcctcatcagcggtaagtggttctactcattcattcagtcaacaaatatttttgaacacccatgtgccaataggtcttacaggtattgggaagacagcaatgaatgaaaacagagtccctgcccttaaaaaacttacattcaaatggggcaagtaaaaaagaaagcaatgagaaatgtaaataaaattatttcagaaaatattagaattatgacaaaaggtagacattaatggatatggaaataaagggctgggtttattgttgaagtatggtcaggcttttctgagatgacaactgaacacatcattccttcatttattacttagcaaatttacaacagactaaagaaagtaacttcaaaggtgaaattgtggccgggcacattggctcacacctgtaatcccagcactgtgggaggccgaggtgggtggatcgcttgaggccaggagttcaagaccagcctggccaacatggtgaaaccctgtctctactaacaatataaaaatcaaccaggcgtggttttgcatgcctgtaatcccagctactccagaggctgaggcatgagaatctcttgaacctgggaggtgggggttgcagtgaggggagatggcgccactgcactccagtctcggtgacagagcgagactctgccaaaaaaaaaaaaaaaaaaggtgaaattgtctgaccaggaaatactaaactaaaacttattttagtttcaggattataagcaaaagttaattgattgatattcttatgaaaacacaaagcaaaatgaaagtagaaagttattctcaaatctattccatttactattttttttgcagaaccaaaaaagcaataataaatttaagtgatgtgkttgaatgatattttatttcagttttaaatactagatgtaaatttggtactttctggcggttcttacaaaaatgatcatgctctaagccagaaatagtttgtttctgacaacacattacaagttatttggacacctaatgttatgaaaaaggaagaaaattttcttaacctcaagcctactttataaatggggatccagacttggaattatgagttgctggaatgcattacatcatacatgattgtgaaatctctttctttaatgatttttaagaggggataaacaaccaagtttctggaatggttttggctcattttgccaaaaagccagggcaagactgaatgacctttggagccctactcagtctgtgatagaattcactgaaagttgaaaacttgttttttttctgagatgcagagcccaatattattctggtccagttcagttatggccttcaactggaaatggatgatatgcatacttgtgaatattattcacacttaaattcatttaacayttaaacacctaaattcatgaagtatgtcgtatccttgagtcagtatattgcatattaaattcatttaggtctcgtgctatcagacgctagaatgtaaatgactgatttttctgttggtttctattggatatttctattggttgcttactaatgaaaaggaaactttaaaaaatatacgaattctttaatatttgtgtttgccatcctaatcactatcatgttattttcattttaaagggatgactggaaaccatacaagcttagaagactatactttatttgggtatgcagagatatccagtccttccgttggtttgcagatttactctgtatgttgcataacaaggtaacattagggttggttctagttttgcaatttttcaaattaaaaatgttatagcttttatattacaaaagcaataaatgcttgccatagaataaaccatagaaattatgcagataagtagcaaggaaagaaataagtctcttaaacataaaaaatcagagataatatctgttagcaattagacacacatcttttcagatatggatatttgtgagtatgcatatatatctaatatattttaacatggaaacattcatttctatgttttaacatagggtgtttcacatagaaatgtatgcatatggctaaaggtgatgagggaagacaatggagggaaataccagaaggctcctgctgtaacaccttccatcctctgttctgatagcacttacccttgattgccatctttaatactgcaaatcaccagactttttggtatactatacaaatctcaacaatcccaaattttgtgttttattttttgcagagataaagcaggaatcttttcctatcctacgtgtaacatttgacctatttatctttattcacactatacaagtgatacacatatgtatccttgctacaaatatttcaaacaattctgataaagtaaaatcctctcttactaccttccctacctaatctatgtaaacagaggtaactcttaagtgttctataaattatatcatactatttatattgtttatgcaaattcctttattaattgattactgtgtcttgactattttttggtattagtgcatctagaactacttcactgtttttccctgtgccaacagttagagatgatagacccaccwgattcttttagagtatttcattgtatagatttatctagtttactgaacaattctctaatgttagatacttttttattacaaagaatgctgaaatggatatcattatatatacctctttgtgcatgcattcactcattcagtcagtcattctatcattcagtgtatatttattaactgcttactatcaatctgaaactattctaggatctgaaaactcatcaggtggcaaaataaaaccaagtttctgatctcatgtggtttacattctaagggggcaagatagacaacaaccaataaatacatccagcatcaggttctgagattcaggttaggacaaagaaggaagggaaagtaggagtaaagcagcgtaaacagtagagagtgtgttaatttatattgcatgttcaagaacaaccatcaaacaaaatgctataatgccatttgagcagacttgactgaagtgaatgagcagactagacacatattttggagaaaaaaaatcaaggtagagaaacctaacttcataggcaagggctctgaggcagcagtatgcttggtgtcctgaaagaagagaaaggagatctgtgtggatgaagcagagtaagcaagagaaagaatagtaggacaggcaattagagaggtagtgtctgtgcttttctgggaagaggtggattacgtaagtcctccagactttatgcaaaataagtaaataaaaataaatgaaaacattggttctaggtatgtacctagaagaattaaaagcaggcaattggacagatatttgtatgccaatgcccatagaagcattattcacaatagccaaaggatggaaacaacccaaatattcatcaatagttgaatgaacaaattatgatatacacatacaatgcataactattcagccttaaaaaggaaggaaattatgacacatagtacatggatgaactttgaagatataatgctaaataaatatgccagacacgaaagcaaaaatatattatgctgtcacttataggaggtccctagagtagtttcatttgcagaggcaggaagtagaatagtctctacatatgcatccttgctaaaaatatttcaaacaattcagatacagtaaaatcctctcaggttgccaaagccttcggggagggggaagtgaggggttgttgttccatatttttttctagactatttatttttgcaggtatatttttgcctcgtgcatttttgtacaagagaaaccagagcccattattgaataagcggaaggaaggaacaggaaaaagtgtctatttgttttgttttatatttgctagcatgcataaattaaatcactattgtctttttttctcaagaaaatcatgttcttgatgagtaaactggtacaattttgagactcttaaggaataaaataaggagtatttcagaaggactaatatttgtacagcattcagcatgctaaattttgtatctataaagataacagaaaattattccctaccactaccaccatcagaactaattaataccaagaggccagattattaacgttagaatctgttatatatatttctgtgtatgtatgtgtgtgtgtattcattttcttatagatattgactatgataagctaggttgtgttaaattctagaatcaagtatgttagaataggagaaaatctgagtatacccacagaattgtaataagtctrttcctttttctgtcctctcagttttggcaagagaacagacctgactatgtcaacatccagctgtacctcagtcaaacagatgggatacaggtatgtggttgatgttatcgtaaattaaacaagcctsttgataatagatttactgtaggagctgtggtggaagaaaattcctkcaggtggttcgaacagaagtttcctagaggaaagyctcctttggaatatgtccagraaagtcatagcttgtccttgaagtcaaccayattatgccttccatttgtccttctcacagggagcttttgagtctgcccctcccctcttcactatcgcctcaagttcttctaaaattcagactacacatgaacagccttatgatttctttttattgagggaatgttttatgtggagagagaagatgagttcgtatacagttaagcttatttctagacaaagaaaactaaaaaataatgatagccatcatgcattatttatttactgttctaggaactatgctaataatttcacatatattagtttatgtaattaaaacagagtcaagcagtaaatgttattcccattttgcaagtgatgaaactaatatttgaagacaacattgaagagctggactggtgtataaatctaggcatgaatgcattcacaaattttattttagtactttttgtcatacattttcacaatacttggaatacaacatttgaatgttttcagttacctcaaaactaatctaactctaagttttccagtcgtatttctaccctacttggtatgtaaatagtatttcattttaccagtctcacgaagtaagtcaatatcacttttcctcctggtattgcgataattaaggtatgaagcataatttgcatctggttctcagtttgcctgcctgggactcagatacttcctcctttctccgcagttcactctgactcttcacattgatttagatctaatgctctgttaattgcaaacaggagcctgttcacagccatttgttgatagacccaattttggagttttgctgtcttgagctgtcttgtctaggattatttccccaaatttacgatgacaatttgtagtattttacttatataatgagccaaatatgacaactgtatttgtggtgccaaaatacttcaatgttgaagtctatgtgctgagcctttttgagattgaccaattagaattcattctttgtcttacactgcagttctttaaagatgaaacaactaactgaagtctaagaaaattagccakttgtcagaatggcattcaaggagattagttctaacaattgattcatttaaaaatcaaatttttctacctttttaccagaatagattttgtttgtttgtttaaaaacaaacaaatggaattcaaggarataatgaattttaaaagaaagaagaaaggaaatgatattttgaaataattgtacgtgataggttgccatttgatacttacattctttatatcacagcaatttggtgggaagccgcagcaccagcagaaatgatgttagagaactggtttacttaactaaatatcgaataatgtagtgctttctttttggcagaagataattggagaaaaatatcatgcactgaattcaagactgtttataggacgtcctcggtggaaacttttgtttgatgaaatagcaaaatataacagagggtaagtactatacctcaaaaatttgatatgtggctaataaaataattaaaatattttcaaataattacatgaagtttgaaaatgaattggcaatgagtttaccaatgacaaattcactgaaacactctttcactatcaaaggaagaagtaaggcaggtatcgtcctacatttttgtaattccaaataattaaagtttggcttagaaatagtctacagtgtatttatgagctaaactctcctatctgattataaatttgtataggcctatattaaaaatgggtattcgctcccacagcatatatcaggtgatcctaggaaaagttttcaaaatcatgtttccaaacaaagaattttacaattagttctaacaatgaattcatttaaaaatcacattttttgtacctttttttaccagaatgaatgttttttgtttgtttttcaaaaaactctctgcattgtaatatgcagtctttaaacctagaatatttccaaaaatattatttagaaactataattttataaagaatcttgttcttatggactacgtgtctatgatctgaagaaattactaagaaggaaagcttccatttcagggcacagaccagccagcccatttgtcttttgtaaatttatcatagtgcagagcactgatctataagaattctaagaagattttgaaaactatataaccactcacgtatttttaggtttacatctaaatagtttcatcataagtttacacagttgtaaaagatgtgatttctaacatattgcagatattgacattttgtaattaacataatttctttaaacatatccactggaatataaatacagctagatgatactgtcatttattacaaaaatacataaactcttcttttagcagttggatgttttacatcattctttttctttcatttaagttgtatttctgtcccattaacccatataattttattaaaattcaatttatttttacatttgaactaatcatatttttattgctaacctaatcctaatcatacttctgcaaaaagaatgaacataaattaaatatttcattttaaaattgcctgtaatcataagactctagtgttaatttttacttctggcttgagttatcatttcaattactttatatagttgaacacttcataatttttaaaatatatttttataaacatcaaaaggatatttgattataaatgtacaggccagcttattaaatggatatttttwaaaaaatccaatttaggaaatcatggatgaatattatttattgaagaaatcactgattcaagatgatccctatctctaccttcaaagattttgttttagaagttacagaatggaggctgggaagcaaaatttatgaaggaataacgttacccatgtgattcagattacagtcatgtttaaaacacttttgtagtattacccttcccttgatgaagtagttttgggatgaagatgtaagcatgatttacaaagcagaacttttttgtaatattcagagttgaaatttagaaaaaaatgatttcaacccacttttggctatcttcctttcccatctttctccagtatcacccatcttagatgtgataatcttgtcatactcatctgtctcttgctatgcattgcagacatgttcctctttagtgccatttactgacttctgacaagaatttttttgttgattttcactgtatattgctgaaaactgatagttctttggctgaattcagaaaccaaatccctaaagagcagattatttacagggaaatagattgaggctgttggttcctacagttagttctcaagaagtctcatttgttaggctgtttgtgttttagagcgatttgtgtgtgtgtgtatatatttggtagtttgttctttttctggaaacaatggaaaactggtttaagaagagcaaatgtgcaccatctgctgttgacattttgtacaacactttgactttgtgtattggttctcaggcaggtgcctgaaatgtgtttacattttctgaaggatttttatgtagcatacttaggaaaagaatggatcaacattcttcaggtctcattaactggacaaaggcactgtgtaaatggatggtttcatttacaatgtagcattttgattaacctcatgcacacaaattgctgaaaacatatagagataacagtagggaagacaggcatataagttaagattttaaaatatcatgggttgggcaacagtttttatctttcagaaagtgattacttattaaaccagtaggcattaggttagtatactatgtagaatacaaatttaaattgcattaaacccttctggcccagaggtaatgactggtaactcttcgttatgtattcttacagaagcttttgtaagtttgtgtgagagtgtgtatgtgtacttatgaaagtatatgtaaacatatgtttgtatgtgtgtgtgtgtgatatatatttaaaatcaaaaccttagttttttaacaaaaattgaatctatgacaagtaattcttcagcttactttgttgtttttgttgttttatttttttcttggctttgctaggaagaacgagctaactttttaatgatgtgcttcttttgatcatggacaatttctgtataattgtacctcaaagtattctagagtatgaataacatgactcctactaccctaattctttatatttagataacttatatttctttacagttaaaaatagtgctgtggtaattatctttgtacatactttctcatgtgagagtattgcagtagattaagatctttgagttggaattgctggctcaacaggtatacacatttaggtactgctctacaaaaactaaaagtcagaattaatttactttccacatgtgtgtgacagtcattcctttcttttgttgctttttttaaattcagaaattgaattatatgatggtattatatgatcatggaaagtgaaggagctttgggagtcaacctgccttcatttttattttacaaatgaagaagctaggacctcaaaatataatgatttatcaaaagccatggttaatgagccagaatgcagatatgaacacaagtctcctgactgcaagttcattgtgctttacagcagggcatagtcagcttgtcacagataaagagtggcaatcttattttaccatgttccccttagrtgggaggtagggaggtgctgcaagaaattcccatgtttactatgaatgctgtagcagaatgttaactgtaacactaaaagaattaataactaattattttgaratagagatattctaaatattacattgtaaaccatttagtatttaataaactattagaaaattatttattatatctaacccaaacttggtttcctattgtttgtaattaaaatgtatatcctgttttgagctgtgaagtttattcatgatgcaaagagagaaagaaaatttgaactttgtttggctttttgagtagagaattactactctgggattgggtgaaatctttgagattatatctttattttactgccttgtagtgttttcaaacaatacaatttaagaataactaggtttagtctctyacatttactcctgtgaccctgagtcaagtgacntctcctggatctgtaatacaacgagtgaataagctctccggggtgattaagttctcattaygtaagatcctgcgtttacaaatctacatgaaaaagcaagtatgaacatttatagaactagtttctaatgtctacccccaaaccacattttcttagtacccgaatctacctccactcattccatcaaaggtctagtagacaggtctccagataattgttggattgcagcatwctaatgcaaatttagtacaaatgaattgcaaagattccttgtagaattcgaaaaagaaaaaaaaaaaagtaagatttcattaagttagtgagagtgacattagggaatcctcaaatcgcacacacacrgagaggatatcagagagttaagctagttaataattgcaaaagaaaatgttaaagaaacacaaaaatcataacatcctgtgtgatttaaaaataatgatttttattattatttattttataattaatacttgattttattatcaagtatttaacaagggcctttaggaaatctgaaagacttgccaaactaactctataattgccctgtcaaagccaagcaagaaaataatggtatcttattgccatcatatggcgttgacagaaagtttatacaaagaaataaaatgactcaattctcttttcattttaatggaagctacattatgtttcaatagtaatttaaattttattaagtataacatcatttattttcatatatttttatttcttttgctcactttgggtttaattagctttttttaatttttactagtttcttaaaatggaaacataggtcattgatttcagactgtttttcttaataaaagtgtttaatgctatacattttcctctaaacaccacttttgctaaaacttatacattttgatttgttttcattttcatctcgttcaaatattttttattttttatgttttttctttgacccatgggttattttaaaatgttgtctaatttccaaaaatgaggaaattttccagatatctttttgttcttaatttctagttcaattgggatttgatctaaaaatgaactccttgtgattctaatcccttaaaatgtattgacacctgttttattgcccaggatatgttcaatctyggtgaatgttccatatgcacttaaaaagaatttgtattccattattgttagatagaacattctacaaatgccaattagttccaataggttgatagtgatgttcaagttttcaatakgcttactgaatttctgkctgcttgtattaattactcagagtattgaaataattaactataattatgaatttatctgtctttacagttccatcagtgtttgctttatgttgaagctttttaktttcrgtgtttaaatcatttacatttaatttaatgaaaatacagttggctttaaatctagcagttcaccattgctttgtacttatctatttgttctttctttgttttattttctttttttaccttgatttgggttgaatttttttttataattccacttttttctctaatgttagccatgcctctgtatttttttttttttttctttttagtaattgctttaggttgttggttcctgaactggattccttggaccagcatcaattggaatcttgttagaaaagcaaattcttgagccctatccaagatctgccaaatcagaaactagggatggggagacctagctatttgtgttctatgaagtctctaaaatgattctgatgaagccaaaattaaagaaacattgttctaagtttacagtatacatcattagcttatcacagcctattttattttttatgtttatgtttatgtttattttttagagacagagtattgctctgttgctcaggccagagtgcagtgacatgatctagactcactgcaaccttgaattcctgggctcaagagctcttcccacctcagtttcctgagtagctggaactacagttgcataccaccatgcttagctaatttttaaaattttttgtaggaatgggatctcactctgttggccaggctggtactttgaataatattgtaacacttcatgtacttccatttcttccatccgttttgctatttttgcattcatcttacatatacatatgttatagttctcattattagtattttttgttttagacatctagcatatattaaaaatattagaaattagacaaaataaatattttatatttactgacagattttactattttggtgtccttctttcctttggttgattcaaatttctatctaattttattttcctacttcttgagtagttttctttagtgtcctttatagtgctggtttgctgacaattctttcaggttttgtttgtatacagtttttattccatcttcatttctgaaaaaatatttttgtttggcatcaaatttgcttgttatataatagttgatgtcttgatttatattttagtactttgaagatatcacttcattgccttctgacttgcatagtttatgacaaaaagttcactttcattcttatatttcattcttatattttctgttgatgatttgtaatgtgtcttttctcccagtctgtttggttttatgtttttctttttgtcactcgtttttagtattttattatcaattgcctaggtatagtttcctttgtgtttattctccttgagatttaatgagatcttttatttttttttttcttctcccttggtcttctctcatgttggactgcagttacatgtatttttgactagttgttttgactagttggtattgtcccacaggccacttatgctctgttstttttttttttttttttttcagtttttttctctgtgggcttcaatttggataatttctaatgctttttcttcaagtttactttttcttcagcaatgcctnttcttttattaactcatctagtatatttatcatttcaaatattgcattccatctctagaatttatgtttgggccttaaaaaatattccatttatcatctcatcatgattatgcttttctttaaatatatgaagcctgtgtatcatcactgcttcaatgaccacgtctgtcatctctatcattctgagcctgtttctgttgaatgccctttctccttgtattagtttgctagggctaccatagcaatataccacagactggtggattaaacaacagcaatttattttttcatagttctgggggctggaagtttaaggtcaaaatgcaggcaggactggtttcctgagatctctctccttgacttgcagatggctatgttcttgatgcctcttcaggtggctttttctctgtgcatgcacttccctggtgtctctttttgtgttcaaattacttcttataagtacaccattcagattggattagggcctaccctagtaccttcattttaacttaaattgcctcctttaaagccttatctccaaatgcagtcacatcctgaagcactgaggattagaacttcaacctacgggctttggatgggcagacttcagcccataacactcttagttatagttcatactttcttgctttttgaattcctggtacttttttgttgatttctgtacattttaaagtttaaatgttagttgccaaattttgatttatttattttaatagtgttggacttgttctgacatgcagttaagttactcgggttcagtttgatctttacaagtctcacttttaagatttgttagtggaggtccagagcagccttcagtccaaggctaattttaccaatatcccctctactccttgcaaataaggtgatacgtttctgagaatacaacccattgccctgtatttataggactttctattctggtgtgtgtgaatacaaattatttgcagtcctgtgtaaactctggcaattatttgtcctgttgatctctgatatctctttactcacattcatgaagtttcttatcatatatgaactgattattaatcaaagacttgaggattctcctctaccaatctccgaggcgtctttctgtggatctcccttcccttccatattctgctccacaaattccagctgtttgggccttaatgtaactccgttctttgtctcctcagtgtagtcaccaatctttgctggagtttcccctgtctgctgcagccagcagattgcctccaggcaataagcaaagagagtgacggtgcttagcttgttttcttcccttttctcagggatcatagttccatgctacctattattcagtgtccgaaaatacttatttcatctattttgtttgctttttttctagatttttaatgtaaaagggtagatctactccctattaccccatcatggctgcaagtaaaattctattttcacagcttttagtttcatttttcaaggtaaaaagttttaataactttttttcagtatttactattaatttttggtaccaattttaatggattcaatgtcttttgttcagtgcgagttattctgacataattaagacatactggattttcccaagatatgagatgaaatattaataattttgacatcctaggaagaatcaaatacaaatcaaacttgggaagaaggtcaatttgaaatattatttatttcctgggatttatttagtctatttgttagagatacgtattatttaactactaaaattttatattagagaataataaaaactgcttgaaatttgttaccattattgcagtgcataaataaaaaagaactagatgaatatgttttttgttttactgtgaatataaattarccacttaaaattattatttcaaattggtaatatcttttttctttccttccttattcatcgctgcttttgcaaatccgtgtaggaattttagataactatgtgtaaagtgtctaataaaagaagaatgtacatagttcagtgtggactgaacatctattcagaagtcacctgtttagcaattgacatctatcaattgctgctcttaatgaggttgctggtttcaccaatgacaagtcatgaaaagactaaggcaaactgataaatctctacctgataataagcatatttgtgctcataggtacattctttgaattatcctaaattctagaatgaaaagtatgaggtaaataaaatattttcctggttgacatttacatttggaaataattagaaaattgttttcaatatgtaaaatagcaagaaatcractttgttaatactttaaaccatgctcataaagcatacttcttgtcatgttctgcctaattttacacctgattttccattttctctgctcttgttctagaaaaacagttggtgttttctgttgtggacccaattcactatcyaagactcttcataaactgagtaaccagaacaactcatatgggacaagatttgaatacaataaagagtctttcagctgaaaacttttgccatgaagcaggactctaaagaaggaatgagtgcaatttctaagactttgaaactcagcggaatcaatcagctgtgttatgccaaagaatagtaaggttttcttatttatgattatttaaaatggaaatgtgagaatgtggcaagatgaccgtcacattacatgtttaatctggaaaccaaagagaccctgaagaatatttgatgtgatgattcacttttcagttctcaaattaaaagaaaactgttagatgcacactgttgattttcatggtggattcaagaactccctagtgaggagctgaacttgctcaatctaaggctgattgtcgtgttcctctttaaattgtttttggttgaacaaatgcaagattgaacaaaattaaaaattcattgaagctgaaattccattttctgtgttgtgtataaacagagtagctttaatttgcaagcactccaggcaaatatattagatgtttgaaaacacagcacaagactctgtattgatacgggtactttgtgtcaatatctaatcgtctccactacttatgctaatacctctatttgatatctgaagactatatgctaactgaaccttcctcaaatgttgttatagtatctatttttatatatttttttctttttattcctctctctagggaaatatgccttcccttagcatgcattagacataatgatttaataggtccctttcatcttcatttaaatctatcactattgcatggtaatgaaaatattcctactataaattataaagggatatatatatatggatatatatatgtatatacacatatatatatacacacacacacacatatatatatatatatatatatatacacatatactaataacttttcccttttttcagcatttttgtctctattattattattgtttttttcccaggtagggtttgtcttaggctgtagcctctaaggatagttagttaatttgcactttgagaccaaaggacatcatgtgtgtcagtagggactgaatataagatttatctcctttgccacacattggtttatgatggagacattgaaagtctagtcatattcctgaacagtaaaacctgtattttaccttttaagtaagaggaaatatgatattcttattcaaacttaagtttagaatccagaatattactgtcgcactttttggtatcctgagtttccatagggaactattgggtttaaagtcaccgttggaactacactgtgtgatcttataaacttatgttccctggctatcatattcttggctcagaacaatatttcccattactatcttaagaattaaggcattcatggctcacgcctgtaatcccggcactttgggaggccaaggcaggtggatcacgaggtcagagttcaagaccagcctgaccaagttggtgaaaccccatcgctactaaaaatacaaatattaggcgggtgtggtggcgggtgcctataatcccaactactcgggagactgaggcaaagaatcgcttgaacccggtgggcggaggttgcagtgagccaagattgcaccactgcactccagcctgggtgacagagcaagattccatctcaaaaaaaaaaaaaaaaaaaaaaaaaaagaattaaagcattcatacagtttagtgattttgtttagtagtcggctatcaattgctatcaaatataacactgctgaaatcagcagtgtgacttaccttgccattgttaaaatgttacataaaacataacatgatagatgctaaggcctttttttgctataattcaccaatagcaatcaagcatgctaacccatactgaatgatatttacttgtagatatttcttcctttccttgaaattctcctttctatggaaagaagatgaacccaaaaaagtgataggaaatgtggaatgctcatgcagatttagctctgaaggcatatttaataactagtatgtcttgacaacagtctttagattaaaaagaattttcatggaaacatttaacagaaagaactagtaaaaagacactttgagttagtccaggcttaatgtgcaatactgactctatactgatcataatttatttatgcgatcatattaatagacctaatttcattaaaacaggtagaagatttttcaaaagaaagatgatgtttcaaagctggtctgccattctagatgagcctccttgcttatttaagttccagtaggtgttcaaatgttaaatgttaaacataggtcatctttgcttctgcagggcttcatcttgcatgtttaagagaactttgttttattttgagggattatttctctggggatcattcttataatacaagccttaaatcactaattttagtagcaataaatgttaaaattgaaatggtgtccttgaagtttctataagctcactataactttggaacaaataaagcagcaacatttgttcacaagatgatgcaagtctaggaaacacactctgcttgtcaggaattagcatttgcaccggccgtggtggctcacacctgtaatcccagcactttgggaggccgaggcgggtagatcacttgaggtcaggagttgaagaccaacctggccaacatggtgaaaccccatctctactaaaaatacaaaaattagccagacatggtggtgggtgcctatagtcccagctactcgggaggctgaggcatgagaatcacttgaaccggggaggcaaggccgaggttgcagtgagccgagattgcgccactgcactccaaccctgccctggaaacagagtgagactctgtctcaaaaaaaaaaaaaaaaaaaaaaaggaattggcactagcatgagaagccttaggaatctgagttctggaactatcaatgttgtcacaggctaatggtgtaactaagtcaaattacttctcatacatagactaaaatgtatcattttattaatttttggatagtgtatccttttgagaatctgattaaaatgcttagcatgacatacagcacatccctacaattttggggaacctacaaacacactccagaaagaagcacatctgtttaagaacctctaaacaaaatggctattgctataggtctttctactcatacacttcttttctttttctttttttttttttttttttttttttttctgagacggggtcttccagccacactggcatgcagtgacatgatctcagttcactgcaacctccacctcctgaactgaggtgatccttccatctcagcctaccaagtaactgggactacaggcacacgccaccatacctagccaatttttgtatttttagtagagacaggggtttcacaatgttgaccaggctggtctcaaactcctgggcttaagtgattctcccaccttggcctctcaaagtgctgggattacaggtgtgagccaccacgcctgccccaaactaccaatttctataggattataccaagacatttattttgtggacaagggcattctctttatatgttcccaaacagagaattcaataggactttccatcggtttttaatcttgctgtatcacctgatttatgcaagggaaggctataatttttaaatataaataattctaaaaaactatgattcatacacacacactcatacatatatactacataaatccatacatatacatacatacaattgggacttcatttgcttttttaaaaatttcaagttaaaagtgaaatgcttgatagttcttcattcagtgatgttaaaatgccagttgggtgactgtggtagtataggcatttaaaacaacagcataaaagcaatgtagacaaggaacagggtgaatcaatttaatctacacagccaagtgattgataaacccacaaatcagtgtttacttggagcattcacagcgggtgatggatttaaattatgagccattgttaaagagattcactggaggcaaatggactgttgtcattaacagataatgctagtgatgaagaatactcattatataaaagagaagaaattttaagaaaaaatgttttgattcttaaggatggttatactagccaaaaagtgagttttctaaacaaaccaaggggaacatttttaagttgctattcactttaagaagtttccttttcttatgctagctaggactttttccatatacagttatattgttgaatataaaatactgaaggtaagagtagtcttattttacgattgggaaaactgaagcccaaaattgctacaagtcatctattgagtttgtagcagagctgagactggaattcagttatttttatttatttatttatttatttatttatttatttatttttatttatcttttttttttttgaggaagagtctcgcagtgtcgcccaggctggagtgcagtggcgcgatgatctcggctcactgcaagctccgcctcccaggtccacgccattctcctgcctcagcctccggagtagctgggactacaggctcccaccagcacgcccggctaattttttgtacttattttttagtagagatggggtttcaccgtgttagccaggatagtctccatctcctgaccttgtgatccgcccttcttggccttccaaagttctggaattactggcgtgagccactgcgcccagcctggagttcagtttttttaatctcttctaccgaaaggctcttcacctccccatgaaatcttcatctaataaaaatatcttgcgctgtgagtttgaatctccctgttaaaccctatttagtgccatgtggaaaacatgatactgagtgttaattccagattcagattcagaaaattatactcttcttacgaatctatcttcttattctaaatttgttagtcttgtatgttttgcctattaaaaaccattttcatatacctgtttttaagtatgataattgtggtaaagggattgtgatctccagagttttgcattggagaaatctgtaatagtgtagtttctaggaaatgctaataatataattttaaattcaagttcatagatgaaaattataacttcgccagctttctaaccacccaggaaaaactggtgtcaaaacaaatgtctattgttcactactcacatgaccataactcactttttgtccaggagaaaagagtcagcattttgtaaactagtgagacaggaaataaatgaaatcaaatgtaatgagattggcatttacttcagccacctcaggacaatgagaactcactgttatttctcttctaaatttcctctctattgcgctaactttattattctattctgtaagactctttattctattctatactattatattctttattctcaaaggacagaattgcaaagactagctaaactaagttttctaaagagaaaaagcagaaaacatctaattaggaaagaggggtttattataagagaaaaaaaggccatgtggatcttttataaaaattagcagaaagtttaatgttgctttagaacggagaccaacaacctgatgcaaagtgttaaaattcacattttggaactaggaagggcaagaaatgtctcataggaggaataaaaattgtcagagaaagcaaaatcatttaacacttcaggacgtaataatgtttttccttttataactcaaaagatgcttaaatacatggtaaactggctatttctctggtttggaagaatgtgaaagaatgtgatgtttggctagattttagggaacttttcacattttcactgacattagaattttagcaagaaactttatcttagattaaaattacatctaggttctttaagaaataaagcattgacgagctgctatttgacctagagaagacctcgacacttagatgagagccagcactgcaaaatactcgaatatacatagcaataaagaaggccaggatgccatgcattgctttagtcacatacacaatgcattaaaattctgtcattgctaggtcatatttcacaaccgttatcctttcacccagggaatgaaaaccttcttaacaattgtagacattgagatacacacattgtctctgttgtaacataaaagtatatatatttacttataacagcatattcacttgaacctagtatcaatttagtatgactatgtaattcattttagtggtgagaaatatccacagtgcataaaatgggagctttgcttactggcttaaaaatttactgcagccaacacattggctaaagacaaagctgttaaattttctaggtttttatctgcagctgaacctcaaaggaatgtaaaataccttactgcatgtatgttggaacatgacctgggacttaccctacactctgtgattagatgtgctgcacagtttattctttagattcccagggactaa

SEQ ID NO: 94347 - DNA, 20986 bp, Homo sapiens
  misc_feature (1)...(20986): n = A,T,C or G
aaattctctcaaattgggttttttcctttgttctcacactgccatgacaatcaacacagaagacttctgtgacgaaaggtgtagggtttttccccacacaccaggcagtggacaccagcgaggtgtcctccaactcaattctaacactatctacctggagacagtgtcagattccacaggctcggggctcagtccccaagactgcccctgacactcccagacaccagttgcaagtccaggtcttgggaacgtctgaccaactggcttcaagttgggggtgccacaaccctctctttgggttttattaatttgctagagtggctcacggaactcagggaaacgtgttttcttgttttgttttgttttttgtttttgtttttgttttgagacagtcttgctccattgcccgggctggagtacagtggcatgatctcagctcactgcaacctccgcctcccgggttcaagcatttctcctgcttcagcctcctgagtagctgggatcacaggcgcccgccaccatgcccagctagcttttgtatttttagtagagacgaggttttgccatgttggccaggctggtcttgaacgcctgacctgaggtgatctgcctgccttggcctcccaaagttctgggattacaggcttgagccaccgtgcccagccaatttttttttaacttgaaacacaaatgctttatttaaagacacatctcaattcctgcgtggcaggccaagaataaaataaaggagaacgcagcacaccattcccactggtcaagtggtcgaacccaacatccaagacccagccagcagccaagctcagcgcaacctcccgacctctggctctgactgcaacagggtgagcacatcgccctcgcacacggggccttttacattgtggatgatggagcggctcgcatcctccataaattccatgcacacctgcgaccactgtcctttagagcccattctgcccagaagcttggtgaccctgaccagcttgataggctgcatgtggctggtgtccatgatggcagtgcggcggcagttgggtgaagataatacttatgtttgctggtttattaagaagggtatttttaaggatacaaatcaacagccagatgaagagacgcatagggcgaagtctggaagggtcctaagcgcaggagcttctgtcctcatggagttggggtgcaacaccctcccagcctgtggatgagttcttcttcacctttctctcagcctccacatgttcagctctctggatgccccccaaatcctgtcctgtgggccttctatactttattggttgtccatgatagaagcatggacaactgtgtcaaacacgattggataaaaataaagtctgatctaaacctagcaggacctgtccacgtccttcctccagagtatggcgaaggaccctttctggaatgagggtcttttgatccacaatcagattagagtcctgccttgggcaagtgaaagagaaggtcagaaatattctgtctcctgagacccaaagcacccaacatgctttgtaacaatggttctgggaactatgagctaggaactgtggacaacatctctatatcaggacaccacagatggaaaagactctgacaagtacagatttctgatcattttaagatcataccactgggctgggtaagaatttctagaactctaagggaaaagctagactcaccaaattgctaacccaacatcaagcaggacaaaaattaatcacacaagactaaatggactgatgaattatgggtttctatgtctttttagaattcaaaaatattgctggttctttcgtttttcagatttagggaaaccttttcttttaggctatctatagcttaaggcaatttggtaacatacctttgtgaacaaaaatggagacattgcttttttctccctacctgatccttccagaatttagaaactactcatgaggattcttatttttatgacaaaataattatttgtatatgctcaatagaatctgctcttggctgggcatctcagcctcccaaaagtgagggattaatcccagcactttgggaggctgagatggagggaagatcacttgaggctagaaggttgaggctgtagggagctattattgcaccactgtgctccagcctgggcaacagagtgaggccctgacagaagaagaggaagaaagaagaggaagaaggaggaggagaatctgccctctttataacaggacacaattggaaatattggttatattatgactgggatatcgaaattgagactgtagatacagactttgcctgcagtacttacagacgcattctatctacactggcttcctagcatcgaaagatttttaaaagttcattttgagattcctgatctaaagttccacccaagcaaacttaaaagagcctatgtggttgatgctattctcactgaacttacctaaataagcagggcaagtttgatgaggctaaacattttgcaaacaaattagtcttactctgattatctctggtagaaatgaggggcaactgtaaagagaaaatgtatgtttcagaagaaagaacattatagtacacttgttcttagattgtagccttgtttgttgttctagagtttttattatctacctgcagaatggactggaccctgaattcttcttgtttcctccaacatatgttgacaactctccaccttaagaacaaagctactaagctggacaacttgatgtaagcatcaagggacaagtctcatgccaacgtgtggaccatacagagttcaccaaaccatctgttgtcataatcagagacagtcatattacaaatcaggaccagaagttgaccattttacattgtgaagcttttccccagatatccaaagaagactagcctcttgcccctctcaatttttccttgctcatgcctatctctttcacttggcaggctaatgctgtagttagaatttcacaccagtagcttctgtgggttacctgataaatatatcgggtctgtcaggccagactctcatctttatgacccaacagatcctttagtttacttagtgggtaagtttggcaacatccctgatgcaactgtttggcatcaaagcaaaccagacccacttcttctcactccctgccttaattttacatagattacctactagctgaacaggaaggggtctgtgtggtttctgacacatcttgttgcacatgggtaaatacatcaggtattgtagactcagctgcaaaaaattaacaaacaggctacttggttaaaatgggtagactccccatctggcttattgtttgatctattcagttttcgttggttgggttcacagggactctggctaaggaacatactccaaacccttggtattatcctcctgacagtcacaatagtagtctccctggtgtgttgtatcctttcaaatgttttaaatgtttgcatgtgaccatccattgaacatcaaatggtccctcttcagctggaatgacacaaactcaaagaaatgcatgatcatggccaggcatggtggctcacgcctgcaatcccagcactttgggaggccaaggcgggcggatcatgtggtcagaagtttgagaccagcctggccaatatggtgaaactccatctctactaaaaatacaaaaattagctgggcatggtggtgggcacctgtaatcccagctactcaggaggctgaggcaggagaattgtttgaacccaggaggtggaggtcgcagtgagctgagattgtgctattgcactgggcgacagggcgagactccgtctcaaaaaaaaaaagaaagaaagaaaagaaaagcatgatcatgaagacactgtaacctatcaatgacatgttgagaccagaaacccaaactgatagtaactgagagaggcacttttaagttttggtcaagctaggtgagagcctgatcaaaatgggtaaaaattgtttttaaaaaatcatgggaggccattgttttggactgagctcttgcactaggtcccaatagaccaggccaaaccaaaattaaatcacttatgttaaatactacataagaaactaaatcccaaaacagattagtttttcctcagttggcataataaggaagtcccttcttctctctaacccttacaaaagagtaacctgaagtaagctaaggttatcaatctgttatttttctatcttgtttcctcgttctcctcaccttacaaaacccatggttctgctatcgcccaggcaggggctttttttttttttttttttttttttgagatggtcgcgctctgtcgcccaagctggagtgcagtggcgcatctcagctcactgcaagctccacctcccgggtccacgccattctcctgcctcagcctcctgcgtagctgggactacaggtgcccgccaccacacctggctaattcaggcaggggcttttattctattttgtagaatgaaggctgcctcaattcatgaatcacgaataaaagccagcgagacctatgaatacatatgacataattttgcctctgacagtgaacttcccctttttttgcctaaaaagcttctccttgcccacctcccccaatgcagcacctatggtatgacatagcacatgtattccaggttacaatcccttgtccaacaaactgttttattattagtatttaaaaaaaatagagacaaggctttgccatgttgcccaggctggtctccaactccggggcaagtgatccatccgccttggcctccaaaagtgctgggactgcaggcatgagccatggtgcccagccccaacacatttttctgaagttgtattttttaaagttttactttttttcttgctctcctgcagttcacattcaatactttttttttttttttttgagacggagtctcattctgtcgtctaggctggagtgccgtggcttgatctcggctcactgcaacctccacctcccaggttcaagtgatcctcctgcctcagccaccccagtagctggaattacaggggcccacgaccacacccagctgattttgtatttttagtagagacagagtttcaccattttggccaggctagtcccaaactcctggcctcaggtgatctgcctgcctcggactcccaaagtgctggcattacaggtgtgagccactgcacccagccttcaataaatcttttttaaaaatttaaaataatttttagaaatagagtcccgtggccaggtgcagtggctcacgcctgtaatcccagcactttgggaggccaaggttggtggattacctgaggttaggagttcaagaccagcctggccaacatggtgaaaccctgtctctactaaaaatacaaaaattagctgggcgtggtggcgggcgcctgtaatcccagctactcgggaggctgaggcaggagaatcgcttgaacctaggaggcccaggttgcagtgagcagagatggcgtcactgaactccagcctgggtgacaagagcgaaactccgtctcaaaaaataaaaaaagaaagaaatagggtctcgctctgtcacacagactggagtgcagtgacacgaacaccgctcactgcagcctcgactgcccaggctcaagcgaccgtcccacgtcagcctcccgagtagcaaggactacaggcacaaaaaagtttttaaattttttggtacagaaggggtttccctatgatccccaggctggtctccaattcctggcctcaagcggtcctcccggctcggactcccaaagagctgggatcacagacgtgaaccacgcgcccggccacattccccaattaatggtttttggagagtggccggtttggaacgggctagcggagtcgttcgttagttaggtccctgcagtgtagatggaggacggaaacggcgctgtgacataagcgggaggaggcgggctgaggcagcgctgtgacgtagcagatgaaagccgggcccgcgctgcactgaggtacttctctgagtgacaagcgggacaagtacgccgtgggcggggccggcgggtcgtgatgttagttcgcgctgtgtggaggcgggccggcgtggcgctgtgacgcagcgggagaagacgggctgggagggcgctgtgctgaacgcccctgcggtcgcgacaggccagcgcaggtggaggcggggctagcgaggcactgaggtaagtacttccctaagrggcggggaagaacgagtgagacatgggcggggcagtcgcctcatgacgtcagtctcgcgcgcgggcggaggtgggccggtgcggcgctgtcacgtaggttcagtgggcggaagaggtggcyccggatgctgcggcgcccgctggccgggctggctgcggccgccctgggccgggccccaccggamggtgagtacgacaagcgcgatcgcgagggtgactcgggtcgaggcggcagcggtccctgcgctttgcggtcgcccagtccacgccgcctccggatctcctcctagccgagacgccctgtgccgcattcaactgtgggccctgagaacgggggagctctggagggcggacgggctggcaacgcagcggagcccgggtcccggagggcggggcgctcctcaggagctgggcaggccggcagttatcgcagtgtcgagctgctccccgggcgtataggagcgctcggtgtcttcccgacacctgggcgcgccgccaaagagagcagctgggagtccctaccgctggcccggcgcggtgtgcgctccggttcccacctcaccctgcaagccttggggtcctgggcggatggagccggctattcyggggctcccaggattctgcctactccgcggcacggcgcagagacggggacttggggaaacagcaggccttcccgacgcatgggtgtggcatttggggttcggattctccaaagccagagtccgggttggggttcttgaagctgccctgctgccattcttgagcgtcgccttagaagtatgccccagtaaggactggtgtgggaagcaggtgcctcaaagttgattttgaccctgcgtgtggtgggcctcggtttcgtctntgcatgaaagaggtcggtcctgaggccccgggctgggtcctgctctgctgtctttgggctcatggccccttcctgtctcaggcttgctctgctctttacctggggttgctgtcgaggaccctgtgcaagactcggccggtttttctttytccctgatggacagacccaaacatagccgcgcagcatcgtgaagggctggggccttcactcctctgtggctctggaagagcccgatttcctcaggaggtaaaggaatgttcctgtcccccccggggaaagaaagtgaaaatgaaagcgccctggctgctcctggtgtggtcccatttaaaacgaggttgctgaaggccaggatgcgtgctacccggatgtgtgcccagaaaccctgcagccaagagcagccgcctggaccaccagcctccccttcatccacctggcccagcccagagcccaggcccacgtctggtggtttgtgtcttacgagaggccaggcgggggctgaattctctcggttctcagaaggtcaagccctctgttagcatctcctcgaacagtgggccgggggcaaggtggtgactctgttcagtccttaggatggctggaagccagaaggaggagattatgccgccacagcagggagtgcctttccaggaaagcggctgctggggcagcatgggagcccagtccagggagcgttctggcagagaccattccggaacatggatctgcgccggcggctcccaggagaccttccatctcggagctcctgtggagaccacgtgcctggcaggtccttacagttgtgggttgtgtggcttcttgccaggcagctgattggagtttgcgactgtgggttggtgagagtggagagcacagaatgtttgctggaatgcttccctctgcccacaggaagacacctttggcgcatgtgttctggtcagggcaaaggctccgtggtttccaccgcaagattgcaggagccttgaggcctgggccacagttttctcccttgggtgtgctccatggaaggtggctttggtgaccgccctgccactggtctctccccaggcaggcaggcagcctgtgcctccgccctgtctccagcggtggtgtggctgtgcttctgcaaggcccgcatccactcactgtctgccctctgcactctctggctggccagggcccccagtagtctgctcattgtgccctcacgcttgggcagagccgaactcaggggacccaggaagagcggagtgttggcccgtccagagttcttggcaattggtgtgtcatgtgtgcctcgtgccctgtgctgggcgagagtgggcacagctgcgcagacaacgcccttggcgaggctggagcctggacccctgcctggcagcagctgggtgaactggtgtcttctgcctgcgggcccagcctcacctcaatagcttactgctccctcaggagggaggaggggaggcctgggagcctgggcttggcggggtaagggtggtgcaggggcaacacctgtggaggaaacaggcggggttggggcccaccagcgtctgctgtctgctctgtgctgggttgcatctgttggtgtctgatcgttgtcagggccctgtggtgaagagacacacctgccacttgctgcttgcgaggaaagggggagatccccaacccaggagccagaggtgggactccagcaccccccattcctgggagttggaagtgaggcacgagctccccaattcctgggcatcggggatggggtttggggccgaggaggggatggagaccagggtcttgtggtagtttggtgggatcctcagaaggtgtggctctcccccttctgaggacgcaaaaactcccagagtttttggcgattgatgtgccacgtgtgccttgtgccctgtgctgggcgagtgtaggcacagctgtgcagacgacgcccttggcaaggctggagcctggacccctgcctggcagcagctgggcgaactggtgtcttctgcctgtgggcccagcttcacttcactagcttagcgctccctcaggagggaggaggggaggcctggtcagtggaggtcaccactgtgtttccttctgtgtgggtttatagtcacgtagcatctaggttcagacccgaagagcttggagccaggggctggggggaacagggcaggaccggccttggggcagccctgtcaggcccaccagtgccatgctggttgtgggttggcagggcagagtgaccttaagaagggccagctcagtggagcaacaggacagaagctcacatggggtccagmccacaggaccatttgagtagctctcccatatcgggtccttcgaagcacatgatttagctttactttttctccttcgtattagaaaagtcaccataataccatcaagtcataatttctgtgatctcagtgcttcaagtaggtgtgtagcaattgctggatgtgtcctgagaactgtaccccttccaccctggcgagaagcaggggccagaaattcacacaagtggcatggctcattgattgtgggagactctggggggctcctagctagtgcattatgggaaccaggctgtggaggttgcagggctcgctggctgggagaagctgaatggataaagaaccctggccactgcagtgcgtgctgatggttggctggcacgtagaggaggtggcagggctgggtgagcagcaggagccaggttagtggggaggcccgagctaagcgcaggggcaaattctgcgggtrggagagccaggagggcatggggtgcatggtgagatgaaaacgatgtgtgcttgtgacaaaaagcccagaagaggcagtaaggagggaggagtctatcccttatggagagcacatggacttctgggtgggtgtcctgcagttcccttcctcttgagtctttttaactgggggtccggtgtgtttgtgatcaatgacatgtatgcgtgtgcatgtgtacctttgcaggtacacatgtgtggtgtgtgtgcatttgcttggtgtgcgtgcatttgtgtgtgtgtttgtgtgtgcatgcatgtgtgtgtgtttgtggtaggtttgtgcacacatcctgcatacctttgtgcctgggagtggcatgtgtgtggtgggtgtcgctgtgcatgatggagttgcagccgtggtgcatttgtgagattacctcggtggcctaaattggggattaggagggcatcctcaggtccttcccactgtctgctcgtctgcccacaggcggctgtgccctaaacaggaggaggccattcacgcctcgcctgagttgtgtccaaggtgtgcgtgtggccaggggtccatccgcttccctctagcccagcccctgaacacagctgcagtgcacggccccactcctcagctctgctccccatcccaactcgaagacgctgccctggccctgtgtgtgcagctcatgtggactgggagggcagggcaggtgcaggtcttggggcaagagctggagctgtcttttccttcctgcacagccgcagagcaggtggatggggctgcttccctgcaagggcccagggccaggccccctggggatttattcgtggcttagaagggtggggccagaagcaggcgtagtggggattagggactcagcacccccagctctcagtccagcagacagacccaccccaggctgactacagaggctgcacctcagcaaacaggtaggccctgttcttggggaggattcccaccaggcaaaggccagctcccgggccctcacctgccacgtgtccaagctaggatcctgtttgcctttcccttgggggctgggagggaggcctccaaccccctctggcattaccagcatcacagataggagtcccaagtcctatgagaagttcctggaataggtgtagattcagtagatctttacaagaccatatctgcagggcaaggtaccagaggacagaggcggggacagggacacttccattccagacctagcagcccagcactcagcaccatgcatgggagcaaatggctggactcctgggtggggtgggggtctcagagcaggctcccagagggcttggaggtgactccaccaggtggggacggcagctcccaggtagggtgtcatcagagtagacagcattgcttgctagggacccctggggaggctgacagggtcagtgggtttcagttggggggctcccctgctgagaacccagtaaagccggccttccattcgtctcccgtgtgcccagagcctggtctgagggccgccctgtgcatgccggcccttccaacgtggcagagctcagggggaagaacacccaggctctcaggagactctcaggccaatgtctccatccctgggtcagccctttcctgccatgaattcaggaaggcagaggcagctcagcagatggggactagaggccgcactgctatccacagcctctcttctcacccccaggcatgtcgggccccaggcctgtggtgctgagcgggccttcgggagctgggaagagcaccctgctgaagaggctgctccaggagcamagcggcatctttggcttcagcgtgtcccgtgagtccagggctctcgtggaggggtgcgtagacctcaaggctgctgagtagtcctagcaccgtgagcaggccaggagcccaaacccaacaggcacacccaccctgcagactgtccgaactcttgcacactcccccccacacagaacctgaggttatcacactcctgctgtcctgcgtgcctgtgtctcccttccctgggtctgttgagtactgataactgggccacagtgtttctttctgggagaaccctcgccttgtaggctcctgcgccttcccagtggtgtgcttcactggctgcctgcatcctggggctcaagtgctgtcgggactgcaagggaaacgctgggtggggcattgggctccgagcagcccccgatgggtgacaggtctctctgctagataccacgaggaacccgaggcccggcgaggagaacggcaaaggtgagtggggtggggccctatggctggagcacccccagtgtgggcagggctgctgggccctgcagctgtgttggctgtgctgccygtctcctgcccccatcaatccctaatctgtgagatgggtccttgcctccaagggccggtgaactcaatcagggtgtcagcgccacagcgtggtgtcgccttccttgggtacagtgtgagaggccggccaaggcctggggctgtcttcctcccaccttggaggcggccacagtgctgctgtccccagccctgtcctggactcggcacttatcagcacttttgagctgtcttctggrgtcctggtaaaaagggctactctgcctgcctgattcaagacaagggacccccttcccaacagcacccccgccccttgccgtgcaacccagtggtctccagtcaccccaccacatcgtcccctctgtaacctgacggtctccagttcccccaccaccttcccccagaacctgttggtctccagtccccatcccatcaccaccaactcccaactccccactggaacccagcagtctcgtatctccatcagtgaggacagtgtgagaaatggtgtctggctcaggcacttggcagcacttgaggggtcctcagatgtctcctgcccagcaaggatctgactaaagcagtcgtgggtgtgggaggggcctgcaggcatgcctgggttgggggcagctggccctgggcaccctggtgcaggtccagtctgccctctggatggcccctcctcttccccagattactactttgtaaccagggaggtgatgcagcgtgacatagcagccggcgacttcatcgagcatgccgagttctcggggaacctgtatggcacgaggtgggccatgcgtgggtgtgggtgggctcccagggttgctgttggcaacagggatccaggtagtgcctgctgcctgcccgccatccacaccacccaccccatggttatgaatgtggccaggttgtggcccagggccaggctcccacgtctgtggcccacagtggctcttttcatgaggctgctgggcccggtcctgccaccgtgcattgtcctggcagggtgaagggtgcacaggacacctcatgctcactacaggcaccttggggagtgggtggcctctgttccctgtaggcggggcagggcgtgggggtagcaggtttgagatgctgtcgggtgctgggtccaggccaggcctaggctcagctgtgggaggagaacgctgggcccgggagggcctgggtgtccctgaagctcctgtaggcctcagagagccctggcacccctgctgacctggcacctctccccagcaaggtggcrgtgcaggcygtgcaggccatgaaccgcatctgtgtgctggacgtggacctgcagggtgtgcggaacatcaaggccaccgatctgcggcccatctacatctctgtgcagccgccttcactgcacgtgctggtgtgtgctgggcagggttgggggctgggggccagggcatgccaggctctgattgccaccccctttttaggagcagcggctgcggcagcgcaacactgaaaccgaggagagcctggtgaagcggctggctgctgcccaggccgacatggagagcagtgagtgtgccgtgggatcaccagggaatgccaggaggggagtcagggttctgaggtctgtggcaccaggkaccctgtgggtccccagacctcctgacacctggagtccctgtgagggtcctcagacctctcaactacctcccaacacctagagtccccgtgagggtccccagaacccacccccagtcaccaagggtctcattgagggtcctcagatttccctctgttacccagagtctccgtgagggcccccagaccccccatcgcccagggtcccatgagatgtccccaaccttctagccccgggggtgtcatgtgcatcctcttacagctgttgcctcttctctgggtctgactgcagcccacaagaagagggcatttaatgttctgctgtgtgtgtagaggatagtgtagcccctaaccagagtcctgatgggtgctggtgtccagacccaagttctggggctccagagagagcaggagtggtgcctgaggactgaggcccagggggcggcccttccctaccctgcacaggcccggctgggctggaaagctgtcycacagccgcagtgaggacagccgcaggccagtgggctgctctgggggtcgtgtgggacctggggtggggctgcatgggctcactgtgccctgaccccaggccccacccacaggcaaggagcccggcctgtttgatgtggtcatcattaacgacagcctggaccaggcctacgcagagctgaaggaggcgctctctgaggtgggcccatccttgtgcctacctgggcaaggcccaaggggaggcctgggggccaggcctttgttgtccatgaggccactgaggttagatgggacagtcctacccaagcactggcatgagacaccgaggtccacggtggagggagagcaggaagcccagcccttcctggataccagccctcccaactccctttcttcctcactggcaggaaatcaagaaagctcaaaggaccggcgcctgaggcttgctgtctgttctcggcaccccgggcccatacaggaccagggcagcagcattgagccacccccttggcaggcratacggcagctctgtgcccttggccagcaygtggagtggaggrgatgctgcccctgtggttggaacatcctggggtgacccccgacccagcctcgctgggctgtcccctgtccctatctctcactctggacccagggctgacatcctaataaaataactgttggattagaaactccataaatgagtggaatgtggccccaaggttggtggggccccatcatcccgatcgggccctgagctccggcagcccaccctaaccaccagccccaaggagggccacaagatggcctctgcctaggcatctgctgcctgccggctcgtggctgctgccccagggcagcatgatgcttgactggcaggcagggaaggtggcagggctggtcccaacccacctggcaggctggcaagtggggagcaggaagcggctgcatggggcagcctgaggctgcaggggtgggccctgagggctgcctcttggtgcccgaccctgtgggtctggcatgggccagaggttccaggagaggcccctgagctctggcagctggaggttctagatctcgaggtctaaggggttccctgagggagatgcccctcccctagctgccccaggggctgtgtgtggtgtgtgaggagcctcctctgctcaggctgcctccctccttccccagtgctcccccagcttgcctgtctaaggcagcacagggccgtgctgccagccacccctagggtcagccccagccctgttctgagcctaggtgaggtgcctctggggtggggtgtagacagatgggtgggagagaaggaggcaggcagggtgcccggccggaaatgggggcggggagaagagtccccgcccagagcccagactgccggaggatacaggccagagccgcctggactgggcggctgggcaggggaggggaggggagggcccaggcagcccccggtcgcttgctccagggcaggtggactgagcttcggaggctggggctggcctctgacctgcttgggcttggagagccctgcccgctgccctgccccccaggacaatcagggattcagaccctgaggccgaggggggaacaatggggcccttgagggcccctcctccagcccccattgtgcttggtggtgagaggtggccctggctcggccacacaccctcggggaggaccagcatccaagcaggtggaagggctctgagggagactggaattttctggcctggagaaggtagggtgctggggtccatgtatgtacctcatggggctgggggctgttgccccaggagacagcctcacgctgtgccccttggccttgaggccccgaaggagggagggcttcctagggcccagccataggagggtgcactccttgcgcctgccaccccctcctgggctccgctgctccacgcagatggtggggtggcccccccactccatgtctgtgtccttcaggcccagctgccttcaccgcagggtgggcaccaaccggtggggtctgctctgggacagctggcaagcgggaggggggtgccttcagtacctcccccagcagctggggcccctcaggtagtgatagggctggcctctgaaacaccagccagctgcattgtgtccaggcccagtcccccaccctcagcggccacctggaggtgagggggccagcctgcccctggtatagacagacctggggccctgctcagtcccctccatagaaggccacaagccactaagtttgcactggggcccagcctaggtctgaagcccagcagaccctgtggtcaaggatccaaccccagtgcctgtcagtgctgtgattaactgggtggaggccccccgggggtgctggggcaggccctcagtgcaaggaaggggcggcgtggctgaggagggggaggcccacacccctctgggagggcggagcaccccagggctgctgcgcagggaggccacagcccaggcgcgggggcccccatcccagagctggatggcagtgagcccaggattcctggctgctgggcgttcaggagggaagagacgggttcgtggatcctgcgggtggagggcagggacagccttaggaggctggggtaatcatcaccccctcactcccagtatggatacccgccagggctcggtttctggagggtgtgtggctcagctccaggcctgcaacagccctggaggctggcctggggagctgcccaggcttcagcgatgacacactcccagcctgacccaggcctaactcgcccccttggtccacctccagaggaggaacagcccctcacttctgggcctgacagctctgttcctgcttgggaccctgagggagggaactcaagaacaggctgcaggaggggcccacgcattcacagcgccaacaaccccagggaggagagggctccacgggggaggaggcaccagcctggatgctgccttgccacctgcacgtgtgcacggccctggcaaggcctggggatcccacagactcatacctccacaccacgctcctcagtgtcccctcactcccctgacattcctgagcgccacacccatgctcttgggctcctgggggtctggtcagttcaggagctgtggcaggccatgtaaggggagccaccatgtgggcaggcacttggggtcttggtgggggcaccttgctttcctgggcctggtggggactcctgagggaggcacgtggtgaggttgagtctgaatagggagggttcatggctatgtgtgagagtgagtgtgtgagcccagctccatgttgagctcgagcagcagtgtgcatgtggcagtgtgcactgcttgtgtgtgggggggtggagggaggagcgtgccctgtgtgtacatgtgaaggatgcatgaggatggctggtgcccacacccagtggggcctactgctgcacaggcaggacagtgaggccggccacagagctgctggggcagagtgggcatggagggagggttccaggcctcgggcttgggtcctaggtggctgagctctgcacctccctctggaccagggcatccagaggagcatggctgagggtgcactcggggctgaccgtcccagggcctgggctgtccaggacaggcagctgggggctcaggcagggacatggaggacaggtagtggagctgccaccacagagctgagctctgggcatcagggtagggggctacggcctgtcagcgggtgaggagaaattgaggcctgaggatgggtgagtgctgtagccccctctgagtgaggactgtccccacacagggccctgcagtggagtgcaggggaaggaggggactgtgcctgcaggagctccagggaagtgggactgggaatctgctttggactgtgagtggacaagcgacagcacagtgcctgccatgcgctggggtaccatcattttcggggaagggaggagcctgccccagggtcccgcctggtgaactgtgtgcgtgggtgcctgtctggtggctgccctaaactgcagaaaacacccacccttcgcggcctgccctgggagggcctggagatggaaggaaatacctgggcccctgaccctgtgctacacccagcagggcggggctcgttctgcagtgcctcaggacccttgttcagacccaggatgagcaggagcttgatgggggagggggcccggctctgaccggtgtcctgagataccaggacaccaggacactggtcagagctggcccagccaggtttgcagacaggcagcctcagcttgggcctgcttgccctgaaacccttcccagaggtggcccccactgtgagcccccatggtgagtccctttgctcttgctgcgcacccctttgaagcccttcctgtgagcccccgatgccaccagggcgagaccgcccccactgtgaagccccctttcacaccctggcctagtagcgagcccccatgagaccctggtccccagtatgagaaccctgtgagtccccggccctccaccaatgcccacatcctcctctacttcccacagccttccctgaggctgaccctgcctcaccactcccagacctgggccaggcagcgtcctggctggtggcctcctgtggtcacccccctacctcgccctgacaccttactaaccccagcagctgcctcctcccagactctgaagcccaagggtgcctccagctctttggccaagctgaagcctctccccaccaatcctcattttgggcaccctggaggtgtagctttggggtgagatctcttggacttgtgtgcacatagtctgcaaatcccgggcctggctccctgggggccagcacccctcccctctcctcccgtgggcctccaccaagcccctgctgacagcctcatcctgcagcactagacagtgcccacctcagcttgtcccgcctctctatcatggtcctttctttaagtaggggtttattttacagcactttcacagaaaagggccaaggtgtggatggctcatgcctgtaatcccagctctttgggaggctgaggcaggattgcttgaggccaggagatcaaggagacgatggtgagttatgattgtgcggctgcactccagcctgggcgacagagcgagaccccatcaaaaaaaaaaaaaaaagtaaatagggtctggctctgtcacccaggattgagtgcagtggtgtgatctcggctcactgcaatctttccctctggggttcaagcgattctcccacctcagcttcccgagtagctagaagtacaagcgcaccaccatgcctggcaaatttttgtattaagaccccatttctcttttcttttttttttttttttttttgagacagcgtctcactctgttgccccagctaagtacagtggtgcaatctcggctcactgcaacctccgcctcccaggttcaagcgattctcctgcctcagcctcctgagtagctgggactacaggcacgcgccaccacgcccggctaatttttgtatttatagtagagatggggtttcaccatattggccaggctggtcttgaactcctgacctcatgacccacccacctcagcctcacaaagtgctgggattacaggcatgagccaccgtgcccggcttaagaccccatttcttaaaaaataaaaataaaaattgccagcatggtggcatgtgcctgtagtcccagctactcaggaggccaaggtgggagaattgcttgagctcagtaagatttacagaaatgctgtgaggatagtgcagagttcttatagacctcacacccagtttccccgttgctgacgtcttgcattagcgtgacatgctcctcataatgaatggaccaatatggatgagctgggattaactgaggtccttgctgtatgcagatgtctttgcctctcccctacagctccttttctgccccgccatggatcccacatggtgtcagtcaccgtgtctccctggactcctcttggtttcggcagcctcctgggtctccttgtatggggtgtcctcactgtctggatgaacactggccggatgttctgtaggatgccccttgggtgggatccctttcaccctcatgtttccttatgagtcttcagggggatgggttttgggaggaataccatggagttgacgtgaccttcccatgagatgctgtgaagcatccacaccattcacgatgcttgtgatgacaccttggccgcctggccagggttggtgtaggaggcatgctgcagaggcgctctccccctctccctcccacaccctctgaagccaggttaccaggtgcagcccacaggtagggatgggggtcatgctcccctccagtacagagtgtccacatggctgctttggattgactctgcacagaggagctgtctcctgtcccccatttggttatacattcagtcacgtactttggcttctaatctatgtcagtctgtaatctgtaacacaagactacttgatttctttcactgctcagagggatccagtctcaggcactgggtgctctacgtgcaggtgctgcttgcacagacttcctctctgacactacagtttgcgccaggctcttctgtacattcccagccccagccctcgggtctgccagttccccaccaggggttcctgattcctgtgattgggagtggaggtaggaaccaaggcctgggccccaggtagatt

SEQ ID NO: 94348 - DNA, 58289 bp, Homo sapiens
gttgaggagctggagtgggtaggaaaaggtgtgtaggaatgggtagatgggtgaaggaggtggacagattaaatcattcaaggcaacaaaagagaaggtttaaagtggtaaaaaggagggatgaggatgatgggaagggagaagtcttagatgagctggtttaaggagatctcatgtttcccaaagaggcctttgaggttctaggttacctttagtaaattgtgccatttttgaggctattaaactgaattagtgccataatagcaggtactcagtgggggaagaggagggcatctgatagagtgagagttacccatggcattagtggatagtcagcccaaagaaaagtctttaaaggagccaagaaaaactcccacttgattaattcccttgaacaatccccaggtcgaggagctgaggaaacacagaagtctcacaggagggccaaagcatctctttgcctaaaacaatcaaagtaacctcttactgttcttcaacagacaagatggccagagcactggttcaagacttgaactcacccaagagtcctcaagtcctgaacatggcacctttacctgggtggggctggtggaggtccctaggtgagttccagtcttgagctggatcacagcaatgagaactgtcaaataaaaaccaaatccagatctaggtaaggagagactttatttagaaggattattgcaatagaaaaagagaatgtcgcaataggggagggacggcattctaatagaatgcttcaaccataagatctgcaagcttttgaaaggtcaggcagaaaagggtttttctttttttggtagtagtaaacaatgttaaaaagaaccagtatcggctgagtgcggtggctcatgcctgtaatcccagcactctgagaggccaaggtgggaggatcacctgaggtcaggagtttgagaccagcctgaccaacatggtgaaaactcgtctaaaaatacaaaattagctgggcatggttggtgcatgcctgtaatcccagctacttgggaggctgaggcagaagaatcgcttgaacccgggaggcggaggttgcagtgagctgagattgcaccaccattgtactccagcctgggcaacaagagcgaaactctgtctcagaaaagaaaaaaaaaaaaaaaaaaaaaaaaaaaagaaccagtatcagggagtgggatgagcaggtggcccaatcaggcaactgatcaggacagagtttctttgtggtcagctggaaaagggcttcttgggaggggatgtgatatggtttggctgtgttcccacccaaaccccacccaaatctcatcttgaattgtaatccccataatccccacgtggtgagggaggggcttggtggaggtgattggatcgtgggggcagtttcccccgtgttgtttttgtgatagtgagtgagttctcaggagatctgatggtcttataaggctgttttccctgctcttgcttgctctctctcatctgccgccgtgtaagatgtgcctcttcccctgctgtcatgattaaaagtttcctgaggcccccccagccaggcaaaactgtgagtcaattaaacctcttttcttttcttttttttttttttttttttttgttagacagagtctcactctgtcgccaggctggagtgcagtggcatgatctcagctcactgcaacctccgcctcccgggttcaagcgactctcctgcctcagcctcctgagtagctgggattacaggcgtgcaccaccacgcctggataatttttgtatttttagtagagacagagtttcaccatgttggtcaggctggtctcgaactcctaaccttgtgattcgcccgcctcagcctcccagagtgctgagattacaggcgtgagccaccgcacccagcctttaaacctcttttctttataaatcatccagtctcagaaatgtctttatagcaatgtgaaagcagactaatacaggacattaaggggcttattccaaattccaatgctggtttaggctgagactagattaaagggcaaagacctgatggaaggagaaaagcctcattgaagtttgatcaagtaaggtatttgcccagattgatcagtaggggcaaatggttcagctaaccatttataagatgagaatggaaatttggagcgcatgtctatggccttgttgtaagtgtgaaaggatgttatccatgatgattacctaagtcatttggggaaaggtggttctatgtagttagtggtttctcagaaaatacagccgggagaggatgttcactggtctccagtaacacaaagtataggtcaagcaacaccatccccttactttttttttaatttattcttatttatttatctatttttgagatggaatcttgctctgtcacccaggctggagtgcagtggcatgatcttggctcactggaacctccgcctcccagattcaaccgattctcgtgcctcagcctccccagtagctaggattacaggcatgtgccaccgcacccagctaatttttatatttttagtagagacggggtttcgccatgttggctaggctggaactcgaactccttacctcaagtgatctgcccacctcggcctcccgaagtgctgggattacaggcataagccaccatgccctgcctctgtcccgttatttgattgtacttgtaactatagttttattatgacattttaagaatatattgctattgtattaatcattactatgacagctgtgtttatcagacactttcccacatctataatattaggagagttgggtgtttgtgatcatgagtttgctccttgtgctggttattgaagtatgtcttagagttcaaactcaagcttctatcttctgctttgtgagccagggctgggacttagcaaatcacatttcctataaggttttgcttataaggggtgcttgaggagagggacttgctactttatagctgcttactgttcctgtccatgttaccaagcaatggctcttctccctggctgcagcaacagctggttccagtttcttagatttgtttgtttgttttaatccaccctctcccatccagcctcaatatttaccttcagagataaaagcaccagctgggtaccgccccctcctttgaggtctgactcccagccaaccaggggccctctcctggctgttaggttctgataaccccaacacttcccctctccccagctctgtgcatggcagctgcttcctgcagttactctctctctgttactacaatgtttttgccttgccaatcttcatgaccttaaattctctgtaaaagtaattgctgtgatttctgttttctgactgggccctgactgatacacccctaagcattccagaaataccttctaaactacttgtatagatttatgggtgtatgttattgcaggcattaaaaataagtgggctgggcaaggtggctcacacctgtaatcccagcattatgggagactgaggtgggtggatcgcttgagcgtgggagttcaaacccagcctgggcaacatggtgaaaccctatctctacaaaaaataccaaaaaattaccgggcatggtggcacacacctgtagtcccagctacttgggaggttgaggtgagagaatcacctgagcaggggtaagttgaggctgcagtgagctgtgattgcgccactgtgctccagcctgagtaacagagtgagaccctgtcacatacacaaacaaaatggattacacttatggtatacaggcagtatccaactgacaaacaagatatattccaaaagttaattcataaatctattgcttggccaccacccctggttaatttatctatttttattttgtagaggtgaggtctggctatgctgcccaggctgatctcaaactcccaggctcaagtgatacttgtacctcggcttcctaaagtgttggaattacaagcgtgagccattgcaaacagccagctatattttatttttaattaattaatttatttatttttgagatggagccttgctttgtcacgcaggccagagtgcagtggcacgatctcagctcactgcaacctccacctcccgggttcaagcgattctcatgcctcagcctcctgagtagctgggactgcaggcacacgccaccgcagctggctaatttttgtatttttagtagagacggggttttggtatgttggccaggctggactcaaactcctgacttcaggtgatccacccacctcggcctcccaaagtgctggaattacaggcatgagccactgtgcccagccccggctatactttaaacttatgtttagcaattaacatgtcagtattttaacttacaaatgactcagacatttaatgaatatctattacttaatttaatatgttcgaaatttcaagtcaccaaaaaagatttttaaaactatttttaagtagacaaattttataaaacaaattatttttaaaagtttataaacttttattccatttacatttacctaatctacttgctcttaacaattatgcttgaattgctcatgaaaaatttcatgagatattaaacaaagctagccattgaaggagttcaggagtttttcccaaaatcatttcctctcccctaaattgtccctccccaatgaagaggatacacaagctcctaaaatctcagtttttgttgggggaggcagagggaatattagtttttcttttctgtgataccccctacacgaaatctgtgtactttttctcttgttaatctacctgcagtcaatttatttcatagacttagttatccaagcctcagagagtagaggggaagtctttcttcctctataccatcatcttatgttaatttttgttgacaaatcaggcaagtgtcaaacatatcacagtctaatggcctctgagttggatttttttttttttttttttttttttgagatggagtctcgctctgttgcccaggctggagtgcagtgacacgatctcggctcactgcaagctccgcctcccgggttcacgccattctcctgactcagcctcccgagtagctgggactacaggcgcccgccaccacgcctggctaattttttgtatatttagtagagacgcggtttcaccatgttagccaggatggtctcgatctcctgacctggtgatccgcccgcctcggcctcccaaagtgctgggattacaggcgtgagccaccgcgcccggccagaattttttttaaacaacatggaaacaaataagacctcgttctgttttctaggagctaaaaatccaacgaaagaagacacagacacaatattccccttgttacaaagagaactgtgtcaacttttataactgacacaaagatctgtgctataagggcggggaaggttttttcctactttccacagcactgtggattgttccacagtttaatttgatcttaatttttatgtggaaatacacatgaatgtaatgagttcttaaatgctaaatttaggaagcaaggttcgttaggggagagaaaaaaacacctacatggttatctctaaactttacatatcgagaaccttggaatttaattttattgttgttctgtaacatattttcatgtttaaaatcagaaaaggcagcatttctcgagtttcctgctttcgaggaagggaggcataaaatgtttaaaaagacgccgctcacacacctcttaagaatcagagcacagtgaggaagaggagcgaggaagcactaggatcgcagcgctactcccagaccacgtcagtgcccagagggcgccctcgcctgtaggcgggaaccgcgagtccgcagcaagtccccagccccgagctcgcgcaggtgggcgaggcggggacgtggtgggcggggcctagaaaggcggggcctctgggggcggccccggggcgggccacgctggtgtgagggctgcaggcgcagctccggagcgcctagagcgcggcgcggggcgggagcttggtggagcaggagcggctgggcatcctcctgagactccggggtcagacgcccactccaggtaaccggctctccctcgtgttcccctgctcggccgcccggcggtgggggaaggctgagaaggatgggtgggagggagccggctctcagccagtgccccgtggccccgggcgggctgggctcccccgcggaggaggaagcagaaccggggtgcgcccgggaccggaatggagcggcgcctcttccttccaccttcattttccgtccgctcagtggggctgggacgccggtgccccgtgtcccctgaaagtcactttctggcctcttgcccctggtccgtgtagcttagatgtcggaggggttggctgcgggcgtggataggcagggaacgaacagactcgctgccatcccatgggtgccaggggcttaacttcatttaacttcattgaatcctaacgccagcccggctaagatgcattttcacccctactttactgataaagaggccaacgctaggataataaatgactcaccctggagcaaactattactaataagaaaagagacgttagtttaggggctccgaagcctctcctttcctgctccctcgctttccttcttctcgcggcagtctaggaaactcgcgcgcagggtctattacgaaaacaagtgattcgtcttaaaagcattttaccccctcctaggtttctctttcctcttttttttaagtatctcaggcagattcctccaagttttggttattaggtttttgaaatggaagaagcccttgctcactgcttcttttctcctggcagcgctttctgcgcagcacaggcaccctcgcctgtcacgcctccctctcctcttcccgtctcccagcgtggatgagggcgcctgcagatcccggctagggcacggaccgcctaggccgaggtaggttctgtaggcacctggcatgctgtagatgcatataaacgttgccctgtacaccctttgccttgttatttctttctgcagaaaagagagtcggttttttacacataatggggcaagaggccaattgggaagatatatggtgttcaaagaaagccgtggtgccttgagatgagaatgcggccacagctttttgtgggctgaatttgatgggtgggaggtgagagacgtggtctggaagttgtctcttcgtctggcattctgccccccttccagagctgttctgaaaggccggtttgttttatagaggggaggaggagggcttagtagtttttaaagatcagtgtaaattacctgctaggagcttaggcaattccaggcaggcccccctgctggaggctttcgtaacagatttcagttctagcagggaggaaaactcagactgtgtagatacctgctttttcttaaaggaatttttttcgggcccttaaaatggtagttttgggaaactgatttcttagaaatggcaaactcctttattttaaaatacaatataccaaactatgaatttacttttaaaaagttttattggccgagaggttgatattttttccatttcatgatgagggtttgacggtcactgccacctcctstgcccgtccttcaacttggccctgtaaaggatctccttagccttggccccaagtttgtamtagattctatccttcattaattatagttcattcttgattaatgatagcaatgcttccactcactttttaaggagttactccttttccgtttgtaattgaattgcttaacagtaagaaaaacgtttttccctaaaactgggatcacaaaatccactttatccacatggactaaacaggtaatgcacaagagtgcttggttgggcccaggtgactgcagaggaacctgctaaggctgggtggatattggccatttccaccgagtatccatgcaggaattcccattcagccatacagtgtaggcagcttttttttttttttttttttccacgaatagctgagaacttttacttaaaaataaaaaatgtaaagcctgattttaaatattggctcatattttttcctttttagaacacaaagagggccgggcgcagtggctcacacctgtaatcccggcactttgggaggcccaggcgggtggatcacgaggtcaggagttcaagaccagcctggccaagatggtgtctctactaaaaattcaaaaattagctgggcgtggtggctaggcgcctgtaatcccagctactcgggaggctgagacggagaattgcttgaacccgggaggcggaggttgcagtgagccgagattgcaccactgcactccagcctgggtgacagagcgagagtctgtctcaaaaaaaaaaacacacacaaagagcctgggcatggtggctcacacctgtaatcccaacattttgggaggctgaggcaggtggatcacttgaggtcaggagttcaagaccagcctgaccaacatggcaaaaccccatctctacaaaaatattcaaaaattagccaggtgtggtggtgggcacctgtaatcctagctactcaggaggctgaggcaggataattgcttgaacccgggaggcggaggttaggatgagcagggatcgtgccactgcactcaagcctggacgacagagtgaagctccgtctcaaaacaaaaatcccacaaagaataaaatcaaatttgtttcatgcatcatctgtttgcaaaactctgccttaaaaactgctactgtacacggtgattatattctccgatgaatggaaaattctgaactgtgatgtagatattgtacatttttcatgaaatgaagtggtagaaaacagaaattactactggaaatgatcccttctgactgtcaaattctgttttctatgaagtgtgtggtatttcagctatactgtatttttttttttttatagagccaaccaaggactcttgtcactatttttatttattctaatgagaaatgtattcatggttccaggtcagtatgtcaaatgtctaactccctgtcttaaaaagggagttcccaaatgactgttcatataaccatatgtgtttcttgtggagactgtctgtattcttggctttgtcactggatttgtggcttagtgctgtcacgtttcctatctgaggcaaatgccatatatgtttagaccagcctttctcaattgtggcacttttgccatttttggccagttaaattctgttgtgggggctgtcctgtgcattgcaggatgtttagcagcatctctggcctctacctactaaatgccrgtgcaccctccctgcagttaaatgaccccaaatgtctccagacataggcaaatgttccccggagaacaaagtcatctttggttgaggaacaaaatgaacctatatttaagatggtctaaatgtttctgagatggtctaaacatttataagcttaacaattaacttgaaactcttcaggactagagaagctatttgtaaatttaaacatctgacgccttgaaacacctttatcataaagataactaaaccagtgttctttgtgaatggccaatgtgtcctgccagtttctttttttttctttttcctattctgagaagcatgccctgccagtttctatctccaaagaaatttcaagcgttcagtgtatttgttaaatttcataaagtttaaaaagttgaaaatgaaaaaggaattctacggtagttttaagtagaatttagttttaagaaaaattaacctctttttagctaacagcaataaaacgaagactgctgtgtatttctgtaatctgaaaaatctcgactttctcaaagggagcgctacataatgtatgatataatttatatcagaagaaaacatgtcctagaaatgtaaccctctttmttaggacttacatgtgctcagggaggttgaaaacaaccttgattatggaggatgcctccttagctggggattagctatccactgttcccttccagaaatcaaactaatttgtaaaactcaggactggctacataatttgtggggccccttgttaaaaaaattaagaatttgaacatggtgaccacagagcattaagccaagcacggcccagtgtgactgcgttggttgcccacccatgagctggccctggtgaaactctttattcatagctaagagtaaggttgtggtcacaaatgcaaatctaaaccgtgaaatgttactgctgccactaggcacctggagtttctgcttccttgattgttcttctgtttccaatgaggagtctgcatgtatttggtcatcaatgcaataatgttactaagaaatcctcccatgattgatttttcgtttgctaaagaggtagccaaatgtttgttcattagagtcatgggtactggagcaacctatttattcaggcattcattgaacaactatttactgagcatctgttwgatgcccggcattgctcgctccagggccacagctgtgaacaagatggagggtccctgcctttatgagcttatgagcttatgagccaaacacatagtcacaccggctcaggctatcacaatcytaagtggtacttaggaaagcacagggtgttaggggagcatgtgaccttgagacctaacctggttgaggggagagggactgttcagggaagacctgcttaaaaaatgatatttaaaataaggcctgggggcaggtatggtggctcacacctgtaatcctagcactttgggaggctgagatgggagaatcgcttgaggccaggactttgagaccagccaggtcaacatagcgagactcccatctctttttttgttttttttttttttgtaaaaataataataaaaaaaaggctgaaggattagtaggagttagtgaagtacattaggggataaacttagaggctgaaagagttgagatcaagagtaaaatatgtcttgggtcatttttaggattttggactttaatgtcagcatagtggaaacccactttttgtttgtttgtttgttgcagacagggtctcactctgttgcccaggttggaatgcagtggcaccatcttggctcactgcaacctccacctcccaggctcaggtgatcctcccacctcagcctcctgagtagctgggactacaggcacacgccactatgcctgagtaatttttgtatttttaatggagatggggttttgccatgttgcccaggctggtctcaaactcccgagctcaagcgatctgcccacattggcctcccagagtgctgggattacaggtgtaagccaccatccctggccactaaagtgtttttgatttgtggttgttttgtttgttgaagacagtgtctcactttgttgtccaggttggagtgcagtggctattcacaggtgagatcatagcacacttcagttgaactcctaggctcaagtgatcctcccacttcagcctctcaagtagttgagactataggcatgggctaccatatctgactagaagtagttttattttaaacccatcaagtcctgagtccttcatgttttctctaaattctacttaaaaattgaatatacttctttagttcatctctctcacattttctcaaaggcagatactgggccagatagcacttcctacattcttctcagaaatgttcttaggcagatccctgatatggtgaaatatcctctcaattttccttgttagggcaggcagtagtgttgctcacattcctccagttcattttctccagtttccaatgagatttttttgtttttgagacagtcttgctatgttgctcgggctggagtgcagtggctattcacaggagcaatcatagcacactgccatcaaactcctgggctcaagtgatcctcctgcctcagcctcccttgtagctgggactgcataggcactgctgtgcctgactctgatttgagtttttttttttttatttttttttagacggagccttgctctgtcacccagactggagtgcaatggtgcaatctcggctcactgcaacctctgccccaagtagctggaattagatgtgcgtcaccacacccagataatttttgtatttttagtagagacggggtttcagcatattggccaggctggtcttgaactcctgacctcaagtgatcctctcacctcggcctcccaaagtcctaggattacaggtgtgagccaccgcacctggcctaatttgagtttgtaaaatgatcgctgttgctgtgtagagaatagtttagagaggtaggtcctgctggcacgtttggtgtctttgtgcaaacccaagaaaggcttctattctgtgtggaccaattagaaaaaatgcaccactgtgtcccagctaggccaggtcaaaaggcttcagccccctgagccagacttgttacgcaggcacagcctgtgcaatcatgtggccaccctggggaggaggagggtggatgtgaacaaacagtgcttttgcagtcacccagtgatggcgtagcagcactggataacgcttaatgacaggtgaggattgagattgagtgagattgggtttgtagttaaaatcagcaagaaggtggtgattatttggatatggttgatggagagggaggtagcaaggatgattcaaaagtttctggcataaacaactgagtaggatgggatggtggaaccattatggtgattgagaacacaggaggaggagcgggttggcacgaggtgtgggagggaagataatgcctttttggatgtgtgttttgtttgtgagacatccaagtaaagatgaggagtagacagttgctactcctggaagagatctggggtggagatacatgtttgggagctgttgcatgtaagtattactgcataaaaagcactcatccaaagagggtgtagaatgagaaaagaaaagggctggacccgtagagtttgatcactgtatttggtagaggaagagaggcctgttaagggtactgagaagtgtgatattcatgcagggcagggaggaaatgaggggtctatgatgttttgttttgtttcagattgagatggaagaaatttaaacatgctctaatgctactgggattttgtttgttttgtttttgacaggatctctctccattgcccaggctggagtgcagtggcacaatcttagctcactgcaacctccaccctctggggctcatgccatcctctcacctcagccttcaagtagcaccaagggtgtacagcactacgcctggctaatttttgtattctttttctagagacgggtctcaccatctgtgttgtccaggctggtctcaaattcctgagctgaagcaatctgcccaccttggcttcccaaagtgtgggattataggcatgagccactgtgtctggccactactgggaattttctggtagagaggaagagcctaaagatgcaggagggtaaaataaatgataggaccagttttcagagagggtgagaacacagtgcagaatttggtctttgatggaaggacggagggagaggatggataaagatgctttagattttgggtccagaatcgtgaggactttttctgaaggaagtggcaaaaccattggctgagtttggggtgtgtctgtgtgtgcagtcagatatttcttcagccagcatttagtaagcattttctagtgccaagctttgtgtttggctccctggaaagtgttatgaatgatgattaccttgaagcttggccctgtacacctgaaatagccttgcaccactttttctacaaattgcttcctacctttgaccttacaggcttgttaactaaaggcagtaaatgctcagctgatcttttttttttttctttgagatggagtcttgctctgttgcccaggctggagtgcagtggcacgatctcagctcactgcaacctacgcctcccaggttcaagcgattctcctgcctcagcctcccaagtatctgggactacaggcacccgccaccgcgcccagctaattttttgtatttttagtagagatggggtttcaccgtgttagccaggatggtctcratctcctgacctmgtgatccacccgccttggcctcccaaagtgctgggattacaggcgtgagccacctcacccagcctcagctgatcttttgatgggcatcaaagccactaggggtgacagtcctggaggggaaggaccttttcaagccccttccacatcatgcaggttcatgttccatgtcatggttctcggtgttggctatacattaggaacacctgtggaacttttaaaaaaacctgacacccaggtcaaactctatatcaattccatcaaatctctggtagggggactcgttattggtcctttttgaaagctccctggtggttgcagtgtacaaaccagattgagagctacttgcctgttgagtggccctgagtccagttaaagccactcttctgtgttgagctccagcccctgctgcctggagtttactgcatttgtcagttgtgtggaacagaaaataaggctgagaccaattgtgtaggacagaaaacgaggttgagattatattggtatccaaagcaggaagcgaaggacagtcctttgggggtgttgaaaggaagtgtaagaacctctatttataattttataagcatttaaggtcaagaatgccagtggtccctctttcagtgtttttttttttttttttttttttttttttgagacagtcttgctctgtcgcccaggctggagtacagtggcacaatctcaggtcactgtaacctccacctcccaggttcaagcaattgtcctgcctcagccttctgagtagctgggattacaggcacatgccaccatgcctggctaattagtaaatacagggtctcaccatgttgaccaggctggtttcgaactccttaacctcaggtgatccgcctgcctgggcctcccgaagtgctgggattaygggcgtgagtcaccgcgcgccgaccctccttcagtcctgtgtcttgtacggtgaatgtggtttctaaggtggataaggaggcagggattccttgcctagctggagccctgctcacctggccatcaagcatactgtgagatgttgcaagttaggagctatagagtgtcatcgagttgtttaattttagaaacacaaaggctttaaattagagcatctcaggttagacttgtccctgagcgggtgataggtgtactgagatactgcatttctctcagccctctcccttaagccaagagagctgaagctgatgtttgatggttaccttttggtatatatgtcatggcatgagaaagaatcactgctttagtctgtagaagctttgtygtcctttgccatgccctggggagggagcaggaccatcctttgcacccatcagagcattcctagttcttttgttgccagatacgtaagagtggttgagtttacaggtgtctgcatctctctttagcagaaagatggggtttcaaatgtgttgcctctttccaattttgctatgcctatcagtagtcagatattttggggagaagggaaaaatccaaggtaaatgtgaggttcttacagtgaattacttttcaaaagaaatttctgctaccaaggggcatttgggaagtggctgtgtggagaagttttcattgtaatgcgaacatattgccaaaaaatattgtacatttgtgagttatcaaagctctcaaaggaaaaaaaattaaaaactgggaaacagaattgtcatactactttaattgaaaagwaacaatgagtttttaatccatttgttaactttatggggcacctgcagactattttgattagtctttacaattgattgaaacccactgggcaaatttcgccaaaaaactatgtgattggtggatagaggaaactaagtgtcaagatttaggtagcagagccaagagtgcactactataattgaagtaataagttttattgcatcctccaagtttttgaattatgatacatgtaatttattagtacaatagtgagagacaggactagctggatttcctaggcccactaagaatccctaagcctagctgggaargtaaccgcatccacctttaaacatggggcttgcaacttagctcacacccgaccaatcaggtagtgaagagagctcactaaaatgctaattaggcaaaaacaggaggtaaagaaatagccaatcatctattgcctgagagcacagcgggagggacaatgatcaggacataaacccaggcattccagccagcaacggctaccctctttgggtcccctccctttgtatgggagctctgtttccactctattaaatcttgcaactgcactctcttctggtccgtgtttgttacggcttgagctgagcttttgcttattgtccaccattgttctttgccgctgttgcagacctgccactgacttccatccctctggatcaggcagggtgtccgctgtgctcctgatccagcgaggcgcccattgccgctcccgatcgggctaaaggcttgccattgttcctgcacggctaagtgcctgggttcatcctaatcaagctgaacattagtcactgggttccacggttctcttccatgacccatggcttctaatagagctataacactcaccgcatggcccaagattccattccttggaatctgtgaggccaagaaccccaggtcagagaacatgaggcttgccaccattttggaagtggcctgccaccatcttgggagctctgggagcaaggaccccctggtaacagtagtagatacatagaatttttaaataaacatacttatattaagggtactcttagggtctatactaagaaattttgcatgcttgtcattaaaagctttgagtccaagtcctgtgtgtgtgtatatgactttgactctaagtcaagtgtaaatgtaactgtatagatatgccatgtatataatgtaaataaaatatatacatatatttataaataaggcagtctgaaaacttgcttgctggtgaactttaaaacagcctctttctcgtgatatacccctccagtttatccagtggaaaagaaaattactgctggattaaaaacaagtgcttaggctaggtgtggtacctcatgcctgtaatttcagcactttgggaggtcgaggcaggcagatcgcttgagcccaggagttcgagaccagcctgggcaatatggtaaaaccccatctctacataaaaatacagaaattagctgggtgtggtggtgtgcgtctgtagtcccagctactcaggaggctgagttgggaggattgcttaagcccaggagtcgaggctgtggtgaactgtgattgggccaccacattcaagcctgggtgacagagcaagaccctgtcccaaaaaaaaaaaaaaaaaaaaatgctcaaactaaagagtgataaatacattgtatacatgtcttgtttctcttgaaatgtgtacattttatcattccataatgtatacatctatcaaaacatcacattataccccataaatatatacaattattatttgtcaattaaaaattaatttttttttaaagccacttaatgtgcaatttgcagacgtcttctggttagtccaagattcagcgggggtcaggtgatcaagaatttcctgaaatcagcagctggatccaggaatgggcttaggacaccatcccagactttggggcccgccaggcttgtttgtcctcttcatgtaaatgcagaacttgcctctgaaatatgcctaatcctttcatataggtggagcccctgatctcatccattgtctacacatttctcacatctgttatgctaaccaacacagtccttgtattcaccttgtgaggatctggttctcacactacttatgctaattaacaaaacctctggtttgcaattaaaaatcctgaagcacatgctatatctgctgctggagtgcccaccaccatggctggctgrtttttgtatttttagtagagacggggtttcaccacgttggccagggtggtctagaattcctgacctcagatgatttgcccacctcggcctcctaaagtgctgggattacaggtgtgagccactgtgccctgccacacttgtctgtctttatgcctttgtttcttgtaatttatgggaccacagactccacccctatactgaagacctagtaattgctcccagaattgctcccaggaatgtgctcctgcctggggcgcttgacttccacaaaccccagggtatagataaaaacccgtgcatgtatgtctcactgctatgcagaagtgtttttcaagtcagaaatagacagcccaccaattttgttgttgattacttgtggcagaaaacttatgagttccctgaaaataagaggcatggctataaaaatacaggatttaaaaaaacatgtataagtggaaattagtacctttaacataagtgttttccaaagacatttctgaccattttgaggcatgtcctctgtgctgtattctcctattaggaaagacaccagtttttgatggtagatgtgattttgcagcatgtcagaagttagcattatgaggtagattggtcatgctcagtaatattattttgggtcaaaataagatgtaaatttttttttcttttgagaccagtctcgctttgttgcccargctggagtgcagtggcatgatcacagctcactgctgcttctccccagtcagctcaactggttctcccacatcagcctcccgtaaatattttttaaaaatggactaggggctgggcatggtggctcagcctgtaatgccagcactttggcaggctaaggctggcagatcacttgaggtcaggagttcgagaccagcctggccaacatgatgaaacctcgtccctgctaaaaattaaaaaaaatagccaggtgtggtggcgttcgcctgtaatcccagctactcaggaggctgaggtgggagaatcacttgaacccgaacccgggaggcggaggatgcagtgagtcaagatcgcacctctgtacttcagcctgggcaacagagcgagactttgtctcaaagaaaaaaaggaaatgagaaaagagaatgtgtgactgacaccacaaagaaatgtcagatgtctcttttggggttctgtgggtggccctccctcccaaaaaagtagaattgagtgaagggaatgcagtagagcgtgaaagaacacatacccacaagggtgaagctgcaggctctggttaaaggcagctttccactagatcttgacccttatgccccagggcctcagctttttcttgagttacagaggagggtgcaacttggggctagatggacttttttgttatggacttgccatatgctcttcttgtaagttttctttgtcatgtaagtttgagaaatgctgaataccatgtctctgtctttaaatatttacagtagacctgactgtcttaagggctaagaaataaggagccaaaccagcaacagagaatcttgtctttcttttcttttcttttcttttctttttttttttttttttttgagatggagtctcgctctgtcacccaggctggagtgcaatggcgtgatctcagctcactgcaacttctgcctcccagattcaagtaattcccctgcctcatattccggagtagctgggattacaggcgcctgccaccatggctggctaatttttgtatttttagaagagacggggtttcaccacgtwggccggggtggtctagaattcctgacctcagatgatttgcccacctcggcctcctaaagtgctgggattacaggtgtgagccactgtgccctgcgacacttgtctgtctttacgtctttgtttcttgtaatttatgggaccacagactccacccctagcctgaagacctagtaattgctcccagagctgctgtttccagcaacactagatgcttcctgaagtttctttcagctctacaatggatgcattgttctaaaaatagtttctaactatattgaccaagcctataatttcctccagaaacctcagcatataacctctgagtgaattcctggagagcagggagcatgtattatttatgtttgtatttttctccccagagcctaggaatctattttgtataatagattctcagtatagaattgagtatattgaagtatttgttagtaaactggaaatatggattttcatttttgaagtctgaaaaagttacccttagacatgagctcagatttgaacaaaagtcaaaaaagggaaaataatgaataataatacattgccaatattaagggctcattatttgtcaaatacagtataaacatgttacaagttagctcacttactctttataaaaactctaaggtatatatgataatttccccaatgaaattgtttaaagttaattagttttttaaaaaaacaacaaaaacgctgaagctaggagaggctaagaatttgctgaagtttgggttggggaatgatgactcccaggtctcctgctggggcagtmcggttggagagctgaaatcattgccactgtactcttctgtgtctcagatgtaaacaaacccaagagaaaatattcaggactgggcacagtggctcacacctatcatcccagcactttaggaggcctaggtggatcacttgagcccaggagttcaagaccagcctgggcaacagtgcaagaccttgcctctacaaaaaatataaaaattagccaggcatggtggcatgtgcctgtactcccagctacccaggaggctgaggtagaaggatcgctttgaacctgggaagtcgaggctgtagtaagctttggttacgccactgcactctagcttgggtaacagagcgataccctgtctcagaaaaagaaagaaaagaaaagattcagccactagtaatcaaagaaatcacaaagtgaaaccttgatgatgtaccattttacagttgcaatatcggcaaaaataattatacagtatattcatatacagtcatttaacattatatataattaaaatgtatagtaaatgtagagaaaatggtatccagatgttactggggacagtataagtatcgtttatttggaaggcagacaagaggcacagaaacttacaagtagtgacctaaaatccttattcctgggaattccaaggaagtcctttaaaagcaaagcaaaaacaaagctatgaatatacaaagctattcatagttcatatttataacagtataatttggaaatacccttaatatccaaccataagataaactaattgtgacaaaaacaaatgatattttgatagccaataaatcaaaaaagaatagaaaatgaaatccctgctgctattacatctgagcaaaaatataagtgtattgtgcaatgttacgtaccagaagagaacatggaacgtgaacgcagaggatgtgtaagtgaagttagattgtcaatggatttttgtttttgggaaattatatgctttgcaaatatatttaattggagcttattttggagaactgtcaccattttatcccagttggcaatttttaaagaaaattactgaagtgaacataaaaaatggaaacatttcagaagtgtttgaataaacatcccctctscaaaaaagaagatcctcactgaatagttttgggtgtgtgcttctcagtttttccagtgcatgtttataatatatttatctggaggctggtttttttgtttgttttgagacggagtctcgctccgttgcccaggctggagtgcagtggcacgatctcggttcaagcgattctcctgcctcagcctcttgagtagctgggattacaggtgcccgccaccacgcccggctttctctgaacatactgaggtgcagctcatctttgaataccacatcatctcacatacctcttttcatgtcattacaatgagaattacttcattcttggctttagtgctaatttcaaattcaataactgtaccaaaatataatttagatgatgtggaaatggagaataaagattgccgctcaggtttatgaagctgtttaaagggcacattcacagcttagatcacaaatcagtccctgagggttgaagaggttgctctgatgtgtcttaacactgaagcctccaaaaagagaatctgtaacattcatattcgcaggaagatttgggrgattccagagctcctctctggaaaagactatgagctataaggcacacttaacacaaagcatccaagatgctgccctacattttttgggagaaaggaagtggattttgtaatatttggacatttgatgttttttatttttattttttgagttcatgctaattgaatagacccacggagtagtgtgggagacaagcctgagacttgaccgaggccactaagggctctccaaagcacccacatggatagcttcacggagacagagtgatgtgggattcagtgctgaagtgagagacgacgataattcctgtttattgagcatgtgctgtgtgtaccagtcactgtgcttggcactttacagattacttaaacatcactgaacaaatgagaggagtcattaccatatctccatttttcagatgaggaaactaaggctcagagaggttaagcaacttgcggaaaccatgcatttaggaagtaactaacataggctatgtcttcacttctgtttgacttcacacttctgttttgctccgtggcctccaacagtgaatgatgttgatttcaaagaggggcaatcattgtggtttgggaaaggaccagaggaaggagttgagctggattttgaacatgtagaggaaattggggagacagtgctttttatttttgctaatggttagccttttgccatctggaataaggatacttaatctgacagtcacatttagcaaactgaaaatccagatttgagggctatctctaaaaacaaggaatctagaatttgggaactagcatttctaagaccaagccatttaggaggctcaagtacttaaaattgggaccgttcagaaaacccaagacgtgtggcccatgtgacacacaggatgggtgacctcagggccaaaaacccagggccacctaatctttaagaggggacaaaatgaactttaattttccaatccaaaattttgtttccataaaaccgtggtgttctatttggtattataaactgcctacttttagatttgaaaaaaaaaaagagaaaaagaaaaaagtccattactcttcagtgtggaatttcaaagtagacaatgagatcttttattctcatttttggcctgcaatgataatgaggttgaagattgctatttaaaaaaaaaaacactgtttgttttctgtatgtatatataaacagatatttctgctcaagcccatcaaagtcagcctctgcaaatgaagtctcctgcctgagaggacaggttttttccatgtaaaactgtgtttcgctgttacttatactttaagcaaattggggtaacagtaaatgtgcacaggcagtcggaaacacactggccttttggagaaacttggacaacctttgttcttttatctctaaactttcatgacactaaactcaaaaaggttatttttcagacaacctgcggtcatacctacttatatttcccttattctaatatattgktcttcactgtcttctcttaaattaattttatttatttatttatttgtttagacagagtcttactctgtcaccaggctggagtgtagtggtgcaatcttggctcacgtttgaaacctctgcctcccaggctcaagcgagtctcgtgcctcagcgtcccgagtagctgagattgcaggtgtgcaccaccacgcctggctaatttttgtatttttagtacagacggggtttcaccatgttggccgggctggtctcgaaatccttgcctcatgtgatctgcctgccttggccttccaaagtgctgggattacaggcacgagccactgcgcccagcctcttaaattaatttttaaaagcctcttctggggcctggagtggtggctcacgcctgtaatcccagcactttgggaggccgaggcgggtggatcacgaggtcaggagtttgagaccagccttgccaacatggtgaaaccccgtctctattaaaaatacaaaaattagctaggcatggtggtgcgtgcctgtagtcccagctactcaggaggctgaggcaggagaattgcttgaacctgggaggcagaggttgcagtgagcctagatcatgccactgcactctagcctgggcgacagagtgagactctgtctccaaaaaaaaaaagcctcttccatgtaacattcttcatctcattcacttacctgctctgaaggtgcatctagtcacgtcgtagtaagacagctgcatcttttaaaatcataacaaagagactgaaaactcccaaggttaaatctgaggaaattcagtgcattaagcatatttgcactgttgtgcagccatctcaccctagccattcctagaacttttcattatcccaaacagaaactgtactcatgaaaacagtagctccccattcttccctcccccagctctggaaacaaccatgctactttctgcctctgcgcatttgastactctaggtacctctgtaagtggaatcctagtgagaggtgaagccagctgggcttctgggttgagtggggacttggagaacttttgtgtctagttaaaggattgtaaatgcaccratcagcgctctgtgtctagctcaaagattgtaaacgcaccaatcagcactctgtaaaaatgcaccaatcagcgctttgtaaaatggaccaatcagcactctgtaaaatggaccaatcagtgctctgtaaaatggaccaatcagcaggatgtgggtggggacaaataaaggaataaaagctggccatcccagcgagtagcggcaacctgctcaggtayccttccatgtagtggaaacttggttcttttgctcttcacaataaatcttgctgttggtcactctttgcgtccgcactacctttatgagctgagagggtctgtggcttcatttgtgaagtcagagagactatgaacccactgagaggaacaaagaactccgggcatgccatctttaagagctgtaacgctcactgcgaaggtctgcggcttcattcctgaggtcagggagaccacgaacccacgggaaggaagaaactcaggacacatctgarcatctgaaggaacaaactccagatgcaycatctttaagagctgtaatactcaccgggagggtccgcagcttcattcttggtgagtaagacccagaacccaccagaaggaataaatttcagacacaatagcatatctgttttattgtgtctgacttacttgagttagcataatgccttcaggattcattcatgttgtaccctaagccagaatttcattcctttttaagaccaaatactgatccgttgtatggatataccasatcttgtttatcacgtgctttttcttaaccattaggrtggtcttcattcagatacaatgcaatcatggacattcctttggctttcaagggaattaatgaaatttgtatgggtaaagccatatatgtatttctagcaatacattttatttatctatttttattgtattttaagttctagggtacatgtgcacaaygtgcaggtttgttacatatgtatacatgtgccatgttggtgggctgcacccattaacttgtcatttacattaggtatawctcctaatgctatccatcccccttccccccaccccacaacaggccctggtgtgtgatgtcccccttcctgtgtccaagtgttctcattgctcaattctcacctatgagtgagaacatgcgatgtttggttttttgtccttgcgatagtttgctgagaatgatggtttccagcttcatccatgtccctacaaaggacatgaactcatccttttttatggctgcatagtagtctatggtgtatatgtgccacatttcttaatccagtctatcattgttggacatttgggttggttccaagtctttgctattgtgaatagtgccgcaataaacctacrtgtgcatgtgtctttctttataggagcatgatttataatcctttgggtatatacccagtaatgggatggctgggtcaagtggtatttctagttctagatccctgaggaatcgccacactgtcttccacaatggttgaaccagtttacagtcccaccaacagtgtaaaagtgttcctatttctccacatcctctccagcacctgttgttacctgactttttaatgattgccattctaactggtgtgagatggtatctcattgcagttttgatttgcatttctctgatggccagtgatgatgagcattttttcatatgcctgttggctgcataaatgtcttcttttgagaagtgtctgttcatatccttcgcccacttgttgatggggttgtttgtttttgtttgtaaatttgtttgagttagattctggatattagccgtttgtcagatgagtagattgcaaaaattttctcccattctgtaggttggttcttcactctgatggtagtttcttttgctgtgcagaagctctttagtttaattagatcccatttgtcaattttggcttttgttgccattgcttttggtgttttagacatgaagtccttgcccatgcctgtgtcctgaatggtattgcctaggttttcttctagggtttttatggttttaggtctaacatttaattctttaatccatcttgaattaatttttgtataaggtgtaaggaagggatccagtttcagctttctacatatggctagccagttttcccagcactatttgttaaatagggaatcctttccccatttcttgtttttgtcaggtttgtcaaagacaagatagttgtagatgtgtggtattatttctgagggctctgttctgttccattggtctatatctctgttttggtaccagtaccatgctgytttggttactgtagccttgtagcatagtttgaagtcaggtagtgtgatgcctccagctttgttcttttggcttaggattgacttggcaatgcgggctcttttttggttccatatgaactttaaagtagttttttccaattctgtgaaaaaaagtcattggtagcttgatgggaatggcattgaatctataaattaccttgggcagtatggccattttcacgatattgattcttttcctcctgacaaatttacagttttccgctttgtggcatasactgagggtgtatttcatctttcctgcaaagtcaataggcagaaagggtaggtgtcagttcttcccccaggctgtcagctggtgtgtccctggtgtgcctttgggagagagagcatggggaaagaggatgctttttcttctgttaacgtgctaataaataytattttcattaatgagtgaaatgcaagggttatttaaatgacattttgtctcaaagtagtwtaatgattacaagaaaaaaattctgtagaacttttcatgtcattaattcaggcatggagaactgatattttttcttctgtatgtaaactacacagatgaaacctaattttatttaatttcatctaacttagaggcatcaaatttcattatgtattttaacattttttatataattataaaatatgttttaatataggattactcagaaaaaaaaaatagctgggcgtggtgtctcacgcctgtaatcccagcactttgggaggccaaggtgggaggattgcttgaggccaggagttcgaaaccagcctggctaacatggtgaaaccccatgtctactaaaaatacaaaaattagccagattggtggcgtgtgcctgtaatcccagctactcaggaggctgaggttgcagtaagctgggattgtgcgactgcactccagcctgggcaacagagcaagactccgtctcaaaataaataaatacatatatatatatgggattaaatggtgagtggaattgtaaaaagaaaataggaatggagaaaaggaaattcctgtaccccttctgcttgatcaagactttaggacaagcttgtccaactcactgccaaggatggctttgaattctgcctgatatacatttgtaaactttaatacatgagattttttttgtgatttttttttttttaagctcatcagctattgttagtgttagtgaattttatgtgtggccaaaaacacttcttctttttccagggaataaggcccagggaatccaaaagattgaacacccctgctttagaacattgatttgtatcagttatatataaaagctgattagccatctttataggtcttaattttatcactacctgtaaggctttttaaaaatgtagttcttattttaattagagttataaatgcacgtgatttaaaaaagaagatatttccacaagcgtgtcaagaactacgaagggtctgagattttaccctacttgaaagttaacaagcctgttaacaattttcatggatcctggcaaaagacacagactcctgggccagagatgaagtgccatttatgacctatattaagcagtagcagaggatcagcatttttcttttaggttgctagagccttaattcccacagggcagtatgaagagggccaagtgataactacaaacagtgggttgcattatgggaaagaaaccctgagcttagagaagccaaatcttttatagtgggcagtaagcatgctgtgctttgccccaggtaacattgtctttattatattgtcagtaagaaggtttgccctttgctagggagggaaacaccatctctgtctttctaggctgtttgctataaaaatagccttgaaaaaattatctggaacaaaaagacagtgcctcacttgcaagatgtacagaaatgcaagccacccatggcgaattgcctcccaacaaagagttgtacttacgaaaaacagcatgcttctcccaatggccccccaaatctcctactccctaaaactccattgtccattagaaatataatgtgagaaataaaattttctagtagcagcattaaaaaaaaaagaatcagggctgggcgtggtggctccatgcctgtgatcccagcactttgggaggctgaggcgggcggatcacgaggtcaggagatcgagaccatcctggctaacacggtgaaaccctgtctctactaaaaatacaaaaaaaaattagccgggcgtggtggcaggcgcctgtagtcccagctactcaggaggctgaggcaggagaatggygtgaacccaggaggcagagcttgcagtgagccaagattgcaccactgcacttcagcctgggcaacagagggagactccatctcaaaaaaaaaagaactggtaaaatctttttttatccttttgagacagggtcttgctctcttacccaggctggagtgcagtggtgtgatcatggctcattgcagcctcaatctcctgggttcaggtgatcctcccacctcagcctcctgggtagctgagactacaggcatgcgccaccacaccgggctaattttttttttttttttttttggtagagatgggagtctcactgtgttgcccaggctggtctcraactcctggactcaagtgatcctcctgcctcagcttcccaaggtgctgggattataggtgtgagccactgcatctggccaaattaacagtatattatctttaatctagtatatcaaaattttataatgttaatatgtaaacagtataaaaaagtgaaatattgaaatgatacatgtgtctaatatttgtattacaatgtaataatagtatcttacatgatgtsattaaagtgaaatatagtcctaccgaaacagtaatgtgtttaagggaaagacatttaatactgcttcaagttttaaaatgtaaataattaaaattttaaaaaagtatttgttgagactagcctcatttcaagtgctcagtagttgcawgtgactactagctaacattctctactgcatagccctgaagttaaccattttcaactttttacagatttctttaggtgtgtattttcatatctctaaataataatgcttatatggtttctaaattattcagctttaagttctttctactattaaggaggggttttttttttattgttttttgttttaatagagacagggtctttctctatcacccagtctagagtgcagtggtgcaatcatagctcaccgcagcctcgaactcctgggctcaagtgatcctcccatctcagccttctgagtagctgggtctacaggcgtgcaccaccacacccagctaatttttaaatttttcttgtttttgtagagatggtatctcaccattttacttaggctagtctcaaactcttgggctcaagtgatcttccaacctcagcctcccaaagtgctacgataacaggcacaagccaccacacctgaccattaaggagggtttaattctctttcaaccaaaaccctccaccacacttgcactcatttcctggctgtctctcatccccaaagtcaatgattctgaaaaactttttgtcgtgtgtgtgtatttttaaatatgagatggggtcttgctatgttgattcaggttgttccaggctgatctggaactcttgggctcaagtgttcttccygcctcaaccttccaagtagctgggatcgtaagtgtgtgccaccatgcctggcctgaaaacttttttatttcagcactgtttatactttaaaaaaatcactgaggatcacaaagagcttttgtttatgtgggttatatctattggtatatattctatcagaaagtaaaactgaggctggacatggtggctcacgcctgtaatcctagcactttgggaggccaaggcaggaggcttgcttgaggccaggaattcaagatcaagtttaagtccagcttgggcatcatagtgagaccctatctmtacaaaaataagcagccaggtgcacctgtggttgcagctacttgagaggctaaggtggwaggatccccaggagtttgagcctgcagtgagccaagataatgacattgtactacagactgggtgatggattgagaccctgtcttaaaaaaaaaaaaaagagagagaaagcaaaaaacttaagtattacttctgtgaaaataacaatgataagccctttattttaacataagtaatttcttgtgaaaatcttttcaraaaaattggaagaataacagtgtttttgtatttttgcaaatctcttttactgtttgacttaatagaaaatacctgaattctgatacttctgcacttattctgttgaaaacaaacacatcatgtagaccctggaaaactgcgccgtatataacacagagggagtgaaaagggtgcagaatggcctagtattattatgaaaatagttttgagaccctctgtatattgtcatgctttttgtttgaccacaactcaatgtttatattactatarccatgtataaactgagcatagcataccatgattgctttttttttttttttttttctgagatggartctcactctgttacccaggctggagtgcagtggcaccattttgggtcactgcaacctccgcctcccagattcaagtgattctcctgcctcagcctccagagtagctgggactacagackcgtgccaccacacccagctaatttttgtatttttagtaaacacggggtttcaccatgttggccaggcttgtctcaaactccagacctcatgatccgcccaccttggcctcccaaagtgctgggattactggcgtgagccgccgcgcccgaccatgatttcttttattgtacrtacttgttggcatattttactcacttgtactcaatggcattttttcatattgtttgtttattatatgtacttttatgttttttggagatggagtctcactccgtcacccaggctggagtgcagtggtgctatctcggctcacttcaacctccacctcccaggttcaagtgattatcctgccttagcctcccaagcacctgggattatgggcgcatgccaccacacccggctaattttttgtgtttttagtagagacagggttttgccgagttggccagcctggtcttgaactcctgacctcaagtgatcagcttgcctcggcctcccaaagtgctgggaggcctgcattttacttatttaattctggcctgcacctggcctgcattttacttatttaattctgaactctaccttagttatcaaaatctcttctaaatccattaatttacagcaggggttctctgtttctctcaaatattttctggagctgtttacttgctttaattaaggactggtttcttcctagtactcccacacaaccatcatcttgggatctgtctttgtaatcctaggatttctgttgcctctcatttatattgggtcccttgattactggatcctgtctcttccttttttttttttgagacaaggtctcactctgctgtcacccaggctgaagtgcagtggctcagtctcactcattgcaacctccgcctcccaggttcaagtgattctcctgcctcagcctcccaagtagctgggattacaggtgygcgccaccacatctggttaatttttgtattttcagtagagatgaggtttcgccatatcggccaggctggcctgaactccagacctcaagtgatctgcctgcctcggcctcccaaagtgctgggattataggcgtgagccactgtgcctggccagatcctgtctttttcttaatgggcagtagagcrcaaacttgggggccagattatgtgrgtttgaagcctagctcttctgcttactagccatatgacgttcgaagagctatttaacctctttatgcctcagtttccttatctrgaaaataatactttctatgtagcattctcctgaagattctatgtgttaatacgggtaagccatttagaagagttccagagcatattaagcactccaggttagtgatgttgttaatgctcttacagttgctggtgaatttcatcttttagtggcatacttctcatagtaacctgctgagaaaggtgcatgtgactttgctgtataaaaatgcctttctgttacatcacatttgaccaatagcttggctggttatttagaattccaagttgaaaacagttttccttcagaatttggaaagcattgctctattttagtctacctttcagcagaaggtgggctgtaaattgcacggtctcagctttccccatagcctgctttaggattcagcttcctgagatctccaagtcagttatcattcactacctctaattttcaaatttttgatgctactacttcagttatattctttgtgtttgagggacttagccttttttgaaaaattgcttattatcattttatcttaaacagagtatgcttttagatatcttcagttcctgcaagtttgtggggaactagaaacagaactcttttctggcagtcaaaagagaagaaagaatagggctgggtgcagtggctcatgcctacaatcctagcacttcgggaggcagaggtgggtggatcacttgaggtcaggagttcgagaccagcctggccacaatggtgagaccctcatctctacttaaaacaaacaaacaaacaaacaaacaaaactagatctaaatttttagcagaagagcttggccggttcctcatggccagccacagttagggtctcagcagtttgttcagtgtgagaccacagaggagctaagcagctcactgcagggagtcacagacaggtatcagagactaccctccaagcagggcaaggttgtggtggggacagagaccaaataccctaagatgagatgaggctatgaaagtgcaattggccagaaagaactccaccctgaatggcaaggccttcgccttgtgatcttacctgtttcctgctccttyccttgacctaccttgggtggcgtttgggctccctcacttgggtcacagtcctccgagatactggcatggctttgacatcaaacacagtagttggtattttgctccagtcacagcagcctctgggacactgaacagtagtccttggagagtcagtgaaattgataagtattcactgggactagaagccaactgaacttagaccatgcttcctgctgccgaagggcaataggttggtgacccaggtttatccatcagcggtttgtttatgcatagatgtgtgcatatgcttacgtgcatatgtaggcatgagccaccgygcccagccagttttgtcttcttgaagatgyctctcccagggccttctgacaggttccagtctgctgtggttgtctgttggcttgttatatggcctagatgttccttgacctggggattctcttttttttcttcttcggttagatctcctttctgattcttacatcctcccctttcttggttaataatgcatacatatatttgagacagggtctcactcctgttgcctaggctggagtgcagtggtgcgatcatggcttactgcagccttgacctcctgggctcaggtgatcctcccacctcagtcccctgagtagctgggactacaggtgcacaccaccacacgcagataatttcatattttttgtagagacagagtctctccgtgttgcccaggctggtcttgaactcctaggctcaggcgatccactcgcctccacctcccaaagtgctaggatcagaggcatgagccatggcacctgtctaataattattgaatataactcattctccagtagctggacagtagctggaatacattttgcttctgaatccatttgatgtggcttagtttcccccctcccctgaaagtatatgcagtattcttcctcccattgttctgacatttcatgattaatgaatacatcttggtgtgggtctattgtcatccactgtgctgataccctagaagattttgcaatctagaaaccattctttcattttgggaaatactcttgaattatttagttgacgacttctttccttttttctttttcttctgttttctttttctggagctcttgttattcgtatggtaggtctcctgatctagttctctaaattactgtatgttttgttttattttctcatccctcagtttgtctatttgcttaactcgctgygagtgtttctcactttatcttccaacccttttattgagtttctctatttttggagctggagtcttgctctgttgctcagggtggagtgcaatggcacagtctcsgctcactacaacctcttcctcctgggttcaagcgattgttctgtctcagcctcccaagtagctgggattacaggcacacaccaccatgccccgctaatttttgtacttttagtagaaacagggtttcatcatgttggccaggctggtcccaaactcatgccttaggtgatctgtctgcctcgtcctcccaaagttctgggattacaggcctgagccactgtgcccagcctawgccagcgcacctggccgagtttttcatttttgctatcatgttaataattttcaagggctctttttatttgctagttctatttatgtggtttcctgtttgttctagtcatctattgctatgaggcaaaccacttcaaatgtagtaggatacaacaatatcattttatttttttgctcacacattctgttggtcaagaattcggtgaagactggagttactaggggctgtagtcatctgatggcttcttcactcacatgtcagacatctggctgggattacttgaaaacagggttcagctggaacagttgactaaggtacctatatctggtctctccatgtggcttcttacagcatggaagctggttctaaaagggagcctctatctagagagcacatttttcaagacaactgggcggaagctgcatggttttacatgaccttgccttgatggtgacatagtatttcttttgccaaactttattggtcaaaccataatcataatgtgtctggagttggttccttctggagggttcttggtctcactgactttaaaaatgaagcygcagacctttgcagtgagtgttacagctcttaaaggtggtgtggacccaaagagtgagcagcagcaagatttattgtgaagagcaaaagaacaaagcttccacaggcgtggaaagagaccccagcgggttgccactgctggctcaggtgtccagctttttattcctttatttggacccgcccatgtcctgctgattggtccgttttacagaatgctgattggtccattttacacagtgctgattggtctatttttacagaatgctgattggtgcatttacaatcctctagctagacacagagcactgatgggtgtttttacaatcctctagctasacagaaaagttctccaagtccccacttgacccaggaagtccagctggcttcacctctcaatcccccctctaaacaggacaccccaactgctgttgggaattgggtgatgaccgctctagctaattcctgctggataagagctaagaagaggccctgcagttgtagtgtcctccagaggggaactctttaggccagtcaaaaggccagygggtcagtccaggggtcctcagtagaagttgttagttgagctcatttggggttccatttgtaagaycatctgtagcttgatggcctcaatcctagaggaaacaaatttgacaaggaggttaaaaatacagggcccgaaggcaagtaatagcaagatggctgtcatgggacctagaaaggggagaagtcatgtccaccaactccagaggttggtataagagtttgaaaggcgttgtctgatttcagaagccttttcctctaagtgccgggcagcatctcgtactatccctgactggttagtrtaaaagcaacactctttccctaagaaggtgcaaagtcctcctttctcagcagtgaggaggtctaggcctcagcggttttggagagtcactgctgccaaagagtctatttgggattgtagttactatccttactggatagattttttatttcttgcaaactgtatgagaaatcctttgagagtgtgtggtagtaatgaagtagataaacytgatattctggttcctgtagcagtggccatttctaaccctatacgtagaggtattagttgtatggccctgtgctgacagacttgagctttgaggggcactgacaaggtctgatttccacaagattagaagttaggataatacacgttacactgttaacgtttagcgaactttacttttgttgaaaatcttgtaagtttgggattttaatttttgtttgctattaataaaaccttgttcagtccatagtaacttagaattggtatagatggctccttcctgattctgtaagtactttaaggtttggctgagtgcaaagaactcacttgtttgagcagaccaattattaggcaagtttcctaaytgcaagagttttcttatcacttactgaatacccattgtgtcttttcctgttctgaagggagttcctcctaggtcagacctttgtatgataattagttaagatttagatcccctgtaaggaaacctgctgggttaaggatttttgatcagaaggctgtgagttgtcagtggyctcagtgcttttgggctacgcccttgtttatactgacaacaaggtggtactggagtgttacagtgttacagggaagaccttcaattatcaattataggtttttaatttaccctggcttttaaaggaatagattacacttttttctttactacttccatctctctttctttctctttgacttcttctttgtctctctctttttgactccctctttgtctctcttcctctctctctttgactttgtctctttctctctctgactccctctttgtctctgtctcttcctctctctctctctctgactttctctttctctctttccttactgctggtctttccctgcctctgccagctgcttatgctgctgttctcctctccttcccctttttgatggcttcggcagtgtaagactgccacctctttgggtttttgcactgcatgcaataactccatgatttccttgtggtatttaatgggtgtccccccagaggttaggaactccctttctttccatattgcagcatgggcatgtaggattagataagcatacttgctatctgtatacaaatttgttgtttttccctttcccagttttaaggctcgggtaagtgccactggttctgctaactgggcgctggtccctgggggaagaggcttactttcaagtactgttacatcactaactgtggcataacctgcccttcatatcccattctccacaaatgaacatccattggtatataggttaaggtcaggattagctaaggggacttctaagagatcctcttgggcagcataagtstggacaataatttgttggcagtcatgctcaactggttccccatcctctgggagaaaagtgrcagggttgagggctgcacacgtgcatatttgragcacyggtccctcaaggagtagcgcctggtatctaagtaggcagttgtctgatagccatgaacttcctttggcacctaatatgccatttacatcatgagtagtccagacagtgagatcctttccttgtattattttgatagcctctgacactaagacagccaccgccgcaactatctgtaaacagtgaggccagccttttgctactgtatcaatttccttacttaggtatgccactggttgtggggttgtcccatgagtctgagtaaggacgctaagagctattcctgctctgtctgtgatgtataaagagaagttttgtcctgtgggaaggcttaaggctggagcttgagtttgttccttccaatgcccagacttcagggttgattccctcctcaagcagcggacaacaaatgggtaacttgttccccatattcatgtagataatagctccagctatggataatatgtccctccctaataaaggtatgggactttcaggcataacaagaaaggcatgtggaaagagcaaagtctcccaattacaactgaggaggtgggagaaatacctggttacaggccatcccaggattcctcagatggtaagggaccttgaggacagctgtccgggacaggagattaacacgagaaagccgcaccagtgtccaggaggaagtcaatttcctggccctcagtggttaaatgtacccggggctcagtgagggtgatgacatgagctggtgcttgccccgggcaccctcagtccttttgttggattatctggttggcggcttctggcccagagaaactttgtgccttccagtgatttccgcggcatagtggacacagaygagggggcagcttgtttctcgttggacgatcttttttaaagtatttctgcaaaccacactgataacaagccctactgggtgattggcctgctccattttctgtcctctctaaaccagcaaggtttgtttgtctgagagccatgactaaggctgyggcctttctctgatcccgcttttccttttaggcctgttcctcttggtccctattatagaataccgaggttgcgaggtttaataatgtctccagattttgttcagggcccaggactcacttttggagctttctcctgacatctgcagctgattgggtaataaacttatcttttaggatcaattgaccctcgagggagtcgggtgacaggggagtatattttcttaaggcctcccgtagccgcttgaggaaggcagaaggattctcttccttgccctgagttatggtggacatcattgaataattcatgggctttttcctaattctccttcatccttctagaacacaggtcagcagacgtttacgactccagtccccatgatctgagttgaggtcccagtgggatccatacaggggatggcttgctgaccggtagggaatttgtccctttcktcagctgtcattctatcatttacttgactaagataccaggtatctccaaactctcgggctgcagctgaagccacattcctttcatttaatggcccagagtttgatctaacaatagcatgacatctctccaagtgagatcaaaggtttgccctagaccctgcaggacatctrtatacctatcargatcatctgaaaacttccccaggtctgccttgatctgctttaagtcagagagggagaaggggacatgtacctgggttgggccaaattcccctccccctacagcttgaaggggacataactgatagcctgggggtttttgtggtcctttggagatttctttgcttgtttccttctgggcgggggagattagaggaggctcatcattaataggaaggagagctatagggaggctaggatatggagataagctgagaggtcatcctgtgggatrtaaattgcaagctttgcatagttgtggattctccttcaatgaaaagaaagcttggacataaggtatttcactccacttgccttcccttttacagaaaatgtcaagctgcaggatagtattgtaatttctacttccctcaggtggacatttttccccatcagagagagaatattggggccaggccatagtgcagaaaaaaataagccacttctttttcagsgtttgcaggtcagattgtcccagtggcttaggatgcatttcaagggtgagcctgttgatgcctgagtgtttcccatctgaaagaaaaaaccacccgcggttttggtttgttccccgccccccaccaagaacccataacggtccctggaccctgctgattggaatagttgcactcaccgacacagcagcagaaacactagttttcctgctagaccacaaggatgaccgaggaaggtcrgatttagtggcccttgctgacgcattcttgaaaacctgcacccttgcstattctcctgggccacaaagaggactgagaaaaatcggatttagtgacccttaccaacacattcttgaaaacctgttagagtcctaagcattctcctgttagtattgggaccttacccctgtcccataaagatgttatgcccccaaaatgaagtggagggccataccctgagggagggaagggatctccagggttggaagagtgacacattttgttctcacttctcatcatatgaataggaaggatatcatgtctgaggctccccatatcctagcttcaggagtagcttttgttaggcctgctagtctgagaaataattttgrcaaaaattatttctttctgattggtgagcccaggtgcctaaagaagggaacagagtcctgaagtttatactagaaatcattcttataggaraaactagaaaagcaccagagacagggagtggtttttataatagggactagcctcggagaagagagcaagaagtttgtctgacaggctttaggagccaggaggcaagggtcaggatagataggatagatgggcgagtctcacttgggtgatatgacttggaggagagttcygctcttggctacagggtcagccaactttctgtcaggaccccggagctgaatggctttcctctctgtcaaccctgggctcagcctggaagtacaggaaaagcggaagctgttttcaggcaaaccaacactcccaactccaaagagttgggggttgttaggtagccatttcccagaaaacctgacacccgtatctttagtccggcagccgcactagtcgcttttaactggccgataggtgcccagtatttagccaccraattctaaggaaaaataggacagaatagcaagcgaaaggggtccgatggtactcactgcttggtgatggtccarggtcaccaagatgtgtccagcattggttccttctggtggattcttggtctcgctgaccaagaataaagccgcggacctttgcagtgartgttacagctcttaaagatggtgtgtccagagtttgttccttcagatgtgtctggagtctcttctttccattgagttcatggtctcgctgacttcatgagtgaagccgcagacctttgcggtgagtgttacacctcttaaaggtggtggggacccaaagagtgagcaacagcaagatttattgtgaagagcaaaagaacagagcttccacagcatggaaggggaccagagcaggttgccgctgctggcttgggtggccagcttttattcccttatttgctcccgcctatgtcctgctgattggtccattttacagaatgctgattggtccattttacacagtgctgattggtccatttttacagaatgctgattggtacatttacgatcatctagctagacacagagcactgattggtgcatttacaatcctcgacccaggaaggccagctggcttcacctctcaataaggccactcaaattcaagagggagggaatttgactacttcttggttggggagtggcaaggtcatatagcagaagaaaatgttgggtgaaaatattggcctggctgtcttcagaaaatatattgtgcctcattaatatttttttaacatatttttaactttatatcctgaggatgttagtggtagttttctatatcctgagaatgttagtggtagttttcctctccctgaacagtctgtttcatttgactgtttgggggtctcccagtttaagcaagatatttaagccttatttctcttggcatgcttggattccccagtaaaaaaaactcctgccctgggctgacaatcaaagttctgggaactaatatggataagcaagctggaaatggagaaggctattcactgtgcctgggtcctactgttttctggatgggaactgctttccattaggcctggtgtgccctggaagggagagcctctgcagagactacatcttggatgggtctttgccaagtttgaggtagaaacccagctgctttgtaaagagctactagtggatactttgaacaaaacaaaaaacaaagcaacaccactcctccatcattctccgcatccccccttcagagggatccgtgcaaccagcaccagttcctgcaccctttgaagatcctgcagtgtaaatagagctggtctgttctttcccgcctgtcagcctgggatttgtgcatatgctttttcagtttcctctcgtccatctgcttttccagtttgatttctgcctcctgtctccctctccctgaggtcattttgtccatcttcccactccattaagcactcagcggcaccctgtctatctggtggtgctgactctctttatgttggaacacttttagtgaccatatcgtcaccttaggggcacctgatacctatcttctttttcccttccttgactagctttccttcttattgactatataaaagataagtatttattttcagtattcttagaatttagtatttttgtatttcttggtcttaaaagtcamgtaccaagaaccattactttcaggtactggctttcctctgttccaactcacggtggaattatttcatttctcatttcttcttaggttatgcgatctacttaaaattatatagggtagtgtcctcaaggaagtctcctcttccaggaaaggaccagtgtccactgagggaccttcttcaggacatgccccaggtcagttgttggattaggcaggccttgggcgagtgaggcttagtatggtttgggacttgagtttttcttgctttcccagaattcatgagcttttgtcatttagaatgtttcttactcttctgtagttgtcctcactggcaaatcccaccagatattcttcagtgagtatgcttcctgagtgaaatataaaggtgaaggaacattgggcagagcagtattaactacccatggccacatttttgttaattattttggtatttattccttgtgtgggtgtgtaatttttggtaaagttgcattaaaatagtatagcatgtgcgcatttttacttccytttaaacttcttttcttcttggaaatctctttggctatgaaatctcattttcctttcacccttctgattcttagccgagttttacttaagaaaacgttgtatgtcttgaaattaggttggttaattacaattccttcgaatgatttgacttctgtattcaccctgatgataaatagacaaaatcaaaagcatttttgacaaagtaatgctttctcacatatttagcttctttatagacacttacccatcttgttaaaacccaaaactagtgattttacgttgtaaaaagcgtttttcaaagcatgtgggccatgtaggatgtagacgacagtggtaaagacctatgccttttttgaggtgagatccaagtgtttggttttgaactttgtattttctatttggatttcgaggtgaccctttcatgtacccacattccataaaatcctgtttaagataattctacttctcctgtttaaaacaaaaaaaamcccaagactcagyggtgtcacaatttgtaacttaaaatctgtttactttggtgaactttattgttactattctaataatagctttattgaatattcacataccataatgtttacccttttaaagtaaacaatatgttcacaaagttctacatcaatctctactatctacctagagaactttcaaaggaaacctttgtacctaccagcatcattgccattcccccatgtccccagcccctggcagacactcatctactttctgtctatatggatttgctttttctggacatttaatataaacagaattataaatgactatttcttagcctaatgttttctagattatttatctacattgtatggaacttgtgtgagaccttcatatcttattatacccrtataatatcccattttatggatataccatattttgtttatccattcttcagttcacggtcatttggcttgcttccactattttagctattagtaatgccattatgaacatttgtatacaagtttttgcgtgaatatatgttttcatttttcttgggtatatacctaatagtggaatagctaggtcatatggtaactctagttttaattttctgtggacccaccaaacattctaaagcagcttcaccaagcatttacatttctaccagcaatttatgatggttccaatttgtccactcaatgagataaaaaatacactagggctgggtgcagtggctcacccctgtaatcccagcactttaggaggccaaggcaggcagatcacctgaggtcaggagttccagaccaaccwggccaacatcatgaaaccccgtctctactaaaaatatagaaattagccaggtgtggkggcgggtgcctgtaatcccagctacttgggaggctgaagcaggagaattgcttgaacccgggagccagaggttgcagtgaaccaagatcgcagcactgcactccagcgtgggcaacaagagcaaaattccagctcaaaaaaaaaaaaaaaaagaaaaaaagtgtatacacacacactgtcagcctgtcaacacagttttatcatcataaattaatgtagctgtcttttaaatcagatgggaagagagttacaaagaaaattacattcatactataaatttgtctrtatatatatacctttactgctgctttctattttttcatgtggatttgagttgctgtctagaatcttttcatttctgcctgaatatcttcatttagtatttcttgtagggtaaggctgctagtgataattttttttttttaatttatctgggagtatcctagtttctcattgtttttgaatgattttgctcattatagaatttttggttaacaatccttttttttgagatggagtcttgctctattgcccaggctgaagtgcagtggcatgatcttggctcactgcagtttccaccacccaagttcaagcgattctcctgcctctgcctctcaattagctgggattacaggcatgcaccactacgcccggctaatttttgtatttttagtagagayggggtttcacagtgttggccaggctgatctcaaactcctgacctcaagtgatccgcccacctcagcttcccaaagtgctgggattacaggcatgagccaycacacctagccaacaaactttctgcgcgttgaatatgtcactcactgccttytggtctccattgttgtttatttgaagttgttaatcattttcaggatttgttgtataatcacttttctttaacattttcaaaatcctttgtccttgtctttcaacagtttgattatgaaatgtctaggtaaggatatctgagtttatcctctttggcgctcattgaacttcttggatgtgcaaattaatttttgtttcaatattaatagactatttttagagcagttttctgtttacagacaaattacacagaaagtacagagagtttccatttaccccctcactgtttctgctgttattaatatcttacattagtgtggtacattttttacaattaagccagtatttatacattattattaattattgatacattatttttttcaactatttttctacctccccaaacttgttatataaattattattaagggttcattctttgtgttgtacattctatttctttattgaaattttctcaatttggttagataccatactcgtgctttctttcagttatttagttctttgaacatatttataagagctgatttcaagtatttattaaatccaatgcctgggcttccttggggacatttttattgactgcttttttttgttccacccccctgtatgtggaccagacttttgtgtttctttgcatgccttgwaattttttttttgttgaaactggatagtttataatgtgtcaaccatggaaatcagatctctacccctaccctgaggagggtttgttgtttttgttatttgtttagtggctttcctggaccagttgtctaaagtttatattctttgttatttgagacccactcaagtttctctcagttagttagtggtctgctaatgattccatagagatttccttatgtgccttgaaccagtaaggggcaggaattacttaaaggcatactttttgtagtgttttgatattttagtggttgaaattcttatgttttgttaccgaagctccccgtggtcgctttctgatagaggtgtggagtggggtggtgatcaagattgttagaagaaaatgagatgagcaacaaattcagcttcaggattgtcattaatttgccagtgagcattgggaatcttcacagtgggggaaaggatatgttggattttctaatcatactggactgttaaactgttccttggtatacattaagggaaatgctgctagagttttctttcaaagaacttaacctaaatttcagggtgttttcaaatctttagcaatccacamacatagaattagaaaaataagtaagactagagagaaggaaattttaaaagagaaaagttaaccacccataattttgagaaaaaaaagcaaatatgtaggattagttcaccaacatattttctgagtgtgtgaatactatgtgtccatatatcccttgtcacattgttttttaatttcacagatttctttaaagmctcgtgcagcacatcattatcgctggatgcccggacatgtaatacacctgacagcatgtgaagtgctcagaatggggcaggatgtcacctggaatcagcactaagtgattcagactttccttacttttaaatggtaaaaagtctaaatacttttcttaacattattttatattaatgatggtcagttattcatttttatttgtattattactattcacaactcatttcctaatgaaatagttaagtttctggcattaaaaactmgtgtcaaatctctagaaatcttgttatgaacagatttataacggtcaaattggtagtacttgactttctttttttagaacascagcgcttatcagctgtagaaccaattgccaagttataaaattgatttttgaaaacaaagctatttaatgtttgtaagcatttyatatagtaaaagtgggttgtgttcctggaatttgaatatagatgaaggtctgtcataaattacaatttgtrtacactattgttttctgcaagayttagttattacagtctgttataactaatgcagaaaacgcaagctgtatctctcttttggattatgaatactttgttttcttgtagtttctggcatggaactaaactcattgtgggactaacccaacacagtcccaaacggggctttgtttcatctgagccttttcaatccaatttgaaaattctgttgacttgcccttccttcaaagattcttagaagtcacaaccatttccaaacttctccctaagtatgccccaaatcctaaatcagcaaaaagcagaatggatctgatctcttttagggctgctgacaccagctaatggacattaaaacatgtcaggaggaacttaaattactaacgatttcaagacaaggggtggtaattcyggcacagtgtcagaaactcatcaactatagactgttcaatcattattgcctaggcgtccaactatggttttgcacctcaacataccaaagaggtaaaatgcttgttgttagatattctagtgcatccatgtactgggatttggggtttgttttttcttttgttttctttttcaatctgtggtataaatactagagactgtgggcttcctgtactactacmayttatcctctgattcagccactttgtttttgttttaaacctaacytcatagcaaagaggacagttttttgagcctgagaagatttattgtgaaaractctctctctctctctctctctctctctctrtrtatatatatatatatwtatwtatatttataattgcttcttttatttcagtgctgctcttcatttcaagatgccgttgcagctctgataaatgcaaactgacaaccttcaaggccacgacggagggaaaatcattggtgcttggagcatagaagactgcccttcacaaaggaaatccctgattattgtttgaaatgctgaggacgttgctgcgaaggagacttttttcttatcccaccaaatactactttatggttcttgttttatccctaatcaccttctccgttttaaggattcatcaaaagcctgaatttgtaagtgtcagacacttggagcttgctggggagaatcctagtagtgatattaattgcaccaaagttttacagggtgatgtaaatgaaatccaaaaggtaaagcttgagatcctaacagtgaaatttaaaaagcgccctcggtggacacctgacgactatataaacatgaccagtgactgttcttctttcatcaagagacgcaaatatattgtagaaccccttagtaaagaagaggcggagtttccaatagcatattctatagtggttcatcacaagattgaaatgcttgacaggctgctgagggccatctatatgcctcagaatttctattgcrttcatgtggacacaaaatccgaggattcctatttagctgcagtgatgggcatcgcttcctgttttagtaatgtctttgtggccagccgattggagagtgtggtttatgcatcgtggagccgggttcaggctgacctcaactgcatgaaggatctctatgcaatgagtgcaaactggaagtacttgataaatctttgtggtatggattttcccattaaaaccaacctagaaattgtcaggaagctcaagttgttaatgggagaaaacaacctggaaacggagaggatgccatcccataaagaagaaaggtggaagaagcggtatgaggtcgttaatggaaagctgacaaacacagggactgtcaaaatgcttcctccactcgaaacacctctcttttctggcagtgcctacttcgtggtcagtagggagtatgtggggtatgtactacagaatgaaaaaatccaaaagttgatggagtgggcacaagacacatacagccctgatgagtatctctgggccaccatccaaaggattcctgaagtcccgggctcactccctgccagccataagtatgatctrtctgacatgcaagcagttgccaggtttgtcaagtggcagtactttgagggtgatgtttccaagggtgctccctacccgccctgcgatggagtccatgtgcgctcagtgtgcattttcggagctggtgacttgaactggatgctgcgcaaacaccacttgtttgccaataagtttgacgtggatgttgacctctttgccatccagtgtttggatgagcatttgagacacaaagctttggagacattaaaacactgaccattacgggcaattttatgaacaagaagaaggatacacaaaacgtacccttatctgtttccccttccttgtcagcrtcgggaagatggtatgaagtcctctttggggcagggactctagtagatcttcttgtcagagaagctgcatggtttctgcagagcacagttagctagaaaggtgatagcattaaatgttcatctagagttaatagtgggaggagtaaaggtagccttgaggccagagcaggtagcaaggcattgtggaaagaggggaccagggtggctggggaagaggccgatgcataaagtcagcctgttcmaagtgctcagggacttagcaaaatgagaagatgtgacctgtgccaaaactattttgagaattttaaatgtgaccatttttctggtatgaataaacttacagcaacaaataatcaaagatacaattaatctgatattatatttgttgaaatagaaatttgattgtactataaatgatttttgtaaataatttatattctgctctaatactgtactgtgtagtgtgtctccgtatgtcatctcagggagcttaaaatgggcttgatttaacattgtttttgtgttatttttgcttgaaacaacgcacacattttcaacaaccaaaaaatgacaatttctagtttagttaatttctacaaatcatcttatgttattagcaaggttaagacatcttttttaaaaaaattatagcttctaccaagagaaacactcaatttttctagagatttgcctctatcttcctttcctcagtcttcccagactgctatcaagctgtgtaaaaatttactttcactggaccctaaattattgtctctgctatctgactgccagtaattagtgcagaaaactaagacaggatgatacaggtttgaggggctggggagtgggaggggggagaaaaggaatgtatttaaacaatttccgatgcccatgatgagtttaaaaaccagcattgacaccatccccaaaattaaggctgtcgcttattgaatccacttgtgtccaacctcccaggattgttttatcctaatgtcacctgtatattcatttgaaaggacttggccctgttcttgggtcttcccgttacctgccccctgggtggtaagtttcctcctttctcaaccttccaygaggaggaaagaagtgtgcagtcattccacatggcctgttggaaggcctggggagggaactttgggtttgggacagatttttttttttgtttttggtatcattcacagcatacgatttttactctctccatcttcaccataagacagataatttggggttgctataatgctgtcacacatctcaaagtacattcaaatcttaaaaagaaattctcgtacttttgccatgttgatactgttcagcaaacaagctaccaggaactgtgaggctttgtcatttagcattagactttaaacaagaattaaaatcatgtgctgtatttttaaaatctagccaaattaaatagtacatgagaaattcagagtattagacagttttaaggcattcaactgagaaaactttatttgtcaaagtcagaaaacattttcatcttattgagagatatgtttttaaacttttatcatcatttgtaaatgtggaagttggtggattgctgtgtttttgcatgattagcatgggagtctgttggagcaagaggaacatgcttgttttgaaaactcgagatgatgagggtggtacatgcagtgtgttctctctttattggcttctaaaccagttttgtcctttaatgcatgtcaaatatttctcccatgcttctcttagcagaaaagtttttacctataagacagggcaccttttaactctaaaactagtgatactctgtgacatagactttgtcttataaacattttttcattttttattttgaaaaattgcaaatctacagcaaaagtaaaacagtagtagagtgaacaccatgtaaccctcacctggtgttaacattgtaccctatttgctttaagttgtatgtatttctgaacttggcaaaattggaaattaaaatttttaaaaattacaaatatacaaagttatttatcttagcacatttattatgtgtgactgcatctgatttatatttaaattggcaggttttgagggatttttttcttcatcataaatgtaaacataggattttagagtctatttccccaagcgccacattataactgtaaacttaccatcttctatgtagctgtgatatctcatctttctaaaatggaacttgttaaaaagtgttcaaacactatccctaatgcctgcggcagaatttatatacgatccattcattggggctcaaagtatcttttagacttttaaggacaatttacagcaaatgaaatttatgatgctgtgacaagaaatttaaagaatcaaaacgatggtttgaaaaggaaacctatgatacatgcaggagaagcaaaacccaagtgatttgtgagaaatatagaaattatttaaattactttatagtaattattaaacactaatttttgtactgtcattgaaggtgttttatagagaaatctgagaaatcacattcacaaattagaagtcaaacatggccaggcacagtggctcacacctgtaatcttcaggatttcaagaccagcctagccaacatgacgaaaccccatctctactgaaaatagaaaaaaaaaattagccaggcttgcacctgtaatcccagttacctgggaggctgaggcaggagaatctcttgagcccaggaggcggaggttgcagtgagctgagatgccaccaccacaccagcctgggtgacagagtgaaactcgtatctccaaacaaacaaacaaaaagtccttaaacatatgtgaacaaaaattttgtgatggaaggattctagttaatgagtattgcatcaagatttacatctttcttactaaggaaaagagttaataaaaattgttctttattttacaggcagttactgaggctcttcccagatctcagtaaacagccactcagccttgaaaatggagtgttgttgtttctaaacatatatttatgtcatttattaagtacagttcacttaaataacataagtagattttctcttgtagtgatttgggtaggaagaggccatgtttcagttcgttttctctgtagggtcgattgaattggaccttttcagttgttcagaaaaataaaaataatttctcatattaaatacagacgctcctcaacttatgatgtgggtaggtcccagtaaacccattataatttgaaaatatcayattgaaaatgcatttaatatctcttacctgaaatcataacttagccaagcctaccttaaatgttctcagaacatttagcctgcagttgggcaaaaccatttaacacaaagcctattttataatgaagtgttgaatagctcatgttatttactgaatactgttgtgaaagtgaaaaacaatgattgtatgggtactcaaagtataatttctactgaatgcatatcacttgtgcactgttgtaaagctgaaaaaccgttaagcctctacgatttttaagtaagttggggaccatcagtttaaaataaatgcaatactatttcatgataaacatggtcactgtaagttttactcttttgaatgagggtgcgacagaatgcagttagaatcagttcatatcaccattaaaatcatccattcagaaaccaaggccttgtctgcagaaattttttattcctttttctgttagcaaccagcactcaaacgttaaatttggtagttgatgtactttgtaacaaatgagtgtgtgcaagtagtgattaaaaataagattcattctcaaggcacaaatgtcagaggggaagagagtatctcaaaaaacaaactaacacagagtatgcaaaaagattactgggaggctttagaagtatgcaattgaatggccagtattgcattctaggacattagacacttcaactgtgtctactgaagaaagagaacagttttccagttagtagcataggttaataggagctatcacctgctgttggtttgaatgtgatgggcacagctgagggaaaagggaccccatgcccccaatattgagtgccttctccagatattgtcacaccggatctattaaacacttcgaggtgttctttagccctaaattagatgaaacattctagaaagtggcaaaattgatgaatttcagatttttctctaaagcttgagagctttacatatcctttataagcctgcttgtgaaagatattgtttttaatacatgctttaatgttttcagggcttgtcatcagaatattgatacaatttttttttaatgcagtaggacccaaactagaaatgaattacaactattgggaaagaaaaaactattgttattattgcagatgatataatggtccaagtagaaagcctgggaatctcatcttagaattaatatgaaattagcaaaaacctccagatatccaaaagttaatagacaaaggtagctttaagatataattgtagtatatcaccatttgttgtcgcaacaagctttgtcacatttatagacagactgagcatgtgtgcagaaactatacaaagataacagaagacctgtatagatggaaaaatacactgctcctagctgataaaatgatttttttgtttgttttttgttttttgtttttttgagacagagtttcactcttgttgcccgggctgaagtgcaatggcatgatctcggctcaccacaacttccgcctcctgggttcaagcaattctcctgcctcagcctccggagtagctgggattacagacatgtgccaccatgcctggctaattttgtatttttagtagaaacggggtttctccatgttggtcaggctggtctcaacctcccgacctcaggtgatccgcccgccttggcctcccaaagtgctgggattacaggcgtgagccactgttcccagccctaaaatgaaatattttaaacatttcttctatttgtgaattaactgaatgcaagtctattaatgttctcaatggcttgagagtatcctaaatttcatctgaaagatgtgcaagaataggaatattttgaaaggaaagtcatgaagtcttaagatactagatataaaaccatatttcacagctaaaaaatattgaaaatgtactaatagtttacatttgaacccttagaccaaggcagtagtagccccgaaatagatgtgagtataaataaaatgttccaaaaatcctaggaacataaggaaggtaaacttttggagaatactagattatggctttataatgtacaccaaaatccagatgaaaaatatgaaaataagctagaagaacatactagtgactatctttggatgggtgactgaattttccaaataaaagcaataagattcattaaggagcagattatatatttaaaaatatatatcttctgaatatgagaaagtaaaaggcaaatgagattagaacatttgcctacagattttggaagagggaggcttaataccttaatatggaaatgatttatgctaatatttaaaaccagttatattgagataattcacttatacagtttacccatttaaagtgtatatctaagtggtttttattataaccattaccacaatccattttatttttatttgtattttaaatatggagacaggttctcactatgtagcccaggctggtctcaaactcctgagctcaagcgattctcccacctcagcctcccaaagtgctgggattacaagcatgagccaccacgcctggcccataatcaattttagaacctcttcatcaccccaagaagaaaccttgtaccctttatagtcactccccacaactccctcatactaacatagttgttttttttttttttttttttgagacggagtctcgctctgtcgcccaggccggactgcggactgcagtggcgcaatctcggctcactgcaagctccgcctcccgggttcacgccattctcctgcctcagcctcccgagtagctgggactacaggcgcccgccaccgcgcccggctaattttttgtatttttagtagagacggggtttcaccttgttagccaggatggtctcgatctcctgacctcatgatccacccgcctcggcctcccaaagtgctgggattacaggcgtgagccaccgcgcccggcccatagtttttaaacatgaagactccaagagaaaaatgaacaaaggatgtaacaattcatagaagtacaataagaaatggaaatggctaatatgaaaaattataattcaataaagatgattcaaattaaaagaaaatttctgtatcaaattaccagttttggtgtttggttttttaaaatatccttgatacttgagagaccatattgagaaataagactacatataatgtgatctcatttatgaaaactattgaacagaaaggagcattcagaatttcctgaagtcacatcttcatattttgagaatgactccttccagctccataaaattgttgccaaatatgtatttggagctttttccacatatggtttgccttagggagtcttatgctccccagccccagcctttatttaggggaggaaggagccatgatttctctcctctcacctactgacaggcatgttttagatgtaaccattagtgcttagccgtgtcaaggtcctatactctgattaaccttgtaagatagccccattgtatacccacagtgaagagaaccttttgcagcagtagcctgaataaccaatcctataggccactggcactctccatctgactacaagagctgaggatgattagattggcagcagttttgcctctagctccttggaacgtatctatgggatttcattttctgatatccaatacatgttgatttaattgcttgttaggtgagggtggcctgtttccttgagctgcatgccagtgggaaacatatgttccccttcagcaggaggactccagaagattcatactctccagtagcctccatccgaacatatgactgtgggagtaacttggatgagcagtattggtgcaggaggaggatcttgtttaactagataattttgtgcatttcatatgaaggtttattgacctttaagatatagaaaccggtgttttttgttttgttttgttttaatttctgcaaaacacggataccactatcactggcttaaacattattgggtatttataatttatttcctttgccattagactcattagtaaacgcttcctggcgcagttagaattcccttaattgacttgatgcaaagaagatgtgttttctcttcaggaaagcttttcgtgcccctccactcaaaggagaatgcccctttaagtatgttcctcaaagcccactgcgctaatcatggcaacagctggcatttgttgagcatttacttattgcatgttcaaagcactttgcatgtattacctcctttcactccataacaaccttgggaatgggcactacttataaaaaattggcccaatttacaaaagagcaaagaaaggcatgaatccataataaacgcttgaaaaaatgtttttctctgatccattcatctctattttaccattttaaccatccaccttcttccccagaacctggcctgctgtgagtgcagcacatctctttgagacagggtgtcactccattgcccagactggagtgcagtggcacgatcacggctcactgcagcctggactttctgggctccagcaatcctcccacctcagtctctagagtagctcagaccacaggcatgcgc

SEQ ID NO: 94349 - DNA, 16420 bp, Homo sapiens
  misc_feature (1)...(16420): n = A,T,C or G
aaacaggcaaataaacataaaacatgaaagataaatgtcagatcaagcggctgtaacaaaatataatagattaagtggcttaaaaaaaggaaatttcttttcttttttttttttagacggagtcttgctctgtcccccaggctggagtgcagtggcactatcttggctcactgcaacctccgtgtcctgggttaaagtgattctctggccttaggctccagagtagctgggacctcagacgcgtgccaccatgcccagctaattttttgtatttttagtagagactgggtttcaccgtgttagccaggatgttcttgatctcctgacctcatgatccgcccacgtcggcctcccaaactgctaggattacgggcatgagccactgcgcccagcctaggaaatttattttctcacagttctgaaaaccggaagtccaagatcaggtgtccagcatggtccagttctggcacaggctctctttttgtcttgcagatggcaaccttcttactgtgtcttcacatggagagggagaaagagagggagtggaatagagatcatttcttcttctccagctacagtcctatctaattaggattctatatgtatgacctcatttaaccttaatcacctcttaaagaccctgttgtccgatacagtcacattggaggttagggcttcagcattttgaatttggagacagggggagggtggcacaattcagtccataacaagaaataaacagccactaaatataaacataagcttggctcttctctttattatttccttacttcctgactcttgctctttttttaacttctcgagttgaacatgtagctcatttgttttaaaattttgtttcggggggataagtatatttgaatctataatctttcttatgagtattgctcaattctatccaccagattttgtcctgttgtgctttctgctctaagcaatttctatttcctatgtaaacacaaggtcttttcaatgcaaggtcttttcagtgcaaggtcttatatgttcatggctactattattctgttttaaatctttttacaagtatacaatgttgtcctttgggctttgtctggaggcttacctccaaatctttatagatacacttttatttgtttgtttgtttgttttttgtagagatggggtttcactatgttgcccaggctgctcttgaactactgagctcaagggatcttcttgcctcggcctctttaagtgctgggattgctggtgtcagccaccatgcctagcttatagatatactttttaatcaacagatgaaagatgaactgaggaaatagagttgctacatacgagacaagaattctgcttatatttctggaaaacttttcttttttacctgatgggcttttaatctttcatttatctacttttgtgaaggggaattctaatattggaggagtgaagccattgtggccaacagcaaggaaaattaatagcatgtgtgctttaatcagtcggatagtctaggttgtgctgtggtaataaccaagccgtaagtctcaggagctgaaaacagcacagatctatttcttgatcatgtacctgtcatgaggggctggatctgtattatccttaatcaacgtgcgggattgagtagatgggtgctgaaatagtttgcatgtgtgtctctgcccaaatctcatgttgaattgcaattcccagtgttggaggtggggcctggtgggaggtaaatggatcttgggggcagatttctcatgaatagtttaccactacccccttggtaatattctagtgacagtgagtgagttctctgaggtttacatcacctcctgcctcgctctcttgctcctgctctggccatgcgatgtgactgtggccccttcaccttccgccatgattgtaactttcctgaggcctcccagaagccaagcagatggcaacataatggttcctatacagcctgcagaaccatgagccaattaaacctcttttctttacaaattacccagtctcaggtatttatttatagcagtaagagaaaggcctaatacagaagctaagaccctgtattcaacccttttcttctgcaattgctcgggagggaaaacagaccctggcaaatctcctcctgcctctcaaggcttctgcctggaagggacaaacctcacttccgttcatatttcagtagccagagcagcacatagtcacacctaactttaaggggtcagggaagtatatccctaccagatgtccacaacgagactggacaatatttgacgaatgtcagtaatgaccaccacacactgtactgtcctttccaaagccaattttgctgtttgtttgttgatttttaaaaattccctttagttatttgagttactatgaatccttccagtgattttattttatagaaaataagcaaacaaaaaaccctaaaactttaccaatattccagaaggcattagacttgacattataaatgttacaaacagaacatcttaggacagtgaactttagctgatacactgggatagttttgaagaaagagtacacacatatttttcaagaataaagttttaataggaaaaggaagcagagcatggcataggccaatatttagatttgaataattattggtaggcaccccatgtcgggcagggagccagggatttttgcatattctagctaattcaatttaattctttataaaaacaatttgaggtgagtcttatccataatttatacatgcagaaactgaggctgagggaggtaaaatgacctttccaaaagccacttggctagcaaatgacagctttgctcaaatgctatcatctgatactacggagacagaagagaaggacgcagtgtgtatgtttggacagcatgcactgtttggtttggcaggactgcgagatacaccaaaggtagggggaatcttgagtaccaaggtaaagaggttggagtttattagttaggtagtgagataatggttttttgagtcggggggacattggtagagctaaaaaaacattgcctcagaaacattgatctgctattgttttctaggatgaagggaaatgaggcagagtgaggccaggagaccagttagaggaattctgtgggtgttggcaggggagacagaaaactatcttccatcgagtcttcagatccattgggaatgcctggatgacgtcagagttcgccctgtgtaggtagctcccacttttcattgtaggtttctcaaggacttgctcctagaaaaagcgtggctcaaaagtagataaaaaataggcaactgcctaagtgtgaaatttacaaagttcctctccaaaaaagcccgcctcctccctatcacttgtgggcctgacattttaccaaaggggctctattctttcaagagtttgttattaaagcgtgactatttgaggattggaggcaaaagggatactgagaaatgtccttactagcagtgtcaaggcaagtgacataaatgtgtgggggggcaacttgtatgagcactgtgaaaacggcagcatgttcactctacttctcagctctgactgaggggctcaaagttcaggatctgctgatttttcaacagtaacgtcctctccaaggtgttttttttttttccttttttgggaaagcccccagtttaaactattgcagccagtttacatttcttaatgtcactgtgctggccacattcagagctccatttgccaccatcggttttgatacctttttaccaaaacctttcgaaatttgagagcccatctttagtaaaactgggcatggagcagattcgtttggattgctgagaggggagatagaaaagtttgggtgctaggcaggaactgcaaggaggacctgggccatatgccagacatctagtgcctgggccttgaaagggagactggtcgctgacaaggcaatatctgttgcaacccaggcttcctagatgaccaccttggatcatggctcggagcacagggagggctgggcagtgcttgtgtttctctccgttccagttggccccttcccattgacattacagtaatgcagttgtgtgctgtttgaaaaagcatccctagttacacagaatgatttacaggacaccagactcygcatttcagaggtctccagtgtaccataaaaaatatattataaaagaataatctttatctgaactaaagctgcagtgaaggaaactcgtgtccagctgagagcagcagtgagcttttgttcactcagggaaaagtccgtgttctttatcttatttgattaacattttttttctctttggcactaggtatctcgttaatatttagacattatatacattttctttcaactggttttcctattacgtgatcaaacaaaaccagaratgccagccacagcagccaacaagggaaaagcagccccgtcaggcacccagctgtggctggggggcaaatggtactcactagagccacccccaggaggcacctggcagagctctgtgcagagccagccccggttgcagaaagctgagtttgttggagtgcctcagttgatcactctgtctctttctcccatttccctcacttccctgagcaaaatgcaacaggaagcaaagtctagttgtgaatcttccaaagccttctgatgtttaccatgttcccccaggagagggaggtgaggggtggagatctctctgcaaagaaaatacacttaaaaaatttcagcgagccgatgcacagacacccagcaacccagcttgtctccgcttattaggtgttcagagcgacagtggtcccacactatttcagtccaggaaaccatgaactccgttagtggcaatgcccccgaagaggcgcaggtgtgtgcacctgtgattaagggtgtcgaggaggggcagcctcatctcttgaagcagaaagtgttgtcacctggtgatgggacagagggaaaagctctggggctgggaaacctgggggcttgtgtcaaagctccacccatcaggagcttcaagagaagatggggggcggggggcggtggctggaaagatggaagttgggatgggaaagcggttgtagaaaaggattcactcctggaccgaaggcaggaggatatcccgggcgagagaagggagggtcggggatgggctgagttggagtcccagaggaaaagcggaagcgagagcttcgtcacccgctgtcttccagctcccggtgcgcggcaccggaggcaggcgttgggctttacctctctaaaagtactggggcaaaggaatggagaacacggcgtcccgagctcccaagggaggggagtaaacgaggtggggtggggaacaccccnnnnnnnnnnnnnnnnnnnnnnnnnnnnnnnnnnnnnnnnnnnnnnnnnnnnnnnnnnnnnnnnnnnnnnnnnnnnnnnnnnnnnnnnnnnnnnnnnnnnnnnnnnnnnnnnnnnnnnnnnnnnnnnnnnnnnnnnnnnnnnnnnnnnnnnnnnnnnnnnnnnnnnnnnnnnnnnnnnnnnnnnnnnnnnnnnnnnnnnnnnnnnnnnnnnnnnnnnnnnnnnnnnnnnnnnnnnnnnnnnnnnnnnnnnnnnnnnnnnnnnnnnnnnnnnnnnnnnnnnnnnnnnnnnnnnnnnnnnnnnnnnnnnnnnnnnnnnnnnnnnnnnnnnnnnnnnnnnnnnnnnnnnnnnnnnnnnnnnnnnnnnnnnnnnnnnnnnnnnnnnnnnnnnnnnnnnnnnnnnnnnnnnnnnnnnnnnnnnnnnnnnnnnnnnnnnnnnnnnnnnnnnnnnnnnnnnnnnnnnnnnnnnnnnnnnnnnnnnnggttgttggttttgttcgctcctccgccgcgagccgggagccgcgatggcccggtggcccgcacctcctccgcctccgcctccgcctccacctctggccgcgccgccgccgcccgggcgcgctctgctaaggggccgccggcgcgcaagctgctttttatgtgcaccttgtccctgtctgtcacctacctgtgctacagcctcctgggcggctcgggctccctgcaattccctctggcgctgcaggagtcgccgggcgccgccgccgagcccccgccgagcccgccgccaccctctctgctgcctacccccgtgcgcctcggcgccccctcgcagccgcccgcgccgccgccgctggacaacgcgagccacggggagccgcccgagcccccagagcagccagccgcccccgggaccgacggctgggggctgccgagcggcggcggaggcgcccrggacgcctggctccggaccccgctggcccccagcgagatgatcacggctcagagcgcgctgccggagagggaagcgcaggagtccagcaccaccgacgaggatctcgcaggccggagagcggccaacgggagcagcgagaggggcggcgccgtcagcacccccgactatggggagaagaagctgccacaggcgctcatcatcggggtcaagaaaggagggacccgcgcgctgctggaggcgatccgcgtgcacccggacgtgcgggcggtgggcgtagagccgcacttcttcgacaggaactacgaaaaggggttggagtggtacaggtaggaccctgggctccgcgggctggtggagacgcgtgggggagacgcggaggggaagccgcggctttccacgcccttcgagcatccaggcaccgtcccgagaggcccaagcccccgcgagggctctgcaaaccctggcggcgttgctcagggggatcggctgagagggctggactccagcgaaaggtcactttatttcagggcgaggggaggaggtgtcaccctgccctgcctcccgcgctcctcatccaaggaggtgctgtctgaatctgcccagctccaagcctgggaacccccagccctcctgcctgctgggtgtttccgaaaccaggctcttgcggggttctgggattctgggcagaggactttgaggagtgagacaggatggctaaattgactaaggggatttgaggtcccctggaatctcttaaaatcaccctcaaacgcatttgcgtggctggaattcaactttagtgtgttaaggtcagagcaaaatsaatagggaacagttacaaagatcatgctggcgttttggctttctagtaaagaaaggatgcctcccacctccgtaactttccatcccccttggctgaatgagcacggagttgattttgcaccagaagcctcaatgtctgcatgacagttggtgccctgagagtttttatgcctcagaccgtgccctgtctaatctccgcctccttcgcaacagattggagcttctgtcttgtgagatgttcatctccctcctttcccaccgtctgccggtggtgagagaaaggtaggagagaggactagaaagttaagtgcaggtaaaataaattaataatccagctttcctgccagccataacattttaaacggcactggtgcagatgccccaaacgcaaacctccttcgcctttgttgtttctctttctctctttcctcctgttttatatctttctgggaaacagatctgcatggctggctgcatctccattgcatttcggtaattaattgcaaatgtcaaacagaaacacagcctttgtcagctgaagtgatgttatcatcttagcagagccaataggtaaaatcaagattgtttctctgacaggttgcctgcccgttgaggagatgtgctttctaggtttaaattacagcctgggaaagttttagaaataacttaactgaagaaatatataataaatgtgtgcattatgattgatttcttccacttttaaaaatatgccttatgctttaaaagcttgagakaagtacacttagtcataaacattccagcacattacagggaagcagcaaatgtgtctgttaacgtcttgtctgtttcaacagagagaactaattgcagtattttaggaggcttcaaacagccccttcctatcaaaacataaaacagcaaatgcctaatttaactggaaaatcagtatttataacatcagaagccatggcttccagtttgtgattataattaaaaaggtgttaggatgattaatgcagcaacagcaaaataaagaaggggcacgatgtctgggaaggttttagttgtttaattgctggttgtaggaatgttctggtttcttctgtggagtagctttggccttatgagggtaattgcgttttttttttttccaattctaattttagaattatgagaattgtcaaatgccccttcagggaggcagaaagatcaaatctttccaagatctgaggtgtttggstttgtggcagctggaaacagagggccgggggtgttttatttgggtgacttaaaataaagttartgaaggatgtgtggtggaatgtgtatcaggaagtcttatcactgggtctggagagttttccgaatgaaagaatagaagatgccagattttcctagattcctttatgctgatgttaggaagagaaggtatagaaactaccttgtttgacgtggctcctgattatgttattccagcgctgtggtatgcccagccttctactcccaaccaatgcttgtggtatttgggactcagtgtcatatttggtagccactcacagaactgttaaagtgaagaggtgtggatagaacaagattcccctggtcctcacttaaggggaccatgtggtatctctgtgtccttcatccccaccccagcatctagtccaggggtgctgattgaaagcactggacacaaaattctcttaggaacaagcttcctgccaatacatgtctgtctaacatagaggagatcattagcccccagctctgcttttgggaagacccgttggacccacaggatctgagtgtgctgggactgctttggaccactctccagccttaccacagacagcggtgctttgaggcatttgtgaaattttcatcagttccatctatctcttcagactcctctctcactcccgtataggaagaggggcagcattctcactgtattgtagaaaaggaaacagtggcattgatttggtatcagatggcactgatcagtggcatcgattccagtatcagaaactctttctcctggtttcctagtccaactcttcatcttttaaatgatggtatctgtacctaaacagtatagttccttcctataacaggtatgctatctgggatctatttgactgrttagagatccacaggttaattaaaggttttaatttttccactgtttatttattgttattttgtttaaatgtgcttccagtagcctatgaattctgcacatgtttctggtttttgtgttttcagcaagagggagagccaagaagaaattggggctgctctctgcacagctggcttggggttttctcatattcaactcaagagccctagcaggttcagttcctcagtgtcactccagttatctctaaatccgggttttgctttcctcctatgctgttgatctaatgtgatataaaaatacatctgagattagaacgtgtgcatcagattttcaggscaagatagactaatggattgggatgcatgtgttaaaatctacagagaagcgagcctcacttggtggattgacacaggccagtgattaataaatttggtgagattaaaccctccatgccctcttccctctccctttccaaaaaaaggcaaagccacagtgcacttttcagaatgagctgattacaagctgtctaggcagagactttaaactcttctaagggatgggacctcgggccaggccaactggctgccaatgcagaactcatcaaggtgacagagacaacatgagctgtttgctctctcatggtttgcagagcatacggtaaccatgaccactttacactggaaaccattcagccccagggcaatgggaagtgattgtccatggtttgtttgtttttttttttcttttgagatgaagtcttgctctgtcrcccaggctggagtgcagtggctcaatctcgtctcactgcaacctccgcctcccggattcaagcgattctcctgcctcagcctcccgagtacctgggagctcttccatggttttaagttgtcttcagtgtcaacagtgaatacacacattccattggctaggggaaagtaactcaggaaaatgctctacaaagtcacgcttatgctacccagaggaaaatggtcagtgctcagcagcatattttgcatgtggcaactggggagagaatggagaaggatggaatttcattggtgtttaccgaatgcctgccattgtggcaattggtgctacctacaattatagacctgttatttcatttgagcattttgatgatatgctgagatatgtagcagcatttccactttacacgtggctccgagagggtaaatgattaactcagggtcacttggctgttcagtgcctctgctgagatttgaacctgctgtctaatttcaaagggctgatttcttcccttgtaccacactgccacacataaagtactaggaagcatataccctgtgttcattcattcattcattcaattatttaaaaaatatctaccatatgccgtgcactgtattaggtactggggataaaatggtgaataagatagatgaagcacctgttctcctggaactaacattttagtgggagggttgtggagacagcagacaaagagccaaataatatgtaatacaaattctggtggtgataaagactacaaagaaaaataaagtaatggatggcccagagctgttttgtctagtatggtagctactgtctgtatgtggctattgaataggtaaaatgtccaaattgaaatgtgctgtaagtgtaagatacacagaatactaaattactcaataataattttagattgcttacatgttgaaattatactcatatcaagtaaaacgtcttgcaattaagtccacctctttttaccttttcaatgtggctactagaaaatttaaaagtacacttgtgactcacatatttctactgggcagcacctgtgtggtgtagtgctttgtaaactttaggatcatctagggatcttgttaacatgtagatttggattcagccagtctgaagaggagcctgggagtccacatttcgtctttcttttctttttttttgagacggggtctcgctctgttgccaggctggagtgcagtggtgtgatctctgcttcaagcgattatcctgtctcagcctcctgagtagctgggactacaggtgcgcaccaccacgtccagcaaatttttgtatctttagtagagacggggtttcaccatgttggccaggatggtctcgatcgcttgactttgtgatctgcctgcctcggcctcccaaagtgctgggattagaggcatgagccaccgtgcccggcccaggagtccacatttctacaaggttgctagatgctgctgctgctgctgctgtctggatctcactttgagtagcaaagtcctggaaagtaattggggaatgtgtgtgtgcatgttggttattattatttgaaaaaatttttttaaagacaggggtctcactttgttgcccaggctggtctcaaactcctggcctcaaggaatccgccgttctcagcctcccaaagtgctgggatacgggcatgtaccacgaggccaggacaacatatgagttatattaagtagaatgattagggaaaacctctctttggaggtgatgtaaatggagtaacagagtaagaccctcccatgtgaagatctgggtggagaggtctccacttggagggaacagccagtgtcaaagccctggggtggaaacaagcttcgtggccctacagagtgtcctttcttgattctaaaagcactgtttttgttgctggacaaatccaggttcaaaacgtggctttaagacttatgaattggatgatcttggttgaataacttatttgacatcgcttagcttcagttgtttatctgagggtaattgcttccttttagattgttgggaggaataaatgaaataataaaagtgaatgtattttctaaacaaaatgagtatcctagagcagaaatccaaatagagtctcagctaccgagtctgtccatttctcaaatcagtttagtctcgtgtatgctctacttcctatcacagctgtcataatattgtccaaagaggctgttatttgggatggtttgggaaaaccccagtaatgattggctttgcagtgtgcatctccttacccttttaaaccgaaggtcacacaacttcagggctcagacaggtcgtataaatgagcgaggtagactaggtggagagaagctaaagtgcctgcctgtgctctggctgaaggggaagccactgctgcagtctagctacttttttcccaatgtgcaagtgtggcattggggttatgagatcttccactttgtaagagaaactggaaatccaggttttgatttgaaatcttttgatttttaatattggcaacagatttaagtttcttaaaagcccagtgggggccaacattgtgggacaaacaaaatacatctgtgggctggatacagccagctggctaccagtttgtgacctctggtttaaactcatttcagaaaacaacggacatgcccataccctgtgtaccctgtgcagtggccagaatcgtggcttacatgtgctattttagtgtagggttttttctttttcttcctttacagattttgtaacagcatgggggaaatacctcccggatatattgcaacatccacaaaagcctgatataaacaagaacattgaggcagaaaaaagaaaattcgcaaatacattcccctccgttctcaattaacgttctcttgaaactggggaaattctcaatttttcactcgttaatcaggagtgcttgtatttgatctatatcgataacttgcacttataaaatagattacgctcagtcgtattaagatcttagagttagaaaaactggattccaggcttggctttgccacatactagttttattggacaacaggttacttatattaatctctgtttcttaggtgatgaaggtattttaactccatagggtccattcacctacgaaaagactttggttccagaacacatttctgtattagactcttcagaaagaggaagctgtggaatagaagcaacatggtttggagcatgttttgtatgtctgagccagaatctattggacaaattacttaatatagctaagcctcaatttctccatctgcagaatgagctcaatattacccgctgccaaaggattacgtgaggatgacacgaaatggcatttaaagtgccctatgtagagcttgtgacagagtaaatgtctctctcctcttctttcctctctctcccatttttcttttctctcttactcttctccttcattttccttcaatgccttcctttatcctgcccatcagtactgacggccctaaagagaaagctgtaatgtatttttcatttaaatgtagtcttttatttcaagattaggtctgaatgagggattttaaaccctgaagcagctcttaagtagctctccagagaataatcagaaccggattccagaatttggtctattgtaacttgagctgaaggaggaaaaaaagtatgatttcatgaggtaactgcagccagaattctccacaaaagaaatgcggtaaggaggtggacaggctctgtggacttccatgctgacattctcttgagcctccagtaggaatggatgccacttgccccgggtaagttcagagacatttaggatgccaggagcctgtttgcctttcgtgcttctgcagaaccgaaggcatttgggaatgcaggattgctccccaagaccctacgaaaccctctattttgagatttggctgctttcaccggtgttctctagacatcctaacatgatttatttatttttattttttatttttgaaaatcataccaggcattttcacttttaaatcaagtcaggagagaggcctcgagactttagatgaatgaaagattgctagggttgtttgtcagaaagttttaagggttttggttttgcataatggatgatctctctggaatrgattgaaccaccgccccgttcaagtaatctcctgatttcattggtttttgcggtttaacaagctcctctgtaactgtcttgggaattgcgttctgaaattataattcactaagggagcttttcagcccatcttgccattaattaaaagaaggtggttggcttttttgttgttgctgtttgtactcactacttaggacttacttgccttagacatttttttttcaaccttatttaagaatatacaaggaaacaaagcaacacgtgaattagacaatatttttttcagttgcaaatgacagaaatggaacttacactattgtaaacaacaaaagacatttgattgccttacgtgattgagaagtctggggataacttggtttcaggaaaaactggatccaggggctcaaatgatgtcactaggcccctgtctctttccattctttgccgtgtttgtctctacctggcttcattctcagacaggctgtctcaccacagtttaggcaagatggtaagaagcattcctagacaaacatattttatgtttattaatctttttggaaacagtttttcttaagaacttctgtaggaaattcctagagatgccttgggcccaggttgggtcctgtgccccattcctaaagcaataattgtgtgggattctaatcaggcctaggagatgtagctagccctttggcttggggtggtggtaagagtagagaagcagggttctctattctttacggggaaactgttccatgtaatttccccattgcaaccacatgaaatagtttccccatagagaaagaggggttcaagggtgctatttttagaaaagtgggggccagttaagccagatgtacgttaagtatataaagatccatccccggccaggcatatgatctctctaatccactggagggattagagagactggagggaggtgcagagggtgtttggggacttgttatttagttattaattctgtgcagctgttatttagttattcattcatgtatttattcattaaacatgtattatcaaccatgtgctatgtgcttggctgaaacatgaaccaatcatggccagcgatctgaaagaactcacagagtggagaaatggacatgtaaatgatcacattgaaaggtgttatcagtcttgacagaatgggatttattctaagaatggaaggatggttcaatcttggggaatgtaataatgtgatttattgttaatacaggcaaatgagaaaaatttgtgatttattttatggatgctgaaaagatatcttataaaaagaaatatctatttctgattttcagaacaacctgctattaaaatagggtcatacctaaagccagcatcatctttagtggtttagcactagaagcatttccactaaatccagaaccagcctgaagtgctcattactgttactattatttaaccattgttcaggacttattagataatacaattagaaaaacaaaaggagaaaggggggaggtagaattattactatttgcaaagtaattttaacttttcctttttggaaaacctaagattaccaatcctcctatgaatctattggaaacaataatagaattcattaaggtggctggtaaggaaaaaacaatgtataatttatagatttcctatatgcctatgccacccattgtgaaaatataatgggaaaaaatactgtgtgtatagaaccaaccagagagacaaaataactaggaataaatttagcaaaaattgcaagggacttgtaaaaacaaaatattaatactctactaaggggcgctggagaggacaggagtaaatggagagacatccttctctagggtggcatttctttcttttccttccttcctcctcccctttcctgtctcccttttctttcccattcttgtttgtttgtttgtctaagtcattgatgcctaaattgagatcagatgtgtttgagggtgatctgaaaatattgtttatataaacttgaccaaaatgtacttcatatatgggatatccttcctttgcacattttatttgacagaggaaagggtggcaaaataactgtcactgtttagattcataaactattataatcccttgcagaggggctgactgccttacacccccaattcaggggtagaagaaccatgcccaaggagtggattaagagttgagctagcggctcaactcaactcttaagagttgagcacgatggctcacaactgtaatcccagcactttgggagcctgaggcaggtggatcacagggtcaagagattgagacca

SEQ ID NO: 94350 - DNA, 151613 bp, Homo sapiens
  misc_feature (1)...(151613): n = A,T,C or G
gagaactctaagtagagtctggtgaacaaattttgagatgctagcatggtgaacaagaacaaggtaagttggtctttaggaatatttccatgaaataaggaagttcccattttccacatcacagatcttaggtctgataaattgggatcaattgtctagctcatggtaccctcattcctaaatagcataggaggcacataaaaattcttatttatttttaaattttgctttctctagattcatcaaattgcttcattttgatgaataaacttcatcaaattgctttattacaataaatttttgaatattattacccctaaattttccttttgaaaacacatatttaaaaaactattaacattttcttgtcattgcttgcttattaaagcatatggagagtcatttaatagaaacagctatcgcttttgacctgactatgagctaggcacagtagctcattaactttactattaatctatattcacattaatggtatattgtttgaattaagcagtaccacagggggcagaaaacccaaacaccatgttaacaagttagaagtttatttgtctctcatgaaaccagtctaggactgatacagcagttccacaagcagtagagacccaagctccgcctattttattgctctgctgtcttcaacatgtggctggtatctcattattaaggattctcggaacttaaacacattgcctacgcttgcatcctactgttgagaatcagttgcaaagtcacacccagctgcaagggaggctgggaaatgcctttattctggacagttacatcttccactctacatgaggagggaagagctattggtagatgatgagcagtctgtccaacacaaggacctttgatctccttgagtagctcttcctaatttaaaaacaggtttattggtagataatccacattctacacaatttgcctatttaaagtgtacaattaaatgatttttaacatattcagagttgtgcaactatcactaaaatcaattttagaacattttcatcctcctccatcctaaataaaccctgtacccattagcagccacttctcttttacctctacccactttcccagccataggcaaccactaacctattttctgtctctatggatttgactactttggacatttcatataaatgaaaccatccaatatgtggtctttggtgaccggcttcttatacttggtatgtttttgtggttcatacatatcatggcatgtattggtacttcattttcattttatggccaaatattccactgtatggagatacaacattttatttatacattaatcagttgatggacacttgggttgtagccactttttggcaattatgaataatactgctatgaatattcacatataaatttttgtgtggatgtatgcttttatttgtcttgagtctattcctgggagagaaactgctggatcatacaggtccacgtttaacttattaaggaacagctaaactgttttctaaagtgactacatcattttatatccccatcagcaatctatgagggttccagtttctccatatcctcgtcaacacttgttaatatttgactctctgattacagccattgaagtggatgtgaaatgatatctcattacaggtttgctttgcatttccctaatgactaatgatgttaaggtttttttcccctaatgcttcttggcatttgtaagtctgcttgggagaaagtctattcaaatcattagcctacccttaggttttgaaatctattgttttcaaatacacagctctgggtcaactggttacatcctgcatactaggttgggatttttttctccttttagctcctagagaaagctgggtctttatctattgtgggaattcagcaaggctcagaaaaagttagcatttacttcaaagtcatgtgatatggtataaattgcagattttattcagtacatgtagactttctgagaagaaatcctatttgaaagcaaaggagcagacaacctacaggacaagatggaactagagtataggttagtttccattttctaggttctcaagctttttaaatattaattttaagaaacaaggtacaaagctttacgaacactatttaaaaatatataagtaggctgagcacagtggctcacgcctataatcacagcactttgaaaggctgaggcagaaggatagcttaagcccaggagttcaagatcagcctcggcaacacagtgagacccctgtctctacaaaaaatttaaaacttagccaggcatgctggtatgtgcttatagtcccagttacttaggaggctgaagcaggaggattaactgagcctgggaggttaaggctgcagtgagctatgatcacaccactgcactcccacacaggtgacagagtgagaccctgtctcaaaaacaaaaacaaaaaaagaaaaaacataagtaagtggtaacgaccatattaacacacaattgaatgatataactcaactttctgtaattatggaataatatatataatgcttttagctaaaaataatgatttcagttatttacatctatttaatattttagttaaaaaataatgcttttgattacttatatctctttccacaagtgatactaaacatagcttgtgaaatatattttgcttgaaatgtgaaatacaaagtcaaataaataccatatctaattgtggagccctatactatttcattaacgaagatgctacaggtagactgagggacaaaaaaaaaagacaatataatgaaatggaaaaaatgctgacttggatgtctagcgtcaatgttctatcacagagtaaatcacttaacctctctggacctggatttacaaatctagaaatgaaaaggtagagagctatatggatttctgaggcctatctctaaaagtcctatttcccgttttaatggtatttcataaaatgggttgtgttcaaaatgtttggaaagctgtgggtcaaacagttatgatactctttcagttactcatccaaaatctattccccacttcttccttggtttaacgttaatttgatttgagacagcaatatggctaggtccacagtgatgaattgagactggcctaacgaaatcattgcaaccctgttttcagctttccttgcttcccttgcagctactcatggccaagtcaatgtatatggccatggaaccctcttcattccagaagtatctccaaaggattacttttctggagagtatgatggcctaggctaactttactataaatagtagatagataagtgcatttcctggccagtaaagccagaatgtgttatctctgaggcatttcttccataaaacatttactctaattttttttttttttgagacggagtcttgctttgtcacccaggctagagtgcaggggcgcgatctcagctcactgcaacctccgcctcccaggttcaagcaattctcctgcctcagcctccagagtagctgggattacaggcgctcaccaccacggccagctaagttttgtattttcagcagagacagcgtttcaccatgttggccaggatggtctcaaacccctgatctcaggtgatctgcccacattggcctccccaagtgctgggattacaggcatgagccaccacgcctggcctctaatttctacaaataaataaaaacctatgcattcatttgtgtacttggccttaccttgtgcccatttttggaaaaaaatttaaaacaaaggaagtatctgttggtcaagaaggtgcatgtctattaaaccccttgcctatcataagcctagagaacttgggagttagtgaaatataacattcatgttaatcaaccttttagacatggttgtgttgtgaagtaaaagctggaattcagtattctcagttctgtatatcattatcaccagcggtgctttaaagagaaaattataggtctctctacatctatcatacacctcctcagattcaatgggtctagaggtggcttagacatctataattttttaaagtcctacatttgattctgataggctgccaaggtgaaaaacactaagttttataaatcacagaagctatgactcttcaagatgcttaggtgagtaatgccttatggcatggtgaaaataacaccctcacaggtttcagggactcaggtcttggttctggcactcaacagctaggtaactttgatcagattacttaaaactctctgggccttaatgtgccagacttagagaggataacttttgctctaggtttaaacaagtgtttataaaagcacatggaaaattataaagagttcaaaaacttttaacgtagtacttaatgctattttcctctttatggagtgtcctttccctttcttttatgctgtaaaaatcttttttttttttttttttttttactttcagatctagggtacatgggcacaacgtgcaggtttgttacatatgtatacatgtgccatgttggtgtgctgtacccattaactcgtcatttacattaggtatatctcctaatgctatccctcccccctccccccatcccacgacaggccccagtgtgtgtgatgttccccttcctgtgtccaagtgttctcattgtgtatgctgtaaaaatcttactgttccttccagagcaccaagtttagatctctgaagctttccttaaaccaactgcacagaaatgttacctcatcagggtttctgcagcactttgtatactacccctatcacactgatagtgacaatcgacaacctcttgtcccctcattggtctagtgttaagctcctacagaatcgggtggggggggtgtcttaatctcttcagcgtcccctgtgcctagcaatgttagttgaggtgaaccaaaacggctatcctctcatcattgaaaacacagaaaaaaatggcctttttagaacccaattacctattttttctcttctttttcaaaagcggaatcttttcttcaatctactttttacttgtggaaccccaatctgaaaagaagatcgaggggttgggggatgctgagatctaccctggtaatcacaacacttatgataacacaggtaataatctattagtgcctgtacctagtaggtgtctggctacccatgaaacacatttatctaattctctcaacctcttataaaagatgtaccattactactccattgtattgctagataactgaggttcagaggacttaggtaatttgctccaacaaggtcacaaggccagaactagaatacggatttcactccagaccaccaaatctgaacctctacatgcaatctggagatatctggatgattcagttcctttagtgtggctcagaaacaagtaacccggagttcctctgggctcccatttgatagagactacggtaaagtgtaattgattagacgtggaggtggaagcatccccacgagaaccatttcctcatgatgctcctgtcaccgggaagtgttttaattttaactttatttttattttaaaatttatttttagagacagggtctcactgtgtcgcccagactgcagtgcggtggcgcaaacactgcaacctcgacctcccaggctcaagcgatcctcccgcctcagcctcctgagtagctgagaccacaggcacgcgccaccacacctggctaattttacattttttgtagaggcggggtctcgctttgttgcccaggctggtctcgagttcccaggatcaagcgatcctcccgcctcggtctccctaagcactgggattgcaggcgtgagccacagcgcccggccgctgtaactttaaattgcccgggaggactctgcagcccaaccctgcccacctcacccggtcaccggaggatgcctgtcaacttctgggagctgcaagcgcgggccggccagtcgtccgcgcgcggctttttcttcaggacagcggaggcacaccgtgctttgcggttcccggaagtccttcaggcctcagacctgtcagcccgccacactccagccagtcccttccgatcacctccagacaccacgctctcctttcggagcccgcccgccggaagtgacgrcccggaactactcccacaggggggcggggaaggaagatggcggcgyccagcgtcccgtgaggagagaggacacagggatcccggggagcggccccagactcgtaaattatggccgcatctccgcacactctctcctcacgyctcctgacaggtactgtacccgccttgggcacgaccttgggggaaattcttctcttattaccacgtgcgaggccgtggttccggctggctgcaaccttggggagcccttggcgaggttggccggccaccggtgtggtgggggaaatgacctctggagtagcttggagtgaagaggycacggagctagggtccaktcttgcactgtggctttagtggtccacacagcctcctccatccggcttctgcggaagagcggtgtcttcctgcttctttaggttttcagatagtggaagctggaggagagggcagagcagaaccttggggttccacagtcctccttatcagagcctcggcttctagccactggcttgcaatgacaaggaaggtgctttgcttccactcagaagccttgttccaatataaagggtcatgatgacaacgttgatgataatgacagttgcagacagcggagtgtagkccccatcagacttttgtctctgtaccgccagagtggtctttaatatcctttcactcgaagaaactagtgacaaatgtatattggagctggaatgttcttccttgactcttggtaatggctcatctcaaatgtcaccttttcagagaggcctttatagagaccaccctatataaactagggccccctacttctttcttttcacatcattccatttatttctttcattatggttagcacagtctatacttgtttatttatatactcgtttattatttgtttttcccaactagaatataaaccttgtgatggcagggacagtgtccatctctggtttacctctgtgtttccagtgcccagaacagtacttagtgtacattgtttgctcccaatagttatttgtggatggatgcaatttgtccccatggagatcttaaagaggacgttagatgattaactaatggttgtgtgaggaatgtgatgccggtggtgcatattagaggccagataagagaagccagggactgccttttgatcacatcccagaaacttttttcacttgtcacctaccacacacaagctctctgcaccatctggtgatgttgacactgtgactccatgaaattgcgttcttcgttctttttcataatgttattttatggctgtcttctggtctgtgtgattccagggcaattcatttgacttttctggaattgagtttactcatctataaaatgacgtaattgaagtaggtgatctcaaaggtcctgtttggtttgtaaagtggagaggtagaatagattggctagggtctggtaattgttgaagcttggggataagtaatgggggctcatggtactcttctgcttttacacatggctgtgattttccataatgaaaagttgttgtttgttgttttttaaagtcctgtgattcttttttgaatcacttctttgttacattctaccatacctgactgtgaatgttctttgatcctgatcctgggcactcattctcagagaactcatccttttatgttgcttcaaatatcttctctgtatggaggtttttccagcatgcatccttcagattagctgtttttctgcctttccattctatattgtcagctataggacaattctgcttgactactgtgaattgcccagttccagtaggtgggctgcatgtggcccatatggtttgttgctgcatcagtctttgcagtggtggtatggaaggaattaatagacagcttactccctgaagctgtgaacataattgccaaaaactctgctagtaagtggtctgtataactccctgtgatccatttggaagatctactaagagagcttgatggggaagcagcatggtgggacaaggtggcagagaaggtaaactgggacagtgttagtgatcgagtagtatcatgcctgattttgcttctaaaagttctaagtattttacagccatttaaaaactgtcatcactggccgggcgcagtagcttacacctgtaatcccagaactttgggaggccaaggcaggtggaccacttgaggtcaggagttcaacaccagcctggtcaacatggtgaaatgccttctctactaaaaataccaaaaaaaaaaaaaaaaaaaaaattagccaagcgcaatggtgtgcacctgaaatcccagttacttgggagkctgaggcaggtgaatcgcttgaacccaggaggcagaggttgtagtgagccaagatcgtgccactgcactccagcctgggtgacagagtgagactccatctcaaaaaataaaaaaaaaattaaaaatgtcagcattttttagctgtttgtctccttacctaattttaaacgtcctaaaatcaggagccagtgttgatggtgaataatagatatggtcttatgcttccagaattttaatgtatctattataatctttgtgtatctctaaacttacatttgtttacacaaggctgaaatgtctttcagtttctaggcactgattcataaaaatgtgacatgtttcaacgaaatgaaatgtcagtttcatagctgttttttcttcttactaccattctgtaaaatctcagtttgacccacgtaatcttttttttgttgttgttgagatggagttttactcttgttgtccaggctggagtgcaatggcacaatcttggctcactgcaacctccacctcccaggttcaagcaattctcctgcctcagcctcctgagtagctgggattacagacgcccaccaccacggccggctaagttttgtatttttagtagagacggggtttcactgtgttggccaggatggtctcgaactcctgacctcaggtgatcccccaaccttggcctcccaagtagctggaattacaggcatgcaccaccatgcctgtctagttttttgtatttagtagagatggggtttcaccatgttggtcaggctggtctcgaactcctaacctcaggtaatccacccacttaatcatgagagttattttccaaggtggttccaagacaaacacattttcatgtttatggaaaacaagcatgtcataattaactcaggtttgagaccataatttcagtgaagaagtgatttatctccagtctaagaaaattgtgatgtatttcttggggttgtgatagttctccttcccatagtccaggtgtgctgtgtgggctatctagtcatcaaacatcatttccttattatataaaagtgctctgctagctgttgtacaaaggtggtgagtaaaggagaattcttgccatcaaggaactaaaaaattagatgatgggaacaatttgcatgaagaagtgtcatgcaacatggcataaagtgatagagtagttgacaaagacagaaaatttgacagagtggtgtgcaaataaggaaacgatagaaacagatgaacaaattgtgaaacgtgtggtgttttcagtggagggtcatgggcgatgttgctttggtgggttgtgtgagtaatatgtatttagtaatatgtaacaggaagaaaactgttgcctctgggaacgtggattggagaggaaaggaagtattgaaggcaggaggactggcttgaatgctgctatcgttaccatagtccaaatgtaagatgatgaatgtaagatgatcagtaaaaatgggaagaagtggacagatctgacctatatttcagagtagattggacttgatgattgttaattgataacaggagagttcaggatgttcctgaagtcttcagatgttcctgaagtcttaagtaatggttttakgtacaatagggaacagagtagagattggttgagaataaaacactcttaaagacattttgcaatccatccatatagagataccaagagaggagatggaaatagacctgatgactctagaaatggtttgaagatcagaaattatcctataattacatttgctcagggacaatatttaatgttcagaaagagggaacatggataccttaaggtggcatacatagcaagaatagacaccatctgcaactgagaaatagaatgcagagaaccaggaacacttagtgtcatggaagccttcgggagaatctgtagtgttctatggcttgtcggaggcttgagtaggaggaggaccaaggcagagaagcattggatttgttgatacttgagagaagtttcagtagaatgactaaaagccaaatttagatacaataaaaatagtttattcctaactagactgatagagtcatactctattgagaactgtttcttcttcccttttgttgtcttaccctacttagttaaaatattaacctgaaatctatatatttcaatttattgtcatttattaagaaaaattgtgctttttattttctacttttgaaaaattgactgaacgggttgttttatattttcttaagaagatatgtagcgtggtcatttcagcattaaatgtagtaaagcatagtgatcctgaaatgaaaattttccctggcccttctgaagacctacacggacttaaacaatgartagggctggtaaattgcatttattcacaaatctggattagattatttcaaagctctgacccatcacacagtgtagcgcttaccttagtggctggctttgcttctggggaggtgtagtcatcatttgataagaagtacgaatcatttaacctttcttccacttctctctctattataggttgcgtaggaggctctgtctggtatcttgaaagaagaaytatacaggactcccctcacaagttcttacatcttctcaggaatgtcaataagcagtggattacatttcagcactttagcttcctcaaacgcatggtatgtttagaagaccattcttactctgttactttctgcctttatttttctctgttgagagaatttcagaaattcctatttaattaaagttttaagaaatactgtttgaaaagaacttttatttagtgtccttaaatttatccaaatgtcttgttttgattattcttaacygaaaccagaataattctggtgtttgaggttaaaagtatgatcctgaacttattgattaagtttagagaaagactgaaaacttgtggcatatttcgacctggccaaaattgggaaaagctgaactgttgtgatacatcttttaaaattctttggagttctgtgactatatcagtaatagagaaataattgctttaacagtgtgaccctctcattttcttaaatcagcagtacatttaaaagtcttttttaacagttgcacttctgagtaaattcaaacaattcgacagtttttataattttctagcattttataatagacattgataacataagtcaatccaggttgactccatgaatttgtgggcaatatggaacttactattaattgccaggaaggccatttgcattttctcagatggaaaagggtcatagaatggcaaaatgatagctgaaaactcatagtgccagcctgaaagaacggcagacttataatttaaagtcctattttacatttctctcatctttaacttaaaactttaaattaaaatcttaataaaactcgatatgttgataagagatttaaatttctagaaatgttcaggctttttaagttgggggtcaaggataatggtggatatttagaggagaaattcaaatatgtgtaatgcccttttttatgtaaatggaactcttcattcatgagtttataattctttattaagactaatgtatgtaatttcaaatctttgtgatgtgatggaaaaggcacttaactagttatcagcataggtggttccactcccatgcctgcctatagctggttgttggctgttgatgtatcagtttatttctgaggcttagtttccttatctgtaagttaaagagagagaaagagaggagatactaataatgatctatcttctttgacaactgtttagaagattaaatgagatatatattatataaaactgtaaagtacttcacaaatattagcagtagttattaattttgctagtaagtggtagagactgactctacagcccacattctgtcttcatcctgccctgctataaaatcattcagccggccaggcgctgtggctcacacctgtaatcccagcactttgggaggccgaggcgggcggatcatgaggtcaggagatcgagaccatcctggctaacacggtgaaaccctgtctctactaaaaagtaaaaaaaaattagccaggcttggtggcgggtgcctgtagtcccaactacttgggaggctgaggcaggagaatggcgtgaacctgggaggcagagcttgcagtgagccgagatcctgccactggactccatcctgggcaacagagcgaggctccatctcaaaaaaaaaaaaaaaaaaaatcattcagccctggattatgccttaccactgagcccctccctatgctgtttgcctgagaacatggaaagtcaacaggttgacttgggctcttttttgtcttttttttttttttttttttttgtgagacagggtctcactgtgtcgttcaggctggagtacaacggtgcaatcacagctcaatctcctaggctcaaacaatcctgccttagcctcccgagtagctgggactgtgggcgtatgccaccatgacccactaattttttgtttgtttttgtagagacattccctatgttgcccaggctggtctcatactcctaggctcgaggatcctgggattacagtcatgagccactgtgcctggctgggcccttgattattgaaaacttttttattgtatttggaatgttaagcctccagggaaaattctggaggagatgaataacaagtaaatttatttttctttcaaggaacatatatttctaggcttttctaaactacagaaattgaaaaccattactgaggcctaaattttattctccatatctcttagtatagtgatttccatatagcactctataaatacatgccgaattaacagatattaaagctgtgggaaaagctttcaaataatgtaaaagctggtctgattgaagatgttgctaaataaccatttgagagcatttggggccttggttttatagtaatgtgtgcttttttgtttagtatgtcwcacagctgaacagaagccacaaccagcaagtaagacccaagccagaaccagtagcatctcctttccttgaaaaaacatcttcaggtcaagccaaagcagaaatatrtgagatgagacctctctcaccgcccagcctatctttgtccagaaagccaaatgaaaaggaattgatagaactagagccagactcagtaattgaagactcaatagatgtagggaaagagacaaaagaggaaaagcggtggaaagagatgaagctgcaagtgtatgatttgccaggaattttggctcractatccaaaatcaaactcacaggtactttgtttttctgatatacttacttatttgaaactctatctttagtgaaacaaaaagctaattttatttaccacctgaaaagaataatttggaactgcaggtcctgtcttagtatttttcctctcttcaatttaactgggatttgaaattaaattttctgaattctatttacacagaattgtaaatagtattgcattgtaagtattgtattaaaaatagtcaccctttcctttgcaattaaagttgaatgtttatcctgcttatttccttgtckttagtgtttttacacctgctgtaaaaatgcataagataatacgttttgtcaacttgagttctggaatgggaagaattgcactactgggcttgatatgaatccacagtggccactgagtctcccagttcacttctgtgttttgcttcttgtagagcctctggggttgtcacaggtctgtggggatgtagggtgcatttttcctgaaaggagatttggaaccagattttgttttttaacctaattctagcatcctgtgccaaattgtattgccataattaagtgatttggttgtcacagtcaccctgtaagtcagacagagcattattattatcccatcatatagccaagctttgacttagcttattctgggctaaccctgtttagaaggtatgttctgggtcatgctgcaacttgagggagacctggtttattcttcttaaatgagaataaagagactgaatataatgtatgaatagtaagagtaagccaggcctctttgaggacagaaagtggtaaataatgttagagtcagatgaaaagatgagacagggaggcttttgagagcagagaaggatcagggaaagagtgattttttttttttttttttaaagagacttgagcctgaaattcaaggcaaaaggaggtaactagacaacttctctccttagtgaccagctttacttaaagaaagttgtttttgaagaaatgatgaatagacacaggggctttggtgaaggagctaaaaagtcttagtaagacttgtgtaatgtaactctaaaacagtgagatgaattctgtgtgataagcttgaaaacatgtctcagtggtttatggtcactaagcaacgaatcagcatgtttctaaagaaactctcttttgtcatttacacaagtggcctgagtgtcatgctgctgacaagttaagaatgactatagataagttatgcttataatgctgccaccccaaaaatgaggcctctcagcccgtaggcatcagatgtggcctctgtcaacagcaggagcttcatgtgtgccatcacttagcacatccaccctgcagattagctctcgtctcttgttgtcccatttctgtcagttacagcattcttcgcttccttcagaggagaaaccttagaaccagtcttcttcactttttgctctccgctctccccttcatcttgagtctaatttctgtcaccagcagaatcttttgtaagccctgtgacatttgctttcccatcctcatttctgaagctgccatcctagtttacattggaaacacgggaggctgttggtttttgcagcagcttctaactgttctttcttttgtcctccgccccgcttaccctgccgttcatgctgcccagcgttgccaaactaacttacccaaaatattgctttcgattttcctaacttatacgagtctatagtttctccatattagcttctgtctcaaccctgcttagtgttaaaggaacactgtaacctggaatgatcaaactgttcctcagaatcaaccttttttccctttccctgtccctccaccctaccattgaggccagtcctttcaccccaccatatttgttcccccgcctccatgggaaactggtctgcctgtcttatatccagtcagatcctttcaaggcctctgttaatcctgctcttggccccagtctcccttttcaaaacttggaatatggctttgaagtcaagcacacttgagttcagatcttggctctgacatttactagccagtgagactttgggcagttccttaactttattgagatgatatccacatctataaagtaggaataataataratcatttaagaattaaataattaatgcatataaagcatacaacagcatgctggacacatgggagacactgcaagtttccaaataagtataggtgaacatttgattgtctgcttaatgtgtattatatttcccctaaggttgtttttgcctgtggagggacttgaagtgaatgaatatttactcggcagggaagatgagaaggagaattttaagtagagggaagagtctttgcaaaagcaaaggagtctcagttatcctggcacattcaaaaagctgcactgggactatgagtagcaatagtatgacctgagtatcatataggagaggtgcttattaagatcgaagagttaggcagtggtcatgttgtcatattggcatgtatatcaggctaaagtgttagatcatagccatggaaagttctggaagcttctttggagggatatgatcactttgtgttttgtcttatttaccttttacgtattttaaaatttccattaaattagtataggcttattataaaaaagaattcaaataatacagaagcatatattttaaactaagaaagtatcctttcccaccattctagataaaaacccctgtgtgaaatgtcgccttctctatatagacacatatgcagatagagctatggttgtacattttcttcaaaagaaataggatcattttatatatatatatatatatgtatgtatgtatgtatacacacacacacagttttgcaacatgccattttcttatgacagtatagttttcactgacaatattcactgcatactattccattgtatggatctgccattattaactagtcttctgcaggtaaacatttgtgatatttccagattttttactattaaaagcaactctgttacttttacgtatacgtctttgkactcacgtgagtctgcctttaggatcagtacttagaaatgtaatagctagctttaaacatttaaatctttgatgaaacaacaaatttgtttctaaaaagatagtataatttacccttcccctcaacagcatttgggaattagactttcttttttttttttttttttttttgagacggagtcttgctctgtcacccaggctggagtccagtggcgagatctcagctcactgcaagctccgcctcccgggttcacatcattctccttccttgtagctgggaccacaggcacctgccaccacgcctggctaattttttgtatttttagtagagacggggtttcaccatgttagccaggatggtctcaatctcctgacctcgtgatccacccgcctcggcctcccaaagtgctgggattacaggcgtgagccaccgcacccggccagcatttgggaattagactttctctgtagagtccactcctgcataagcagtctttaccagtttcgccaatttgatcattgaaaaaggttttgtgtgcgttttcattatttacattttggtaaggtttagcatcttttttctattttgatcatttgtggtttttcttctgttatttagctcttatattcttggtcattccttattgactttttagaattctttgtaaataaattagcattttatacatcatattcattacaaatattttttctcattttgtccttttctttttttatggtattttgttgttttgttttgttttattttgccccatggagatttttgacttttatgtatttgtttttttcatgcctagaaaggtttcatcaccctgtggttacaaaaacattcactcatgttttcctctgatgcttttatgtttttgcatattctctaatgctttgaagccatctggattatatttcagtggaaggaataggcttgattaagaaaactgctgtggtagtactatagagcaaggatcacctgtttttgtaaatgaagttttattggaacacaaccacgcccacttgttctgagcatatatcatgccgcagtgacagagttaattgcaacagaaaccttgtggcctgggaagcctgaaatgcttactgtctggcgtttacagaaaaagtttgctgaccttctgtcggagagcacagactagtgagagscaagaatgatggcagacaaatagtggtggycaactgagaaacgacttgggcctgaactgaggctgtggtggggaaagagaacaagggagagagagagaaagagagatagatagagagaaacattaaggaaatcgaatgagtaggaccttagctagatgaagtggattgctaaggagacataaaataagagctgagagcrcggagctgcagagagtttgaataccttgaggtgaagcaggtattttccagctctgtgggcccttttgtcatttattattctaggctctatcctgttctgtgagagtcagattctaaagtcagattccctgcattcaaatcctggctttggctagctgactgaccttgtgcaagttttataatctcaccggcctcagtttacccatctgtaaactagggataataatagtacttccttcatagggttgttctgagtaataggtgagttaacatttgcaaatgacatacaagtgcctagtacatgtcaaaaactatacacatatttcttaaaaaataaatttaatacctggctgcccccactggcatttggatttgctgcccctgctctagacacaattacgggcttctggaatgaaaaactagatgaatggtggtgttgagacttaagagtgtaaatatggaagaaagaaaaggtttaaagaaaacatgatgagttcaattttggataagtggaatttgagttgctactggcatatccaggtggagagacccagtggggcagggggctgtgaaaggcaagagctcagagagaatgttaggctggaagaaccaggggtcttcagcatggagctggcagtgaggtcacggtagtaaatgatgttaccaaggatcagtgtgtacagtgaccatgctgatggtcaccagaactttggggtatatcaccttttaaggattgggtaaggtatataatggacccggcaaggaaataaatggtcagagggaggaagaccggaaaagaccctgtcacagaagccaaaagaatagaacctgttcataaagggaagtgatctgggccggatgtcaaatgctggaggtctcctgagaagcctggctcgtgagagtcattttatttgccagttaggaagtcagtgttgactggttgctaaatcagggaatagtgattgctgtgtcttcttagactcttaaatgagctgctttaaataatctattttaaaataattttaagtttattataatgcttgtttcattaggaacacaggaaaataggataactagtttaagatgaacttttttcttggccacatcttccattccttcatactggctattgttgtattatttctccctttatgtagcttatatggttatatatctgaattgtcattccagatgcagggtttgatatctaaaacatagtatctgaaatctcaagaaattaattaattaattatttaatagtgcatactgtgatgtatagtgtacatgaactcattggcttccaaatgtcagcatggtaatgtgccgtcatggtgtgcttgttaaaacagtgattcctggccactgtttccagtgattcagttcccctagggctgggacaggactcagagatctgcatgtttgatgaggacaccagatgattctgatgcaggtggtcctagaccacacttcgagaaagcaaagtaggtgttaggtaggcagcgagtactagtcccagaccgagtggtctgactggatgtggagagaactcacctagtgagagccagcggagccggtcactaccactggcagcaggaaaagccgactgggcaaaatctggaccacagaagagaggcatgcaaagcaagacggatgcaccacagaaaaggggagcagcctcacctacacacacagatggaaaggtcccagggcagtaaatttcccttgtattattttatatattccacgccccaggtttctggatgaactaattgaattaaagtcctttccttctgcttattccatttaaagaagcagcaccctttgggtgacccctacccttttatctgaccttttacctctctatttagtttattacttgaagtcacatgtgttttggagtcagcaggattttttatttaagaaaatacctgatatctgtccattgatttcttttggactcttaacatctcacacgattcatttatagctaatgatagccgaggcagaaatatctgggagtcagtgatcactttcatagaactagcctttctttctttccctccttttgtttatagctgtaatatacggaggataattaactgtggaataagtgaagggccagatagtgctcatacttatatttcatctgtgggttagtgggtagcagcagcctgatgccttggcatttaggccaggatatgagccaaacgtttgctggtgctaatgccatttaaagatttttatttttttaaatgaagggaagtaagactgagattataaaaaaggaataatgtgtctcccttgagtttctcttgccaactgagctatttacaatatgtttttggagtttgttgcatggaccacactggggtaaagaaattttatttggattaggatcataagaggctttggtgactcaactgagtttatacttaatataggtcagtaaaaagcagaacttttttcctgagtaacatctgtgctgaaaagctgcaacacgttttttgagaccagaacactgaaatagattatttattggaaccaatagattatgctgttgatggaactgatatgaagtatgatctatcaatgtataaatttttttctcctagagcctagaatgctgttttttattaaaagaaaaaagcagaaatrgaggatacacgttcattttagatcgcttgtatagtttaagaagtcaacttactgtaatcttcagttattaaatatttgtattaagggggttttagcattcactgaatatgaattgagtgaattactatgatttcttgaattttactttattttttgaaataagtgccttgatatatttactaaatgttatagtattatttttaattatatgactagtaagtatttatttttagaaaaaatagaaaatacagataagcaaaaagagaagattgaaatcctcctgtaatttcaccatcttaaaataaaaccattttgaatattttgatatattctcttccagaaattttttctatgcatctcatatatttttgctttataaagaaatatacgatcgtagcgtaaatgccttctgtgactgaaaaaaattaatattctgcttatgtctttttgtgtatcaacatgtttaccctgtttttagtgacttttaaaatttaaaagtaatgttttcttaaaacgcaaacacataatatacagaaagtcccttcaggccatgcaataaccaggctttttattttttttgagaaaaatttcgctcttgtcacccagtctggagtgcaatggcatgatctcggctcactgcaacctccgcctcccgggttcaagccattctcttgcctcagccttctgagtagttgggattataggtgcctgccaccacgccagctaatttttgtatttttagtagagacggggtttcgccatgttggccaggctggtcttgaactcctgacctcaggtgatccacctgcctcagcctcccaaagtgctgggattacaggcgtgagtcactgcacccggccaataaccaggctttttgcatacagtttttcagcctttatctgttcatagtctgtgttttaatgttagcagtacagcctctggagtcagactggctgggttggaatccctggtctacaattttattggctttgtggttacaggcatattttttttcaagtctctaagccttggtttacttgtctgtaaaatggggataatcctccctgaaaggattattgtgatgattataagcaataatgtaagcaaatgattcactgccatattcagtaaatgttcaagaaaggttagttattattacgttagtgcatagatagtttctattttgttttataaaaatggggttatattacatgttttgtttagttatttgctttcttccctaattggtatatcttcctcatacttcctcatcaatacaattaaatctaccttctttttttaaaggttgatagtattccatagtatagatatatttagtttattgaaccatttccttgttaatggacatttaagtagtctcttacttcttgctattaaaaataaagatttgtaatatcatttaacatatatccttttacatatttttttctcaaagttagctgtakagaagtatacctttatttttgttgggtatatagcatgccattgcgtagttataccataatttatttatttctcctgttttaagtgttttttattttattatccttattatacatagtactataataaataagctaaatctataatgattttctgaggataaatgtatagaagtggtcttgttagagcaacaggtacgcatggttttaaagctttcagttttcattaacagattcccctcaagaaaagttgcaccaatttgtgctagccacctcaccatatcttcaccaatgaatgcttgatgataatgtattcttctgaataactctgtcaattcaatgtgtgaaagtagcacttaagtttttaattttgtacttaattctgatgaggttttatatttgtcatacgctgagtggtgatttgtattgctttgttgatggcatgtttgcctcccagccttctcttctgtgtttgtctttgtttattgtttgtaaggattctttatatattcaagatttgatctcattatatatatctgtcacaaatgtcttatgttgtttgtgtcttgttttcatttatctttgttttcatgtgcaaaagttaattttatgtaaccaaaggtattttcttatgagtttctggtttttatactatgcttagactttcccacatgaagattttgtaaatacagtatttatctgcattgttaatattatatttttatgattttatattgtataataaaatttattattgataagaaatgtagtttggtcagtggtataagatagagatattgccagtttttaataaatcattaaccagtgtttgaatgttctattcacaaagagtttgtgaagctctgtgcctggaataaatacctcaattctgctaatgttttaattgggatttcaatgtttattcggggatgaattgagaactttactgttacatcatcttcatttatacaagtcttcttttacgcctcttgagttctatagttttacttaaatagatcagtacatgtattgataagtgattttggaagtatttaaaaatttcttttcagttgattatttcttgagtttttcaggaatacatcaaataatgattaagtttatctcctttttcatgtttatgctaattatttcattttctggtaattgcctctttgtttagttatttgctttcttccctaattggtatatcttcctcatacttcctcatyaatacaattaaatctaccttctttttttagagattgatagtattccatagtatagatatatagagatactctttctactagctttcttcattataattttccgcttcattctgaagggtcttctgaaatgtgttatgtagagtgctgacttgattttgttccatctatttattacatctcatgacttttaacattctgctgtggcagtttttgtttcttgtactactttccttaacctactttgtttcatggggttaggttttttctagagtgtacaaatttactttttctgttcattcagctgatgtttgttgagcatctattatgttccaagtatccacttctgagtgttgtggacagaataaggtgcaggtggctgacagtctctgtcctcataggtcttactcttcaggaggagtttatagtctagtgggtctgtggtaaatctttttcaaaatatattcagcctcttattcttccatgctacttttttttcttttgtaccgtagagtcttttttaatgagtcgcatattgattcattttacctctctgtatctttctcccttccggaaagaagacaacactatccagacagtagttacaccccaaatgaatgtaagctccatggggtggggcattttgtctgtttgcactgttctgtcttctatacctacagcagtgcctggcacgtagtaagcgctcattgtgtatcggttgaacggatgcagggttggatttttattcatcacctaacagtttcacttgttggagttcgctcgcattttaagtaagaggaaccaaggctatcagtttgcatttactggtttagcagttctgtggcctgatggagggaaggagggcacaacaaacgagggaactttttctccgaaaggttttttttttttttttaaaccatgtctctgaaaccgcagggccaatgtcctgtttcccaaatctggtttttagtgtcgtctgcttctcctctctgcatatggtatgtctgtgtccagcctcttctctggtgctgtggcctgctgagttggaagaataccacagtgtgccaaagtatggtggcaatgggtggcttgctacactgtgtgaagccatcagaaaagtgttctgccttgtctcagtgagaattatgtcaagttgaggccctgctttctcattttggcaygaccctctacccctttcagtccctctagctgtgatatagctgcctctaagctctcctgcactgtggtgacaaagggactttctggggagtgggctcatctggccatggctcaccctggcttctgtccttgctccttaccaggaaggaataatgagtatggttagaatagccttgatttcccatatttatttcccatatttatccattccttattagtagctatttatgtagtgtatttttttgctatttawataatgaatgtagtgacccagtcctcagtaactgtcttcagtttagtctcatctgtgctatatttaacaaacgcttcttgaggtttttagtatcctgtctttacctaatttattgcttctgcagatttttcttcaattttcatttttattccatcatttcagttggtttctgtggggctggggctctacaaatgctttagccaaagttccaatttagacagaaaaaaaaaaatttagctaggctactctgttttcttatgatttatttgttaagatgggatttaattgccttaagttcaatttgattttaattgaactgattgtaagtataagatgctatggtagatgccaggggaaggtaaagataaattttgtaagaatgataatcactctcaaaatatattgagaactttaaagaagaaaaaaaactgagttgagaattggctcaacatcacataagtgaaaatttgaaaaacaatgacttaaacaagtaaagggtttataatttcatgtgtcaaggattctgaggttaggagtctgtagatggtgcttaaggatgttgccaacatacctggtaccttctttgtctgttatcattagcttgtggtttttgtcctcagaccatgagatgacttccataccgtcatcatcatattgtattctgggcagaaagaagaaatgagaaggaaatgtggaaaggcagaaacctccttataagactttgcctcttaatttgggagggaaagttcttgataggaatttattatgtctcattggccaggagtgtgccacgtggctacctccagctgcaagggaggttttaaattatggcataattcttacatctatcattttaaaagcccaaatatcttaaattcagcctagtcaactctgccagtagccaacttctctgtcctgatagccctcactgggctctctcattattcagtacatccccttcttggaggaggacatgaagctgcctgcctcttctctacccagtttttccaaagaaaaataaaataccactctttagtctgctctgtgactaccaccacatatgtgtgctttaaatgcagtatatttaaatgaagactgacttgccagcttggcatttacttttccattagtggttgtggatgtgtactgatctggcagcagtttctccctgtcatcttgataatcaaatacacatttggagactcctggtttgggttgggttatatgtagtcagtactggactgtccaacagagctagcccaagtgtacatcttcatgaaaaagtgtaggtggttgatggaacttcagctaaaccagaaagcaaaccaggtggcaaagctgttagtgaacgttgaagaagttgaagaacaccgtaagctttcctctctctcacttcttgttgcattccaacagttgttgaaggctttgccttcttgctcagttttcttctttatccaagattctaccatcaacctagaaaacttcactatttctaggagttctcaaacttcatatgccttctgagatgcttgttataatgcaaatgtgtagccatcacctccataaattccttcactctgggtctggggtagggtctagaattgtgtattttaatggtccccatagcatactttgagacacactcttctaatctgtagaaccrattcaacactctctcctagctctttactgtcagcacactgccttgcttcccattactcacaagaatatgtttatttcccattaagggagacctctgcaacttacagctaacctagtctatctgaattcttacctttttttgcttcttctctcctctgcctgttctcccgcttgtccccttcagtgggtggcactttcagcctgacacctggggtcctcttagattctgcaagtccaagcagatctccctctatctactatgtggagagaatgttatctgaatcactcgagggaagcaaatgattgcctctcaacctgcaggtcagacttgcctgggtgcttaataatcattttgggttttatgaagggcttggtttttacttcaaagcaaagcattgtagcatcttatttattaagattaaggaatgaaacacttaagataaatgaattttaaaagaatgttacaagattgtctcttatactaagaaagtttttgcttaactgtttattttggaaaacctttccaaaatgtatataaagttttaaatttactagtagctttaaaaaatatattaaataagaaggaagaatagtaaacttgacaattaagaatgaaaagaagaatgctgcatgtcagtgagcttttacaaggatgcagagatgcatttttgttcatagttactctgagatattttatctgtagatggagagtgactacttggagcattctctcagcctgtggattttgtgctttctgttctctctgtctcaaacatgtatacctcaccatcttacgtgtttgccaggttaactcctttttatccttcagtcttcaactttgacatcacttttgggaagtcttctgggtttggaggtccttctatgttcagagttcctcacctgctgaatcactgttaccttgtgtaataattaatgcctgttsacttttctgaatctttatcagagtgaaagccccaagagggccgggaacacatctgtcttgttgactattacatttccattgcccagcgcggtgccttgcaaataataggtgctcaaaaaatagtagctcaatggagaaaagaagtgtagcgaactagcttgccaccatttgtagaattttgaacagcttagccttttaattacaaataattattttactgtactgtagtagtttagtggttagtgatgacagaaagcattgtgtctaaactgttaggcagctgtgcatttatagttacttggtctgcttttcagtgtctctttcaactgctgtcattgtgtcttgaagtttttagtctgttacgcgattttgtattcaggataattgtggaggattggagatggccccactgtgtttttcttaaagttcatcaaatttgtgaaaactgtaccagtgggagctcagagggatcygcaaagactttgctttgtcctgttatcagtgaattgctattaggtttgacaaactattgattttcagttttgcttaaaggaacagcaacaccaataagggaagtcttttagttgttgatcatctcaaaagtatttctaaaagattcttgctagaaagctcttttgaatgcttagaataacataaccaacattcttgcctaaccaattaataggaataaatgaaaattcccaaaggaaaagaaaacaatgatacattaatatatatgtatgcagttaggtccagatgtaaatcatgagtgagtaattgcacagaaattgcatcctgagtaggcattctaaggaagttgattcttctgcagtattttygagatttaaataaatgtaaaagcattttactgatttgttatatgtgttctgcaaaataagcacaggtagctaaacgctaaataccatcaaagtcggaacgatacttgaaatggagacttaattctttaagtgtttatcttgtacaatatctgctctctggataaacacagttgtaattttgatatgaaactgagataaagctttatttttgtgaacactgtccaactaacaatttttttgccaaactcagttttgaaactacatgtttctgcttcttaaaagtttcagttttgttcaacagtttataggcaccagttttatggaattttttaaagttaattaaaaaggttataaatttttggttattgagtatatgaagtaaattgagtttctttattgagaagaacaaactaaaacaggatgataaggtagaaaagctctttggttcaaggaaaagcgataattgaaagaacaagcttaggatctcactcagtgttacaaaattagcttaatataacagcttttatttatgtatttatcaagcccgatagatacttcattttcctttttctgaatgctaattgtaaatgtcaaccaaatgcttcctggtgaactgccttggtgaccatacttaaatgcttcattttggaatcagtattgcttagtaaatttgaaggtatgagatttaatttggtcctaggactttcagtctaactttcatcattaattgtatgaaaaataagaaaggaaaacaggaagccctrataaattcttacctttgtggctgtggtgttaaaaacctgtattaaaagtcttatcttttaaccagaagtggttatagtttgtaatcagttaggcccctgattgataccttttaatatggctgagaaaaaaatagcacgtctcatatcaattgacttttcatctgaacttaacaataagcatgagaattaccaccttctctgatatgtctcttgagaagacaactatattatgtggttcacagaatgctgccaagctgtgaagcctaaaaaactcacttaagttagaaattcaactatttgaagcttaaggtgctaataaaaaagagatgaaaatcattaagtacagctatttagtaaaaagtacactctcatttaaaaatcaaaaaagacttaactccttcctctgaattaagttatataattttgacctttgaaatctactaacaaaagcttaactccttcctctgaattaagttatacaattttgaactttgagatctgctaacaaaagcttaattccattgcttgggcacacacataaacaaaaccacatacaaattcattaactgcctactcttggtcagctttccacgttaaacagctttaaagagattatatctcaagtttatgggacttggattacagtgttgcatagtatctgctatcaaggataatgagatataatagattacaagggtaatttgaaatctatagaaaatcttagagtttcatttagccagtggctttaatcttgctcccagatcttttatcagaattgatagttatccaacttgattttttggacttttgttttttctcttagttcttttgtggccagtgctaaaaaatagtgagtcattaagacacagagaaataagaaaaggaagatgtagctgacccattttttaacgtaatctttacagttatttttagttgatgattttagaaaattgagtacagtcattatgcttatgcttagagaccaatactcccaaagtagtgggacttaaaaaaaaacaaattcttgataaagttgcttcttcaagaaaacctcttgcatattggaaaagctaaaacatttcaagtggttctctgctgccctgcaaagtatactgtgaggttagaactaggggcctggctaaatttgtactgcgagtcctgtaaaagcctccatttatgggtgacagataaagccccttctgttgcagaagtaacagcatgcatggcagggctgcttctgcccacctccagtatgggactccctctgtgactccttccaattcccccttacaatctagaggaagaagcgtcatcatggatcctatgccagagatacagtgttaaagcctgtcttgcctggtttgtgattttgtgatcagctaggtgattgtgtgtttgtatgtgcttcattccttcagttagtggaattttctttttctgaaaatgagtctttgtagtacttactaaagaatattctggctgggcatggtggcccatgcctgtaatcccagtgctttgggaagcagagtcagaggtggaggaatcacttgaggccaggagttgaaggctgctgtgagctctgattgtgccactgcactgcagcctgggtgacagagcaaaaccctgcctctgaaaaaaagggagagccaaatattagacataaaccatatgattctcttgattagaccctggtagattttactaccagtaatttgcwcatggttgtccatatagaaaatcagacattagtacctacaattgcttgctttgctttttattttagagccagtttctccagtttattagtcctgtactttatcagtaaaaagaactttaagtgtacttatgtatatttataatatttatgctattatatataaatatatataaatggatagttacatataaataaaattcatgtattcttacactgatatattcattttaagatatgcaaaatgtgggtttaaaaagaaagggttaaaaaattaaacataagtgaaagttctcctgttttcttaccatgtccctgtggtatccacacctttctttgaaatgcagtatttttgagattttaataaatgtaaaagcattttggcacactgaagtgctttgcaaatgtaagttttgtttttatcattattatttttagtctacatttattaaagggttgctatctgttcactcccctggaggagacagagagataacttagattatagtacagaagcatacagagtgtggtgtgaagtgttttgttgtttctctaaattcttttagcactgctttgaaatgtaaagtccaagtgcagtgaccagagaaatatttcacctataattttatgaaccacatttaaataatttccaagagcactgcttattaagcccttattatttaccagacactgtgctcagtgcatttgatatagtcagaaactgttgtgtctgtagaaggtgcccttggcacggacaggagcctggaagtcaagtatagttggttactagcgacatttagcttggagggacagaaactgtaggaatagtgggatttgcataattgaagggttgtgctaagaaaaaaaaaagttaattcactgctgctccagaacacagaaattgcatcttaagtaagtatttcacggaagttgattctgacttaattggagaaggaactgtcgaacagctagagctcttctgtagcagaaggggttgcccaaggagaaataatttcctgtcaccagatttggagagactatacactgagatgttggagaaaggatttacattaggagagaaattagactagttgaccctaaatcctctttgacctttttggatttgattatttgaagtactgaattatgtttagctcctttgtagtagctgcttaaaagtaatgaagccctttgtcaccaccttcaaaatacttacagcgaactctgtttgcactgttgccatcctacccaggccctcatcgcctcccacctagcgccctgcagtaacctttaagtggttccctgagtaaattttcctccactccaatcagtcctctgtgttgctggtagactagtcctttttaaatgttaccctcattacagtacatattaattttctattgcagtgaagcacattaccacaaatttagcagcttaaagcaacacaaagttattgtttcactgtttcaacaggtagaagtccaggcatgatgtgtctagacaccctgctcagggtctaaccgggctgaattcaaggtgttggttgagactgttctcatctggggcttagggtcttcttccgggctcactggttgttggtagaattcatttctttgcaactctaggactgaagtccctgtattccttctagctgccagcatggcttgctcttagctcctggaagcagcctgtagtgcttgctttgcccttgtaagtacatggccctcataagcagttctcattgtggaggtttgctttcttctcacccagtcaaggatgtttcagtctgttttcttttgcttatggaactaggtaatttataaagaaaaggcatttatttcttacagttatggagtctgagaagtccaaggtccagggccgcctctggtgagggtcttcttgacagtgaggactctgtagagtcccaggcagcacaaggcatggcatggtgagaaggttgagtgtgctagcccaggtctgtcttcctcttcttataaagccaccagtcccactcctatgatagtctattaacccattaatacattaatccattcatgagggctgggcccccatgacccagtcacctcttataggcccaacttcttagtactgccacatyggggattaagtttcaacatgaatttctgaggggaccaactttcagaccatagcccagggcatatctcattgtgattgtttcaaaatttttaaatgtaggtgtgtttttttttttttcttttttttttttttgagctggccttgctctrttgcccaggctggagtgcagtggcaccatcatagctcactgcagccttgaactcccatgctcaagtcatcctcccacctcagtctctcaagtagctatgactaaaggcacatgccactgagctgggctaatttagtttttgtagaacagggtctcactttgttgtccaggctggtcttgaactcctgacttcaacggatcctcccacctcagcctcccaaagtgttgggattactggcatgtgccatggcatctggcaaaaaattttttttgttttgttttgttttgttttttaaattgtgggaaacatagtgggaacttattcctggagaaggcagaggcagataagagaacatctggagcaaatgaatcctggacaacagattggacctagtagtcaggaccatctttagtgagggctgctactggatctcttttcatggagaagcttgaggttctctacctggctttccacccaggagtggggatgagtcaagctctgttggtttgggaatattactctcccatgggctcccagagtcattcctgggcctgcagtgcagtgcctctgggcccatattagatgggtcatgcttcattggcaacattgattttatgtttatttgtgaaagggcagaatacgagattaccaaataaaatataatttcaggtattattaatgagggaatagattgcattcacttttaatgagattttgctgttacaaaatgattccatgtaatgaaccccaggaaatcaatggaaagtttaattacagctatggcagtgttgtatgagaaaatcgctttggtcaattttactcgtacaatttatccgtcctcactgcctttttcaaattaattgctttgatgaaataagtataaatacattctttgttagcttttgggtttttttttttagaaatgtgttacaaaattcaaatttccttctctctagtaatagttgttattatttttacatgtattaccatttacartttgtacattttaaaattaggtagtatttccattttgtaaatttcatcattattatgtcttactataaaacaccgttcttktccctttgttagctttttataaatcactttttgtctcttctcaatttatcagtagattcagtcaaacatttgatgtactttctctgtgcttcatcaccccatcaagctctggggtgaataaaaagaataacaagatacttcctcctctgattaacagttttcctgtcatgtaactacatacccttttcaattttaaacaaaatgaactttctttttagaacatttctattattgacagttcagtgattatggggctttcttgtccactgkgatggtaaatgacttaaaaaaatttgttaagcacaatacaaaatgtggatctggatatttagagatatttaaagtataatacatcgtcccttggagtatccctgggggattggctctagtatcccatctctagtttacttatgacacctaatgcaatgtaaatgctatgtaaataattgtcrtactgtattgtttacagaataatgacaggaaaaaaaaagtctgtacatactcattatagatgtaactattttctttccacatatttttgatccaaggttgattgaatccacagatgtggaacctatggatacagaagtcttctatttttgtgactmtagattttactaactgtttatcgagaatgttatagtagattttcttttaactattacagttgtttatgagtagtaaacaacgctacgtttgtgttcaaggccttaaaatatagtcagattattttggctgatttactctatggagagaagcagtttacttagtttgattttaagagagaaacctctgcagtctccttttccctcaaattctcccattgatactatcagcctttcttctgcatggtagaattctgatacaaaagagaggcagcctggatgttaaggatttttcttctagtcctggttgtcactgacgcaatatgtgaagagtcgcctaaccagtctggagagctcttgagtcttgcaaaaaaaatgactcttgttctttaacactggcctgtccaggaggttttgcaatttatggtgtgatatctacaaagaacgaaaaagcttcctcaaagatgggtgctatttgagtattctaaatggagctttgttgtttgctttaaaaatagtgcctttcttgatggtctttaaatgtgtgcaggtaaaactaaatggcctatgacaggagagactgttcgttccccattggcacaagggtaaaatatacctgcgactactgttttcagagtcagtaatcaccatggcattttcctttgggcataagttgttaacagaattagatagctaaaactttttccagaatgtttactttgaaattgagtattctacctttgattgctgccctctgctccatgtgattctttgctgctgttaggtaccttgtgtgtacttgttgtgttatgacttgtagtagcatatatgggccagaacaggctgtacccctaagcagaggagatgtgagaggggacaacacatgctttctggcctagactccccacctcagccatgctacctttctcctgaatgtgtgtgtcttcatgacttctgattagcctctcgtttgccttcagctcctaatctgctcatcttcctgtaatctttatccgaacctgcaccctcattcctgaaccttgctctctacttatatctgtgcatgtctctcgtttctggaggtaaatcttcccccaggagattcagatgcacaccatatttgggaacaactgagttaaaggaaggaccccttgccaaaatacttgtgctctaggtactttgagttgagatagttatacttaaggcaccttacgaactaccatcgaacccagccatagtattcatttgatttagcaatatcaagaaatccgtgacccatctagatattagggaaggggcttgttcatatggtacaactataaaggattattgtaagttgctgataagactagattgaagaacataccagccaattcatgattattaggaggaactaccagtttctccagcatgtacctcctgatgccaatagtggtgccttcctgttctgcttgctgtagcccccctcatggttactggacacccatgccaccttattgtcttgatgcatgtccccaaatattctttgtgtctttcattcttttccttccccccatctgtaaaggtctgactttttcacatacttctctgcatcatgcatgctgccccttgatctcatgcattccctcaggctcaggcatggcctctaggcaactccagagcttcatgcctctccagtctctcaagtctccctcctgagctttagtttcatatttcgtctgcgttctttatatttctacctggatgtcccacggtttctcaaaacagcacatgttcctaaggccagctagcttcatcacctctttccctaatgtccttacttctgttaatgttatcattcctttccatgtcacccaagtgcatggtaaatggtaaagtgcacttttccattcattcttttttgttgttttatcttcctacctctcccagttaccaggtcctaacaattctctaatcaaaatatcccatttttacaacccttattcacaatgaattaatggcatggcctcttaacatgtttctctggaaaactctctgcctctcttaagtcacagtgcacagatacttccacttatagattgccttcttgcattagactttcagtgactctgcactgccaaccaaccaaactacaaactcctcagcttgctattctgcagtctgacatttgccacctttcctcctgtttttccagtaaatactgctctatgcctagctcagtgatagcccccccaaatacagcagtgaactacacagacaggggtcctaccttcatggagcttatattccagtgaggagtcagagtgtagtaagtgtcatgaaggaaataaaaggaggatgtgagcgagggagtaactggggagacttacgttagatgaggtcatcaggaaggttccccttaacaagtagtatttccaatgggatctgaaggatgagaaggagccagctgtggaaagaggcaaatgaaacaaaagtacaagaacccagggacaagaaagagcttggaatgctcaaagaatrgaagaagtctcatgaatggataatagtgattgagctaaagagaagtgtgagatgcacttactggcagagaaagagtttacattttatatcaggtatagcatcaaagaattttcaatgttcaaagcagcgatgtgatttgatctgttttcattttaaaaacatcactctgaagagaagcaagatggaagcaaggagaccagttagggggtaaagctcttatggcaattgcttggactatgttagggtttctcaagctcagcactactggcattttaggctagaaaattatttgttgttggggggtgtcctatgcaccataagatgttaagaagcatcctcagcctttatccactagaagacaagtagcaccctcccctgcaatcaaaagtgtttccagacaatgctaaatgtcccctggggggcaaaactacccctggttaagaactgctggactaaatgctggcagtgtgatgggtttgaaacatagtgtagagatagaacagacactactttgcaatgaacgggatatagcgagtgacaaaggagataatcaaatatgcttcctaggtttttggttgaagaatctaggtagatggtatcatgcatactttggattcttgacataggtcttcccttcccttgtgyctgttcttggaattatccakgtacctgtaatgttgctcaccctaccattctcttcctttctcttcatcctctctagaaaatccaacttaaatgtcatcttcttgaagctttcccagatttgcccaccaatggtgatcctttttccagcggatttctacagctgcatatcagcaccactcttggacactttctggccctgtcagcttctgtaaaccccaggaaagaagcgccagggcctaccgaaaaggagcagccttggtggaagcttgaaatgtctggctttgattctgtacctcgcctcttcccttggttcctgytggtggcttgtaggattatcatctcccactacgcattctctgaccgctgggaccatcatctcttataggcaagaccactcctaggcttgtctgcagtttgtcacagacttgggatccttgttatttgctgtcttgtgttacagttattaaggcatatctgccgtctccctttcaaattaktcaagagcaagaataagaccatatacatctttatccctggcagtgcgtactgattacaaatttggtatttagtaaatgtctgttgaatgaataagtgaatgattgaatctggaagactgaccttattttttttctcttgagtatggaattaaaagaaaattaacatttttatataattagtacatgtagtttttrtaatcagaaaaaygtggatcttttttaagccaaagatcagcctgtactttgtgttattaatataatcaattagtttatatgaaggatggcttgttttttgtcgttytggcctttacagytgggactcctgttggtaacagtgtgtctgctctgtttctgtatcgcagctctrgttgtaagtaccactgcagctggatttgcattggctccgggcccttttgactggccctgtttcctgcttacttctgttgggacaggccttgcatcctgtgctgccaactccatcaatcaggtcagtttctcactttcatctaaattatgttattgtcactttttcctagatggctgtattgtcatatttttaaataccttccaaactcatatatattgatggagaagcatttgtaacactatatatcctataggagcctgtgggtttcrtaaccaatttgtcttttcttttgaggtgaatggttttcagatatgttcaggtgagagagcagtagattagatgcttcaaatgactaggattccttgggttaaaacatgtttttgagctgtcataactttctactcttagtggtatctttgtttatccatttcagatacatttccctgagcttgtcattgtgcactactctttcttggtttgatttctttgcattttaaaccactgctataaagaacagaatatattttaactatgcatattcagctatttttaaaaaatcataatttagtactcagttaacttggtatatggaatacggttataccccaaaattagcatattatttttaatacatccccccctattattttaaacatcaaaataattctcccaaataattttttttcccatctagtcaytgtggtytgccttaacgttgtggctttttcataagatattatagtgaaaaattttggccaaaacttaaggaaaatcgttttcattaccagaacacccaagaggagttggctcagttttaaaacaggaattcaagttaccagcaggaaaacagcttggctgagtggacatataagttgctagtgtgcaaaatacgtgaatttaatgtgataatgcctatagtcattatggttctacaatatattgtcagctatttggagaaggatcaatctatttcaaataagtttttttkttgttgttgttattttggatgtcaaaacaatcttatagtgaggttcaaatagtgctaccactttaccaaaaagatcatccccttctataaagcaggacaccatctcttccaagtagtttcttccttttgctaccttcccatgttttctggtaaagagaataaacatgattccaccatgaacatatttttaatgaaaatgcgaatgaaaagcaatataagccaaattgatttatttgtccatttgggtctattttttatttttaaaagttactacctctatttggttatacatctgggacccgaggttaagccaggagcacattctagttttcagcctccttttcgtaaattgaaaagccacatttatccttgagatactaattatcttaaggatttaaattatgttgattcaaagaaaatgtttaaaataaaatatggacattcagagaaaaaataactaaaaagcatcaaatggttcagaagctcctaaatattataaaaaataagagttgtttgagttggagctgctcctcctcccctctcatcccaccccttttcttttcaaaaataggtagctcaagaatttatcatgaaaaaaacctctcagttggatcaagaaagtatttggaggaataaaaattgaatgatttacatttagacagaaattgaacataagccaaggttttggaaattttaaaaggatgtgtttaggtggctgcttgatttttagtctgtagaagtatttttgctatagggagcgagttggattctgtaaattttaaaaatacgggggaaagccacagaatgcatgttgggattctttctggtcctgaaaaggtgcagtgtctgcctctttcctccttaggctggttttccagccctgctccgcatcccacttacacagcactcctgatcttccgctggaactccgtgtcatgttcctccatgtgtcactcatcccacacagccctctgcagtgtcctgagtgacgtgagttcctcatcagtgcttgtggtacaagtgaatttctccatctttttgtacccctcatattgcttccttccacttgtctcaggctgtgatttcgtttggaagcatcacaacactttaaaaatctcaacgattcccagtagagtagaatcctagtgttatcattatggtatcagtcagcttcccaaatcataatatttcccaataatgttagggatattttagttccagtgttaggcaatcttatacatttaaaataaaggaatgcaaaatcatttttattagtgtttttaaatagggtaagcagaacaaagagcactgggcaataagggttcaacagagtttttgggcagcatataaataaagaaatagtccttagcaaaaaggaagagtttactatactttttttagagggctagtgttcaaattaaaaatacatatatgyggttggtctgtataaaagttcttcacttctaataaaattctatgggaggaaaactttccttctgttcgtatttataaaaagattcaaattttatttatattttgtatttattaatattttcttttagcagttattcatttagttttcagtattctttgtactctatttctgtgatctctgtgaaagtagaaaaaataaagctttggaaagctgtttttacttttgttttaaggagagaaaatgaaattcagcttctgaattatgaagaagtgactagtgcataaagagatttgtgtaagaaaccactaacattaaaatgttagagtaaattacgtacatattttgtaataygtacacatgcttcatttgaaaccgtagtgtggctttaaagcacatatgccttcaaaggatggaaaaatccataaaatgttttgaattttgcagctgaaagataaaatattgtggatggtttaactgatcaagtcttgagaaacaagtgacaaactgaatagctgaattaacaaatttaaaaagataagaattatcaaaaaactataacattattttgaggatttgacataatagtgttataataagctataattgggattattttacctagattacatatacgtgattttttagactggttatgtcagtcagtgtgtatgtcagtaaatacatttctacaagatacattttaatggtgagatgatattccattttatggatatgcctcaactttctcaaccagttctccattgttgcagctttttgcttctataagtaacactgcacagatctctaattatttttaaaggacaaattattggaaatgaaattgctgggaggatggctgccagttaaagcacacatgaaactgctttaacttcagaataaatgatcttaacaaaataattaattttctacatttatacagtgctgtagaatttgcagagcatatttacataaattattctttaaggcttataatccttaaagtaggtggtattccttctatttctatgtgtaaaacattttgttttgctattgaattattcttttagaaggcaacatttaaaacatgtatcatgcaaataatgttttcattgcatatcagtgagaaaatatagataagcaaaaataacaataacaaattttattttacttttcctttatgccggacattgttctgtgttagagatacagctggaaacaaacaaatatcttgcttttktagtgcctatatctcaccacccaaatagatccatttgttaacattttgatttatattattatagacttcttcacatacacacatatcttcatatatataacatatataaaacatatttaacatggatatcttcacatatatatcatacatatatatagtttgggtatattttttcataaaatagtatgtcatggacatctcgccatgtcagtatttggtatagcatgtttttttgtttttgttttttttgaggtagggtttcgctcttgtcactcaggctggcatgcagtggtgcaatcttggctcactgcaacctcctccacctcctgggttcaagcaattctcctgccgcagcctcccaagtagctggkattataggcgcccgccaccgtgcccacctaatttttgtatttttagttgagacgtggtttcaccatgttggctagactggtcttgaactcctgacctcaagtaatccacccgcctcggcctcccaaaatgctgggattacaggtgtcagccactgcacccagccagcatagcatgattttaagagttgtatatggatatactttgatttgtttaatcagtttctccttattcgacattttagggatttctagtttttgtccatgtaaacaatgctgagctgaaattcttttagctaaatctttgcatatatccttatttatttcgatagttttctaaaaatatgtggtcatgtcaagagattatgaagttttcaaaataaaaagttaaaattaagaraaactacttcaagtaaaactaaatgtcttcccagtcttttgtttgtttgaaatcaacttacacttctgtttgtcagtgtgttaaagtgctcatcattaatgccgtgaattggaaaatcttggctcggtttgtaggtaacatcagaaatgttcttttaattcaagttgttttgatgacttacgaggtgggagtgtgtttactttttagtgcttattggccatttaggggttttttggtcagttgtttgctggtgagtttgcctgttttgctgttgggctgcttgcctttgtctaagggctattgctgtatatagtttgcattgacttataaggtgcaaatattttcttcagtttttgtctttaatgttttacagtgcagatgtttcatgtttttacagtgaggtctttttattttaatacaaatgtaatacagaaattttaataatttctcatcttagcactactagcagtttggacaagatgtctgttgtgtgggctgtcctgtgtgttgcagagtgcatcccagcacccctacttctacccactggacactgacggcactcccccacccccacttgtgacagctgaaaagtgtcttcagacatcaccaaatggtccctggggccccaaatcactcccaattaggaaccactgctttaacaatttctactttcatttttttttttctgagatctttgcccaagatcctggctataatttctgtctcaggcaaacgctggcccacatttctttttgtttaattactcgtggatagctagggtgaccatatgtacttctttatgcctgtgttcatggcgtaattactatgaatgcctcttttactttcaagtgtcctagtttggacaagtaattgtatggtcttgctattcatagcccacctatgccttcaatctttcactgtaaatgagatgtaaaaatatctttgtatcaaaacaaatctcctctttggttctttttttttttctttctttctttttccacaagtgttcccatgagacaagtagagatttcctgaccacagccaaggtcacctggctggcctcagctttcaccctctttgtagctacatcttgctctactgtcagcctaattgtactgttttacacacacacacacacacacacaccacacacgaccttagaaaacatttcacatccattattactctgctattagcaaattgttctagaatcttgatgactgatctccttagtttttacaatattcctagcagattgtctcctcattactatggttgtcactgattcccaaggccactggctctataagtggacagccttgatgagtagaatgctcttcctcatcctgagccaaagtcagcctccttataacttcaatctgttggtcatagttctgctatgtggaaaaactcagtgttcttttttctttcatatgataatacttccagtgtatcactttctgactatggttagtagccacttgtagtattgctgtatagttattcatttatatctctttcctagagaactcttaacttctggaaaccaatgattatgactaacatattttgtacatccatcacctctgcccacaagcatatagagcaagacagtagagtacaactttgaaggaatatgtatgagggaggggagaaagtagcaataagtgttcatgataacactaattgcagcaaacacttgtgctatatgccaaagaatgttctaagcattgtacatacattagatcatttgtttgagtctaggttcatcaggtttcaaaaaaaagatagttcttttgaaagatcaaataaatggtgaatgaattcataacttagtcttagctttaaggaaaaccattgatgttctcagcgactttactttggagaaaattagaagaaaggcacaaaacataagtagagtttcagatctgagaaccaggttataattagaaaggtaagtgtgacaagggtatgttatctttgggatctagtgtatctgtgaatgttgaataatttttgtgaaagcaaatgaaagatcaagaggtgtgaataaaatagggtcaagaagagacatgttttttgtttaatactgacaatatttgagagacattcatggctgaaataaggtaaaaaagaagggctttggataaagagctctgaattatagagtaggtagggcaaaagaaaatttacatctttttaaactctgaaaggaaaaacaggtaaagatttttttgttttcccagtgaatatgagattaatatctaatgcatttttctccattttccttttctctgatgtttcttgtgttttgactatacagtctgcctagagcaatagaaactgactttcatcttctatgttgaacaaaagtggttattaaatttgatgttgtattctaggagaataagacttatgttagtgaataccagtgatgtgatttattgaacatcatacatataagaaaaaatcaatatgaaaaatatatttttcttctgaatgttgtgatttgtttgactttgatgttttagctgctgggcaacttgcattcattcagtggtctctgaagttgataactcatggcttattcagatgattcaaattagctactgcactagatcaggtttgcctagagagttcttgaataccaygtgggaaagagtctctaactaaatatggtttttatatataaggaaaatgatgagcattactgaacaatgacagaaagaaaatgcattttgaatgcagagtctcttttcctgaatttaaataacctcaaataatttctaaattacatttgattcccctttccagaatgatccatctcagtggagtgaatttggcattggtgtttataaccaaaataactccaggtgaggttttgccaacaaatgcagaaattatgataattcgaacgtatatttgtaaatagtttttcaataatttacatgccactggtcattattcgcttcttaatgatgactctgtgaggtggcattattccagtattgtagaagaagaaaatgaagcttaatggtactattgatcacacgtgtttgaaagtggtcaaattgggagcagaacctgtggacccagttcactactatttcctctcaaatgagatgtcttattccagtcactaccttggaatcagggtattctttattaatatgagtcttcctgctaccaggttaactgctgacatccttgccacggtgtagtagaggtggagttaacatagtggatgtggtgatgtatctacctctaacgacatcgagtggatctagagcacttatgtcttagtcaaactaagtgttccattaatgttagctattattattgttattaacataaaagtttggtcaggttttggcccacatctttcacatgttcagagtctgaatatcttgcagttatctccagtgttggttgagtctagattcctgggatttcagaaaaaaaagaactattttggaagatgaaataaatggtgaatgaatttataacttagctttaaggagaaccattgatgttctcagagactttattttggagaaaattacaagaaaggcacaaaacataagtagaatttcagatctgagaagcagggtcttaatgagaaggaaacatgtttatttttctcagagtactaagacttgggttatactggcaaactttaatatatgtatgttatgaatatatgtatatatttatgtcaagtatgtatatacttgtttatgaattcttcatatttggatatgtggtgatgtcttgggttcagcagacattgattttctgctattcggtaagcattgtggaattatgtatgaggttctggtaaatcaaagaaatgttggtggaaaagggtgattcaaaagcagataattaattgagacataatggaaatgatacaatgtggacttggggagttataattcttggtgtgtatctctgggtagcatgttgtgattaaacctgatttgggtggcttggagacttgcttccttcatctccccaccacccccacctagcagaggtcaaagtaacgctcttttctaattatctctttcttttctttttttaatcttcagttatattttgccattcctgatggtttttgttcttctgaatcccattagcctcctagttctctgctctgaaccacagactcccctccctgttatctgggttagattgactgttggttgactgatgactgatggcattgatgtaaaaactgactgtgtggctgatccctgggagactgtatcgtttctttgtctcatactctctttgccttagtgacaaactgcttttaaggtttaatttgtgaacatttcgatgccttcatatgtattttttgctttaaaattggtatcattggatgattctgaattctaaactgagcccccagacactgaaaggaataggaattgggatgtcagagggtggtggggatggacagtagagcagatgttaattgttatacctatgcttctttaacccagactaccttttgagacttctttgtctgttgctgtttctaactagtaatagagctccagactgctttgagcaagctattagacctttaaaatttgtgtgtaagtgattaagtaaatcctaaaattcacattttcatgaccacccatttctgtcttatcaattttctaagaagttttagaaaatattgttgggcaagaaagggaaattacttacctgtgtgattaatcttaaggaaaatttcactctggcatttccttcagatcctatgccagatttcttccggaaacaacgatcacagggggaacaaagaaattctaaaggatttgaatgatggaatgtagagataggatgaaacaaaagagaaattttggtagttaatcagatttatgtatacttgtaatctagaatatctttatactttaaaatatactgtgtaaccttaaaatactaagttaaagtacagctttagctttcattctgactggcctttccttagtactaaaaggtatttacctgctagcttacaagaaagaaaactaccacttacaaggaagaaaactttgatttcaagaaagaaataaaagtctaatttaatattccatcattttcattaatatgtctgaataaaattaagatctgatattgcttttagcaaaagtatggttggtaatctagaaaatgccattgtgtcatattgctgtcattagatgaagtaaatacaaaggattaaatagtacagtgtataatttccttaaacagctagctgaagatatgtggataaagatccttcccctaatgttactgatgtaatctactaacttaaaataatggggattaaatacagcttctgaccttaagaacataccataagaccagattctcagttcttataaaaatgttcagggatttataaattagaatatcaattaaggacagaatttactgaggctgaattcctttcatgattttcacttactctgattgagcgcgtggctgaagagtgtatttgagtgagcatgcacaaagtgtaatgtattttttccacaagaggaaaaatagtttataagttttccagcagaacatattcagccatcctaagaacctacgtcttaagtaaagtcaggttacatcagaaatgaccctctttgtaaacactcagtgaacattcaggctttaagactttaataccttcaaaaagcagttcacacttccacagaattttgtttattctacttagttcaaatgcagattattgatgttggggaaggcagttgaaatcctcttgacattcacccacctattagaaagtaattctgatttggctggaccagaaaggagaatgccattacatagtagaaagtgctgatattctttgctgttattttcttgaaagctattttctggaaggatccatgtatatgtattgattacttttgctggagataaaaagattggttcctactctgaagtggcttacagtctggtagaggaagacagatgaataaataagtgcaataaaacaataacatttattggctctgtaacagaatataggcagtgccttaggcatgtaaaggaaggtgtagggagtggccgtttctacctgtgaaggtcacgaaagcttctcagaaaagtgaccagaacatcaaaaggttagatgggttttttactaagtatgtgcatgtgataggggaactttccagacagagggagcatcatgagtaaagacccagagatgtgaaattttataacatggaggaccatttggggaactacaaacattgcagtgtagcagaagcacaagtttgggaggatactgtgagacatttggctaaagaagcaggagggcaggccgagaagggcatatgtgctttgctaaagcaaccagacttaccctgtaggtgtcgggcagccattggtaggttttggtaacataattaatggctttctgttaatcttaggctagagaaggaagtcctgactttgacctatagactctgcatgatctgattcttctcaagacccatctcctttcgctgtccacgtccgaactacaggatcttctagatttcagctaaaacgtcattcattcattcattaaaatgtcaacagacatttcagttgacctagtcatgctcctctggcataactttaattctgtttgttcaatatcttcattttctcatcacagaaagcaccaaaaatcagcccatgcatttcaacctcccttctgtcctctgttcttgtgtactctgcccccttgtgccttcctcccttcactctcatacccaacaaaacctgtcattgggttgaacttgtcttgactcctccaccccaattcttgtctttgaagtaggacatacaatgtttatattatttactaaaaaaaggatgatgatgaaaaagagcttttttctgaaaacggaattcttctcaagtaagtaatagaatgtagttttctctcttattttcatgttgagaaagtgaagcatgaactatctcagcagcttatatagaatcaagccacaggtactgaattttagctcgtagattcagctgctaaccatggataattgtgtcttcttgaattatatcgtaaaagagctcattgtttttaaattttaaaagaggaggagtatgttactgctttagcattcaaaaggtaaagtcacagagactcaaaattgcttcaagaaacacctggtaattgcaaatgtgtttacaattatttctctactgatggcattatgtttcagaaagtgccattaattgtgatagagtaacacacagctctctttgtgaaatttaagtctattgaatatcagcaccttcaaagacaataaaaattccagcctgcatttatctattcccatgtgaggcgttacgacaatgtatattgtatctttccatgtgaaattctttggcctaatcgcctctcatttatactcagttgtctgaggtcagttttccattttgcagttgtcaaacagctgtcaaattaaaacaccagatcctaaagttaatttactttttgtgtcattccatattagtatattttttgacttcagtatttaaagagttatccacatttcttaatcatcctttccctcagttatcccattttttcctgcaacagttcacacgtacattaagtatggtactctagatatcattattattttgcaagcatagtgtttaaaaattcacatgaactttataaataaacacttgaattaggcattcagccaattaactccagtgttctttttgcaagaagagaaaatcaaatcactttaaacatgtcatccttattttcattgtcatgcttattttcatccttatttttatcatcatttctatcaagttgaaatctcaatagtaattgaacatagaattcgtaattgcattctaaatgtcagtataggttagtataatagtaaaaaaattcagcattcatttttaataattcattgwtcaaagaaatatttttgattatgccattgatgttttactacaaagcctcaagttgccagcgggtgacattaacaccgtaatcctctgtgaaagaagtctagcccttaggtgtttgatgaatactttagagttaaataatttggtgaaagacctatagtcatatccatatagaactcttagttgttagatagaaaacacctaaaatgaatattcttaagttatggtaattagggtttacatgtagttgcataaaaatgtccctatattagtttatttaaccttttccactaaggtcattttaatcaatagttgtttgctacttgatttccataaacttgcaagttagatagggcttaatttaatcttttctagaattttgacacattctcctctgagatctcctaactccttgtatatggctctgttatatcatttattaaattgcacttcagtatatttttatgcatctgaatgctccactagcttatgagtcccctcttgctataagggcatattttattcatcttaattcttggtacctgacaggcactcagtgaatggctgctgaataaatgaaggagagcatgggtcaacaaatgagaacataaactcaacaattaaaaggggctaaacacacagtgttactttgtttctttattactgcaaattcatcagatctgtcatttaaaaatgaaactacattttacgatgtacagaggaagatggtcctattgtttgtacacattttcttggaaatgtattagtcattgagcttataataaaacaagttgaattaaaatttgggtaataatcaccagtcagagtggctattattaaaaagacaagaaataacagatgttggagaggatgcagagaaaagggaactcatacactgttggtaggaatgtaaattagcacatctttgtggaaaataatatggagatctctcaaagaactaaaaatagaaaactatcatttgatccagcaatcccactactgggtatctacccaaaggaaaagaaatcaatgtatcaaaaagatacctgcactcatatgtttatcaccgccctaccaccgtagcaaagatatgcaatcaacctaagcgtccatcaatggatgattacataaggaaaatgtggataagaaaatggaatactattcagccattaaaaagaatgaaataatgtcttgtgcagcaacatggaaccagagttcattatattaagtaaaacgagtcagacacagaaagataaatactgcatgttttcatttataagtggaaactaaataatgtgtacacatggccatagaatatgaaatgattcacagtggagattcaaaagggtgacagggtttggaaagggtggatgatgagaaactggaacaatgtaagttattcagttgatgaataccctaagagcccagacttcaccactgtgcaatctatacatgcagtaaaattacatttctaccccatacatttatttttaaaaacatggtatactaagggaagagataaaattaagctaaagttaatggcaatgtaaaagttatttataacagcatagcagttttttttcatataatactaaatgaaattgtgcattaatttcatcttctttgtcatttgaaggcttttaaaagttacccttcattaactggtacatcagtccccgttatcctttctggtgtttcagttacccacagtcaactgagatctgaaaatattacatggaaaattccagaaataattcctaagtttaagttgccagccatcctgagtagccattagtgaaaatgtatttcaaagatacattttctcatcagaaatttcattactagaggaaaacacaagctaggagatacagaaactcagactctctctagatctctaaactgccctctcaacagctccgcttagacttacgcaggacaccacaagtttaacacttctacaacttctgatctttcccctcaaacctgctctgacttccatctcagctactgtcaatccaatctgctggttgctcaggccagaaatgctggagtcatcaatgactcctggtttctctcaaaccccacattcatgccatcaggaaattatgctgattgtgtgcatgcatgtacacacacacacacacacacamgtgttagctgtggaagttgtgaggaatgattagaggatggctggattttccagccagttcttacagccttcatgttagcaccaccatcatctcttgccagggttgtaataacctctctatcactattactacttctaccttctccttctacagcatcctcaacacaacatccagagcgatcttctggaaatataaatgagatcatatccctcttctaatcaaaaccttgcagggacttccctggtcctgtgtgaacattgtgccacccacccctaactcctgtttcttcacacactggtcaacacattcttttcatgttatttatcttaaattttgagaaaagtaacatgggcttatgttcaccatgctttaattacaaatatttattcattatttgtatttccctttttgttagttgtcagtattgttctgtcatatcttttgtccattttagcatgaagatattttatttttaaagaacatacaagggctttttttacgttaaaaacattaaccctttgttacaactgtttttctgatcctgtcccttactttgctctttatgtttattttgggttatatggaggctttacatttcaaaatatcaaatctgttgttttgtagtttcttccttgggaaagatcattagaaaggctttacatagtaataggtggattttaaaaaaatgtgtgaggtggtgatttaacttaattcggtcctaaactgttagctggttgttctgggcttatttttaaatgccactcttataatgtgccacattatgctgtattttggatttgtttctgactcattattccgttttcaaaatcacatcctatatctctgaaatgggaaaagttcccttatccccctttcagggcgtgtgacaggggtgtggctcactccttcagtaacctgctgctcaaacccggagggggaacatgcagacaggcaggtgtagagatcatggggagcatttttgggctctgacccaaaatctgacccagcatctagaggtgagtgtttgcagctcctgaaacccaagtgggcatatgttctttctactttgctgtctgcaggcggcttgtgttaatcagctcagttagaccttctgccttatcccaaggacaaagggctttctgtatcccacgttcttgccctagtataccagaaaaattggatcacatgtgggcttggaggatgagtgcaagattttattgggtggtggaggtagctgtcagtgagatggatggggagccagaagggggatggaatgggaaggtggtcgtctcccggagtcaggccgcccacctagctggactctcctctgaccttccctgctgaattcccctcagcgtctgtgttgttctgccattgatgtcctgccagtgtctgctggtgtctgtcggtttgtttttctgcttctcttgacatccagctgcttgtgtctgtgcccgctaggatcttgagtttttatgggcacaggataggtgggcatcgcaggccaaaaggcaacttttggggtgtgaaaacataaatgcctgtcctcatttaggtccatggacacaggcctgagggtagagccctcaccaaggaccctgcccttctctactcagcaattccctgcccccacccatgtcatctctattatttactttaatgtctgagagggcaagtcttcccacagtgcactccttttccaagacttttttagtcttttaatcagtttattgtttcagatgaggttaagaattactttttgaagttctttttaaaaattaggatataattaggactacattgtatctgcctatgtatttgtataaagtatacatctttgcactattttagtcttcgtaaccaaatgtatttcttagactaagaccatttactaacacttgatggcaggagggtggctaacattagacaatgttaaatgtagaaatcaatgtgaagaggaatccatttcagaagtactataatgtaggggagtaaaggcataaaaattttataaaatgctacttttttcctgatcttgtcttatatttcatggtaaagtatatttcaaaaatttagatctgtatctgtttttgaatgttcatttctaggtattcttatctcttagattttttagtttctttaaaatagttccatttctcacccattttctttttatttctataatacctgtagtcagggagctttttttttttcatacaaatatgttgtcatatcttctcttagttcttttaggtattgagagtaaaagacaaatgcttttcaaaacttgcttttgtttttctctagtaggattgtttttttcaaatagacttttcatcacctctcagtattgttttccattttttatgttggggagttttgacagtttcagttgctgttatttccctctgtttattcatcattgaactaagtgaggtacattcagtcgcagtatttgctcatatgcagagtgtgtggtatttactggaatctgtagtatctacagacttgatgttacaggcctcctctctgctcttgtgattgccaataattgacaggcgtatatctcctacctaatgtttatggagagttcatctgctctgaggttacatttcctggtcctacttaagatattttgtgaaaatttgtaatttatgcctttattaaagcaatttattcatgtgttcaacttgtgttcacctgttatgtcttcaactgagcatctgtcactcagcactgaggatacaatggtaggcaaaaaaaacctgccacgatctttgctctcagtggacctattgcctagtgagggatgagaatgtagataataattaaataattataaaccttatttaaaaattataaaattgctttagtgggagctgcaaactgagtgatacctggtactatttgaatttgtaaaagggatggaagtgatgttccggctgaaatcctaaagatgagtaggagttttctaggcaataagacaaggaagagggttctgggcagagtgaataagatgtgcgcaagcccaatgacaagaggaagcgtggtttagaaaaactgagagccctgtgatgagacagagacagaaaggagagtgttgagtgagatgagggtgtagatcagaccatgaatagtcttatagactatgttaagattttcttttattttagttttggagcattaggaaaccattgtcatgctttagagagagacctgatcagatttgttgtttgaaccagactggatatagagagaatgtccaaaaggccttttgccatgctctagacaaaaggtgatgatgctttacactagggtgatggttggggggataaatttaaaagatatttaagagataaaataaatgatatttagaggttgattagcagtggtggaaagagagaaagaagtttttgaggatgactcctagggtgtagcttacaaaattaggtggatagtgatatcactgactacccaaagcggacctaggtttggtggaaggatcataagttcagttttggacatgttgactttgaggtgccctcagtgtagccaagaggagacatcaagtggatagatggatatgtaggtctagaggtcagagtagaggagcatgttgcagatagaaacttaagaatcatctgcatagagatggtaattatagccatggacaccaatgagattaaatgacctaggattagccttgaagagctacataattgaacagcatatggaagaagatgatgttgcagaggacataaagaagaaaaccaaggtatcacagaaacggagggcatatttcaaggaggaaggaagattaatagaatgctgtcataaggtgatgtgaactgaagactggaagagtccattggatatagtgatgaagagaccagtgatgaccttaggaaaagctgctttgttggtctgttggatggggaagccataggcccacagtgagacagaattccagcagatgtcatgcaaatgggataaaaatgaatggtagttccaggagttatgcagcacagtagccatgagaaatcaaattggagagagaaataagtgatgaaacatagacagtgagtacagataattttacacaaaaatgagtgaaaactatatcctctggaatatagtgtcccaagatttgtggaagtttggcttctctaatcagtggctttatatcctaaagcttagatccctagaaatacaggaattatgatgtggagaacctacatctttgtaacacttagtgttcccatacaggcattggttatgttttccttctccactttctttcctgacattttcatctctttgtcctttgcttctgtaacctgggtgaatgtgtcatgctcattctgcctgtgactaattggcttaagttcctttgggatggattttgttctttagcatttctagtgatttcagttctgaaaatgtatttttaagtttatttgttcataacttccagttctctttttawatcttgtctgcctcagccagatgtatttcatctcacccttgatatcaggctttatgatctgaattttgtgagtaggaagtaatgattttaaaaattgtatatttattcccaggcactttctaaaaaccatggcaaggaaaagataataataaattgaaaaacttaagtcagaagcaaggttaaggctgagggatgcgtatcttaatatcctacgctgttgctgtcatggctgcaacttagtcacttgggcttcaagcaacctaataattaaagtgacaatgaaaatatcatgagttctaacagttgcagtttcctgatggctgtrtaccacgatggctaggracacagaggtgagccctggctgtcactacttgtagttgtgtgacatggggcaaattacttttctgtttcgatttcttcatctgtaaaatggagacagtaataatagtatctacctgcatcatttgctctcattggagatgggtaagtaagacattatttctactcgcaaaacctagtgggaaatataagatatatacataaataaatgcagtttaatttagaacataaataaagtgatatagaatatcatagaaaaaagattatctctggcttatgtggtggaaagtggtagtgaatgcttgcaaaggcagtggtgcattttagctggagtacacagggtgtgcatgatttgaagatgaggagaggaggattttagtcgaagaaataacctgagcycagagagggaagctgggaagcatacacatgtgcatgtgtgtggtgtggagaggcctagaatgtcagatggcaaaaaggaagtagttggccatacggcttgggtcgtgttgttgagtatcgtaattgcccagctctaaagagttgagattggattctgtaggcagtagggagccattgaagtgggcaaagcctagaggcatgtcgaccagttagggtgttattaccatcgccccagcaactacaggaaacaggaacttggaaatgatggagataatgcagaagaggaaatggatttgggggaaaaaagggccttcattctgagaaagttgatttactttcagctataactttatcagtaaacaaagaggcacttgtttgcctgggtgtcaggcaccactttgtgatcagggtccttatgcttataaaacacacgaggctgcaaaatcttcaatgtgctctggcaatccccgtcaaccaactaaatgagttgatactcaccatctgtaatcttaccagatccttgcttatccacttacagtttatcatcatttgttcagtttaatttttaaaaatagaggaaaccaagggacatttaatacaatcacatatgattctggtgagagatttttttttctgtacttttatttgctattaaatgattttctgtgtggggctgcctgaagtcttggttggtggcagtgactgttgggatgctctgaaggagaaaaatgcccttgtccacctgtaagaagtcctggcagttggcgattggtgccaagatctctgagacttggcctgttcattgccacagaatacttgcaccatctcttagtcatgttaaacacgaggtgactggccagcccattggccaaagtactgttgcttcaataaaccacattaaattaatcttttataattatgcattagccagaaactaactaaatcctacctgtacccaaagaaaccaagataatgtttctccagtgcttgcctttggaggagctgcttctacatggcatccgcccacttcagaaatggtttgagaacagaatccaagccaggtcagcactggaaagagaatagcaccaaagcggatgtgtcagttggatgtggacagggagctaggagtgacaatgatagtataatgccttacatttttagagcactttacagtttacagtgctatttcatgtaccctgtctttgatcttcccacagttctctgaggtatatggaacaggtttcaccacatgagtaaagagtaggaaactgaggcccagcgttaaaatgccttacctcagtaccagagcttaaactacaaattccaatttcttctatcattaaacctgctgctttttctaccagctcatgcagtaaactcttgatttggggaagttattgcttcagaattttaagttgcgtattcacaatctatcatagtgaatctgaagtccaaaatgctaaatctcttctcagcagcattaataactcagtaattttctcaagatcatttgaatagaatggactcacaggcaatattattgatgtgtgagctatgaacattaagacttctttaagaattcagaatttttttccagygtagataaagtagcctagagcatgatggaaacacatgaaactagtttgtctgattaaaagaaaaagttatacaaatcataaaattaggaaggcagtttgtaatgaaagccattaaatagagaatgtaaatgttatttctgtagtctctttaatgttatgttttaaggtaaataatgtatcccaaagaaactgtgaaatcgattaataaattcactctcctgcagtgttaggcaatgtgagacggagttaaccagggctttctgtggatggagaagcagtctcgtgctcacaagaggtgtggaagggctaccaatatgagaacaacaggtgcatgcaatttatgttcaagagtagtttaagtatctttaatcagtccgttttaagtcaaaccatatgatgttgagacatagacatttttcctttcagtatcaagtatttttttttcctcagtgctccatattagtagtacccagctgtgaaactaggcttgccttttgttacttaaaagcagataaaatgtttacaacagttacagttgattgcatggtggttagtttcacatttctcactcctgtcaaggtgactgtgggtctctaaagaataaatcaggttgcctgactcttgttttctgctcggttcagctataaataggttagttgttgcatcaaatattgcagggtgaccactctgttagacttgacaactcttttttaatgatagaaagaattgcttcatctctaacttggcacaaaatttgtgacttgtaagccaaatagagagatttttacttagagtttattacactttattgccattttatcaaagatagggaagtagaatagttttagggaagcagagccatatcctaagcatattacacagtaagttttttcctaatttccattcgcataaagttaaggggtgaaaaaatcaaattctctaggacaactcagagtaggttattttttcttactctgttcagaatattagagtttgggaatgctgttccagtcccactgtgcttttttggtaaatgtttgttctcacagttcatgttgcacatgtaatttgttaatgggcttcttgataattaagatggtatattcatttcataacagttgattgttaggattacataagaaaggaaaaaagtgacttgccatgttcttgccctcgatggtccggtgcagatacctctgtggagtgttttggggtgaagttcagctaaccgtgctttcctctttcatttctttatctatcataatgtgacatcttccttcccctataagatggacttgtggggactgagtgttttaatgttatgagaatgttcacatgttggatcttacttgtttaatgttaagtcacaaccaggttatgagctatacttgagacaaatgtgctccaattttagaaatcttcccttttgtgtaaaatgtatttcaatctcgttattttttctattgctttactagttttcactttggagtgaaatccaataaaaaatggtcagtaaaatcaagtcacaaattgatttatgagatgctggttgggttcctcccctaaaatgtgaacagtgaaatgtgaacttcatctttaaatgtatttacacaggttgtcactgacgaatgcacattggtaaaataacgacaggaaagtttttatcctgccacatctagttgaaacgtttcatggaggctgtagttttcaatatgcactgaaaatagaaggctctactgctacagctgataggaagcgacagcatgcctgttttgcacaacattgccagcttattgataaaaatgtaagaaaattctacaactctctaaaatggaattttaggttgttattygtaatgtttacagtgtcaaattcgttctttgttgaattagccttgtattaagggtattgccattaacagggaaacaatttggctattgaaaaataaatttttactttaatactgaaaagcacattgtaaaaatttaaaacatattcagagccagacgatgaaatgcagctcttttgggaggcaaatacatttgagagaggattacaaagggaaatgcctatgagtttaaagaactaaaccaggactcctaccagtgttagtagttgaggcatgtgtgtattcatctttattgtatgttctcagagaggacttcacggctaatgttctgggtagtagatggcatccaattcactttcggtttttaaaatacatgtcaatacttaagtagggtagacagcagcactaatcatattaagcacagtgtctgaactcacagtgaatgcataattaatgtattgttttagaggacctaatatattagtcaagggcaagagcttcatgcataacttgttctgtgggtgaggaggagaactattccacggtgctgtttgtaccaccgcagctaactctgctcactaaatctattttgttacacctctattaggagccaaagccatcagacaacctccattaaagtgtttgccacggagaactctctctgggatagtaaatgctaattcagtgtcaattagaaaaatgcttctaacaaaacactacgattaataaggggtacttgtgttgattcattgctgggtttttttttctttttctaattccttataaggatgcatctttcattactttctatttattattttaaatatgtttagcttgaaggcactttgccatttcatctttattttaaaatgtatccaaatgtttacttctccatcaatatccatttaaacttaggccattagggtctcactaatttaaattcctttagccaatccattgaataaaaggttccgtataaactcttgaattactgcattcaaacacactttttaaagtttctgatttctataatcctcttcttagttttgaagatgtataacgtatattttaaaaataaattcagttttaataaacatcctgtgaccacagctaattaacaactgaaaactaaaactcttttctctttgcagtgttctgactttatatagtagatgtgttcaaattttagtatggtattctgtagttttatgcatatacattttttaagctgcctaattgaactgtgtgtgttttatggtgacagtggtcacagttttgttcctcttattattttgataaaattcatcttttgttcagctccttgatattagggtgttggtggcaggggatgtctgctgggtgggaggatgcaatggagtatagcatgagggggagaatttgctaaatgtccctttgataacttggtgttttatttaactctttcaagctcctgaattattaatatctctctttttttgctttatataatgttttattagtatttaaaatttatggggaaatatttactttaaatattaatcagtatgagcattactgaaatatgctaaatcttattgatttggtctctgatttgtttttaactttagaaaaaaatagatagttagtgactcgaattcatgtttccttgagtaataaatagaatcacgaatttggtgcaaatgactgtcctaaatcttcatattttaatctttgaactataaacttgaaataaaatagtttaatttgaccaaaactgtgttataacttttgaattagctctggattattaaaagagagttaattttaaggaaaggyataaagaaacttgttttaactatttgctgtcttcactaaaccaacctttctactgtagatgtatatttttaaaaaattgatgttttgaatagattattgttagaagaatacttttcctctgtctgttttcctggtgtgctaccagtaaataaagttataacattgagacattctgawagagttcgagacagctcaactataagcttatttcagctgtttattatttttactccattacctcagttttttcatatatttacatactgagtgcagggaaggagagataaagtatattctgatgtaaaatcttcttaatgattataaataaaaataagccagtcagtttaaatattttgtacctataggaattttttaaatcacatacaaaaattcaagtgcagttaatgcattctatttataatattcatgtagatcaaagcaaagaatcaatattgcactagtgatttctattaaataaaaattatatacgtgtgtgaatgtgctgcattgagaatgtatgcattggccttgtgtttaaaatattaatattgttactctgtctttttgtatttaaaaattaaaagtaatattctttgcctacttagatgtccttttattaattacatgctactgagaagctattattttgccctcaagtaccaaaatagtacttggccacatcaaagttagcaccacctttagaagtgtttttaatttttttcaaaagttgcatttttaatagtaatttgaatctttaagagtgtgtgtatgtgtgtgtgtgtgtgtgtgtgtgtgtgtgtgtgtggtttttaaattacagcattgaacttagaaggcctgcctagccagtacctcaaatttgttgcagatgctgcatataaatctgatttatctttttttttaagtctagacgttttatgtttaattttactccttttagtacctctaatactaataagaaaatttcactgaactgaattcttagtaaaagaaaaagatgtgaaaaatgaacctccaaaagcttatacatgaaaggattatataattatttcatttgtatctactttattatttcatattaatctattttaatgatgcaattttgagcatttgcattttcagcagcagtttttttttagtttgtcgtatacttatgagattaaaatgttagctgtgaacattagaaacaatgcttatttgacaagaagctctccctgaagccatcaataaaaaatactaaatatcagatatgtatttcattcagttatgacttaattatattacctgtgttctttttattctattttatatttccagacagaaagtaactattctcaaatattcatttagtcataataaacaattaacatttagtagcttagggtgcaaattatccagaattctcctgatagggtgtgcatatagtagggattccataggttttttacacacatgaatcctcataaaaatgctttcaccaaaaatatttagataattaaataaaaaggacactggaagaagggagcagggtgcttaagaaggagaacttaagtacattatggatggatttatgattgtacagctggactgagttacagcaggactatagaacctaaacaaaggcggtcaactttaagaagagcatatctcaaggcacgtttcaaaaatctgtatttctacatttattttatttattttttttgagacagagtcttgctctgtcgcgcccaggcgagagtgcagtggcgcgatctcggcccactgcaacctctgcctcctgggttcaagtgattctcatgcctcagccccccagtacctggtattacaggcaagcgtcacacactgggctaatttttgtatttttagtagagacaagggtttcaccatattggccaggctggtcttgaacttccgacctgaggtggttggcccgccttggcctcccaaagtgctgggattacaggcgtgagccactgtgcccggcctatttttttttttttttttaaacactggttttgcattagtaaaaaaaaatcttcctttttagatttcaggtactgctagatatattgtgtttaaattttagttcacagaaatgaaatttattctctttactgaaataacactttatatttcaaaatatataaatatgtaaatgtatataaataatgtaatataataaatgtgtataaataatgtaacctttcctcagctcatgagtcccttgccactaagaactatttactcaagttctcagtttgtcctccctaaactcccttgtttgatttctagttagacacattctgtctgaatcagttaaaacttcccgtagtatttatgtcttttgtaatctttaccaggatctgattcttctgtagcagagctatttttatttaggcttatatggataaatcaactctttcagccttctgtatttttctttgctttgactgtttcattaaggccccttgagaaaactccccataattatttttttcattgtgctgtaagcattgtaaaccatgtgttcctttagcaaaagacgtgaagatgcaggctgtttgtgcctaacaaaaacagacctctttaccttgaaaaaccaactttagcagagctatgctagaaaaggataggaggactctctgggtacagtagggttatatagggttggtggttttgtttttacctattgaggaatcagattgcaagcccatttcttttcttcagcctgtgcatcagcctgtctaggaaactctacggtcacaatactaagaaatccacataaattagttcatgaggcttcttaatcccaggtggatatacctatgagccctgtgtatattctttcctttcttctcttcctgggagaatgtagtgaaggtgctgaagccacccagtgccagcctggagtttcaacaaaaattaagaatgtaaaaatcctttggacataagtgaggagtttctgctcccaattacattacactggggaagtaattatcttagaggtgattgtattctgcctccctcagaataattcctccctttctaggaaaatattcctcccatttttgtgcatattttttacaactaaaggcactggatatgtgttgttcttaggtaatttcacctctttaagataaaatctgagtaatgtctatcaatgattacaagatttgaagcccatcactgcctctgatgtgcaatttcataggcaattaaaaattccccgggacttctgatagagttacttgtaataggtattacaaataatacatataataatgtattgcttaaggtcaaagtttgaaacaggcctagaatcaaattctagctctacttattaggtgtttggcttatgtaattccatcatctcatttaaactcagctctttcatatgtaaactgaggcctgtaccatctacccttataggattttttttctaagagttaaagtaaatctgttaatttttaaattttcttttttgttaygttcttcaccactgtctttgtttcttggctgttttctttgccagcctgattgtcttcatcatatgcatttccatggccatcttcctcattgtcgtcttcatctttgtggtttgttgtctctcctttgcttttgtttcctcctgatttttctgttccccacctttttcttctcctttgctcttcttcactaaatagtctcgtcatctcctgtagagccctttcaagaaccttcccaggacctrtgattcttcaaacactgtttgaaaacccatgatttagtctgtgtgaaaaaccatcacaaagtaggtctttggttgtgccttcactaagtattagcttcccaggataaggcacctagttcaccactattcctagcagcatgtcatagtggcttagtaaaattcttcacatgtaaaagattgaatttttattgtgaagtgtaatttggatatatttaagttatttaaatgaatgaccagctcattgatttgtagacatcataaaagggcagcttattgaagaggaagtcaaagggcwttcctaagcagttactgtaatttagaagaataatcagaaagcaggttaagaaaagccaaaaggagattgtttaaatatatttggatgcattcattgaagacaatacgctacaacagatgatgaggtagttctatctgtatatatacatatttttttaatacacatgatgtttataaagttaagtgagaaggcatgctagaaggcagtatatatgaaaatatagatcaaaatactaatttttcatatatgagtatcagtactctagcttatttttttattttttatttatttttctataagaaatgaattttctctcattcattccagtcctggctttttgtagtgaaatagttttagataactgaatatgactggatggtcacattatgccataaaatacactgggtgaagcacatagagcaggtcaagaaataaaacatttcattttaaatgttctgatgacaataatttagaaaacagtattagaaaatattacaggacacattttccccttcaaataaatcattctcctgcagcctgtattgttgccatgtaataatagcaaattcaaaggagtttcatgagactgagacagtcactgtaagaaagaacgttggggtactgacatacacatgcctggaaaggaattgtgtaggagattctgaagcctaaatcagtagctttgtacraagtccttttcacttaggagatcttctgactaaaaaaactgggaaattaaattataaagtgatgcaaaagtaggttgtttatgggatgatttcctacttactagaagtttctttaaatatgtacattgttgtcatatatatcttcctttaaaaatactttcatttgcttttgtttgggtttatttttcataatattcttatatcctatgttagagttttaatcatgaaccaaatgccacctcattcttcatccaaacatcatgaaatcattgcagatgaggtgaggagataaagtaattggattagaaatggatggtttaagtttacaccattttattatatcaggaatttttgatatttgagatgtagctttccacagctgtgtgatcacttgtgcctaacatacgtatatgataccaggttctgtaattttgttgttttaaattctgacggagaatccgtgtcgatggtcaaatctatcacttagaaaagttttatctgaagtaaaactactgatatctcaattgagacagcacraaggtatgatccttgtattactaaatatttcttcccttgattttctgctttatatcactttgcatttataagccctttaccgaatggtggtggctgtgtgtgagcataataatttgtatttttaaattttttatccataatattttcctaatcttaaaaaattaaattttatatattttattcagtcttacaaatatattgttctaccttagaatatttttatgaagtgttaaattttccagaggatatattcatagtttaacctctaacctgttaaattatttgagaagaagaaaaaagacatgtttgtagcattatgaaatgtctgtttcaaagaatacccctgcttattttttacttttcctatgtttattctgatgcaaaattatagcttcaaatacttattttctgtttaaaaataattaaatattaaggaaaaattatgcaatatgactacagaaatttattaataatctaataatgttgaaagagctatgtaattagaactttaaccattcttattttcagttcattttagatttattttctaaaagaaacagtacaactcaatcaatttggaaattttgttgagatttttaacttaaaagcttgtaacatggtaacacttacagcttgtttagaaatgtgtggtgtttgtgaagttctttacaaaggaaccaggtaaatcttggcttaatgttgatttgataaaattccctaaaatttccctcaaatgtattaaaaataagccaagtttattaaaaataagtcaactgtgattgtattttctttaataatcaaaagtattgaagaagtacctatttacatctaaacatgaaaattgttataaaatgttttcatgagtcatacaataaaggaagctttgagagaacctggttatccattaatctttattacaccaatttggactaactggatttgtaaaaagttcaaattatgaaatagttttgaagaaatataatactattaatttttaaattaaattaggataattaagtttttgaagagtttcttgttaaaagtaatctgagttgtgggtattatgtctatttttgcatgacccatagtagctaatagtgttataaattaattaacaaacatgatttgtaattatactcagtgtaatataaaacatttaataaatatacttaaaggtacttaaacagttggttatcaagcatttaaaatgcctgccatcactaccaacaccacatgttattaaaactatgaaatggcactacatggaataaaagagtttgctagatgttaatcactttcatccagatttcagtctggatgatgaaaaaaatgactaataatatctaaattcatgagattttatcataattgcagataagaaattttctttaaaatagtgtttaattcagatttttatgagtttcagtgtagtcttaattagtgagattttagtcagcttgtcttactttatagggcataagtgagattatatgttttcatatggaagtcttttctttttttaaaatttgtttaatataatagatgatggatgacttttactaagaggaaccctggtattcgtaatggttatttgagtcagtgtttctgaactcttttggttcttctttgctttggtgttaaataattccttttcatactgtaaatgttagtaatattttttagttacttatactttaaaggcttcataaggtagactccatgatgccctcaaattcaacaaatgttaatgcctgaaggaaaaaggaatgattctttgtagttgattatatatagatctttagagaacatatatttttaggttttatctacttgtactcatgacctttaggaatattattaatcatatgcatacatgcttgttaaaaagtattcttaaagaatgtgaagagataaaaaatacaaagttatcttttctatcagcttttttttcaatcatcaagaaatccagtaaacaacatatatgttagaaaatgtttgttttctggaaaaaattaactgagttcttacaagtattttaatggttgttcacattgggagatgaaaagcatccgcctttgtcagatagtgtttcagagcacagaataactctgtaagatgcctaattttgctttgtatgtgggacacagatgttttcacctccaaaaagggacagcaagcacataaaaggagatcaaacttgttcccaaagaatatgtgtggtgtaacacactcttggagaggatttcaaaagtaattagctgagtaagctaaaaaacagcactgctatttaactttaatagcagaaagtgtgccttttaaggtagtagttttttgactagacatggataaattaawtgccctcggtgtttttttttttttaagttaaactctttatttagagatcttcatagattcacatgcagttgtaagaaataatatagagagattgcatgtagcctttacctactttcccacactggtaacgttgcagaactgtatagtacaatattacaagcaggatgttgactttttgttttaaaaatgttttttgagtctgtctaaatggccaaagcatagcactattttttcttttattctgaataaaagacaacagtatataacgatgcatataaaaattatcttaaaaattagcctaataaatatatgatgagatgtctgttctagtgtaggcatgaagcttcatactatatagagctgttcatatttgaataggtaaaacatttagaaattttatatagtattctctttgcttcttatgtagtttatttgttctaatgaaatattttattttaatctttttctttatctgggtattatacagatgttgttaagttgaaatctttgaataattttggtaaccaatattttaattataaaatttctttggaactaatatagctattttgttatgaatgaaaatgtgtttattattagtttagcaagcatattactgattttagatattaggttggtagttctcaaattttaccgtgtataaagaatcacctggggagctgattgaaaatgcagatgcttgtctccactcccggatattctactttgggtcagaagtgagacccagggatctgcatttataattaaggactgcagaagattttgatgcagatgaaccctgaactgcactttgagaaacacttaatattgaggttttttagcattgtattgtagaagcaatagagtgttgattttgtactctaaatgtgtataaagaacatcgttttgttttccaaaaataaatttttattcaaatatggaattactgttttttcatagtcttcctacgtaacctattggaatttttagatttcaacattgcaattcagtaatacctgtgctctgcaattgaaatctttttcaaattcatggccagcaactcaggaaaagtaaaggcatttgagtagcaaagaaaagagcttggaatacaagttgagagccaccaaaaagtgctctgtcaatagttgtgtttcatcaaataagttgtttggattttgttttcttcaggcatttttaattttccttttaaataatgacaaaagaaattaaaaatagtaagttggggattagagacgaagatagagaggaagagaacattggcatcaaacaaaacaaagaaaatgtaaaggtgattgattttaagaagctaaggagtttgagcaatctaatgtgacagcaagtacactgagtcattcattgggaaagagatgaaataatattcagtaaattgttttgaaggctcagaaatacgagaaattttagaaatatttccatcaaaactggtttcaatttcattaatatttgggtatgcaaacaagaaaattacttcattaatctagaaaattcatttgtatgcaacatcttatttcccagagatgacataaaaatgaagtgtgacttattcatttgagttttgagtaacaggcatccttctaaggaaaagctaagtaattatacatacctttttttagacttttttctttctattagcaaaacaaagcctagatgtgctttccattcatttccagtttgctcagactgacatttggcttgtgtgggacatactgatgtttcaggaaatttcttgccataaagcacggctgagactttggccgtttgaatcctgtacttatttgtttctttggtatgtacatttcaaaacttttagtgaatctctgacctcaaaatacatttttatggcaggtttttttttaaatcatcttatttataaggttagcagaacaagaacttcagcttgcctcccaatgttagcaattaattatagtgaagatgacaaagatggacatgtatggttttagtctgttcataaagatatttgcatgtgataattgcctcctctaaaatcaacactttattaaatctttagattttttcataaagtaaaagctatagtgtttagtttccatttgacattgaaatctttttggttatttgtcagtttatatttttcattaaaacttcragtttacttagactgtcctaacaatttttttgtgtgtgtttcttttttaaaatcagtgagaaggccaagtctgtgtgaggtggtgaggaatktaatgggtaaagatgtttttaggtggtgtgtttttttaattgttttaccaagagttggtgaggatgctagaaggcaggccttcttctcactgttggtgaaactaaattgggagtgcctttctgaagggaaattttagaagtataatttaaaattcttaaaaacatgttttcttcaacccagtaattccatttctagaagtttttttctaaattatcaaaatatgtgcaaatatatttatatattataaacatattaaatattatttcaatatagaaaaagtggtctcagtaaattgttttattcatataatgtaacactatataatatcatagaaattgcatttccagatgatatttratgacatggaaagtttttgagtcttaaatgagaaactattagaatataatagtgtgtacagtatgtgtatgagtgattggatcaaaaaatatttatactttttaacccagtcattctttttttagaaattaacatatcctaagtgaaagtaaatacttayatctctttttaaaatgctgatcagaggtaggagaataaaaataattcttcccatgtgggttattatatatttaatgctttcatacacaaaattttaagaatagtgttgttaaaagagtgtgattaggatttccgactcatatataggctttaacaactatctaatacaaatccctttaaaaatagtaaactaataaatggtagaaaaataaatagtattaaggtagactagaaagggtaccagttattgaatgcattttctatgtctagattagtcttcatgtccttcaacactttgcctgtgttcctggtttttctttccatgcagattaggtcattattcagatagagttttgtgattctgtcagagctcttaattccaaaatgttcttacgtggcagacacaattcagttttttttttttttttttaccatatttctacaacctagcaatcttactacactaaaatcaaccaaatttcttactctgattctgattctttgaaatatttcataatgtggtcgtcattaaagggacacacatgaataaaatttccttacaaagggaatagtgtcactcagctataatatattggcttgtagctcttgatcagttcttttcaataatacacacatgcacaaatagacaccatactgtatatgacatgtcagaatctgatattttctcttaatatcaaatcatggactttccaggtcattaaatattatttgtttttaaggggcttttagaatattgtgtattgtgccattttacagataagccaaactttacattaacttagcccacattgtcagacattgaaactgtatctggtacattataagcaattccactaaagataaacatgctggttgtccttgttgaaaagaacaaaatcattttaaatgttttctccatagtatcctcctaatggcaaccactgtattggtagccagagtaatgtttttttaagtttccattttatattgtgaagggtcagccctaccggttcttgagtgctagctatataagtaaacatagatttctgtgaaaagtgctcaggtgtcctgtaccccagtgcctggtgggccacattttggacgtatggtattcagactcataatcggtcctttctctaaacttataattagcagttataatttgcatttctatagatcttactgtactgcctcctattattttataaacaagtgtcttatctcttgagctggaccctgagctgaagccaaggtctttgtcttacactgcctgattgtctcctcatcccagcattgtctcttgctcaagtgtagtgtgctgtgtggggtattcggtagtgatgaagcaacggagtgctgtgtggtgtattcagtagtgacgaagcaacggagactcaagacagactgcctgggatcatatccaagcagtacgacctcgatcatttactttatttgtctgggcctcagtttcctcatctttaaaatgatgataatgataatgcctcctgattagggttacagtgaggattacatgaaataatacacaaaagaacttagcccaggcttggtaatagtaagcccttagtaaatagtaactaatggtagtaaattgttcttgatttttataaaaagtaagttggtgcattgctctagtcttttttttatcaatataaaaaaggcactggtgttcaatattttgcatgtctgttatagtcatccagttactaaactagctatagattttcacctgctttaataaaattatgaatgattatcatgagaggctaacacattaattaacgctcataatattagccagtatctgtctaatgaattgtttatttatagcaaatttgctggtggacttagagcaaatgtactgccttaatcactaaactaaacccatagctgagaatatatactacttttcaagtagaaagctgacaaaaataaaggttttataattttattattgaaattttcgtaagaaagtttcacatgaaataacctagctacacctttcctatgcctaaataagtaaacgggatttcttggcaataaaataaataggtataaaagttgcatagtgattgcgagcttaggtgtttcattcataaccatcactgtattaagaggaaaaaatacaggtgggcatatttgaagccttatacttggaaggatccctgtgttgactccagtatttagtatccaaaattgtttcagcttgcagtgtttgatgattgcctgtcttgctgtactagatgtctgtaacttcttggaaaaattagaatgtgctataatagtagtaaaaataaaacaaaaattctgagcaatgtaggcctggagaactgcagctatccataaacaaagccatagaaaatgtcattctgaaaagcactcaacagtaaagaaaccttttctgatagggcttctcttgtaagtctatttgaattgccatctttacaaggaactttcttcctcaaactaaccttcaaaagagtttgtgatgaaaattttacattcccaatgtgttttggaaagcatgaaagatttaatgtggtttggaaaatgtaatgtaacattcaattttaaaaaatatttcccaaccatgtgcaaatctttttgaaagcatgtagccacatctatctatacttattatttgtttatgattcatctcctttttattttaataagatttttttgacaagagaacaaaaaactatagacctaccactctgaaacaaataataaactgtaaattatattagtattttaggcattcttccagattatttcagagtaatcttagttaacatttttaatgactgcctcatattctatcaagttgtttaccacattttaatcattcctttagtatttcttccaatcatacctgttaacaactacagtagatactttttatggttggcatgtagttttctcctctatttctgtatgtatttccttaatatgtagtttcagaagtggaatttattagagataaactaaactcattaaatttagagtttcttattgtctttcatgagaacatttttccttttcattcataaatgatattgaaacactatattcttactttcatattcctgtttatatttttgtttttcatgttaaacattttacattctaatagtaacctcatcgacctgttaaaaggcaatataagatttagattattaaatagcatgtaatatatgtgatcagtaatcttcaatgagcttgttcttcatttaattgcaacgttatgtctgattttttttgttgcaaagctttcagaatcttgacttgtggtaatcttcttttaaaaaagcttttaacagaattaataagtcatcacrttatgataaatgattaaggaaatgatgcctctaatacattgaattattaaaactatcattttgaaaaattatattggtacaaactagtgtctactgctattactcatacatttcagaattcatacatggatatcgtctaggattttttttttgcgtaatcatgagttacggtgttaaagttatagtgttaatttaattatgttatagtgttaatttatctgttttacatctcacttttgtatctgaaaccgttcgaaaataattattattaaaggccagttgacaaaatttccactcctcctccccagtgtgactttccttatttgtattatacctataaagactacctcttacatcggccaggcacagtggctcacgtctgtcatcccagcactttgggaggacgaggtgggcagattgcctgagctcaggagttggagaccagcctgggtaatatagtgagatcctgtctctacaaaatatacaaaattagctaggcgtgcctgtagtcccagctacttgggaggctgaggtggtaggatggcatagagtccaggaggcagaggttgcagtgagctgagatggtgccactgcactccagcctcagtgtcagagccagtccctgtctcaaaaaaaaaaaaaaaaaaaaaaaaagaagactaccttttataagaattaggagtatttcagtctattctcattgtggaataaaagtcactgtaaactggataggctaaaatacatgtagtaagtctcagatgatttagcattacagacttttttttgtaaagacatttattatctaacattgttttatataattgcagatttcattatatttaaagagtccatttaccttttcatttgttatgaattctgttgttgtggtaatgattgttgtttaatgtttcatcttgccacatataatttagaatttcactgcctcgcataagagtagcagtatatgatctggaagattttttaaatatagaattgtactaaatagagaattgtggtccatatgacatttctaaagtaaaatctctgattggaaatgtactcacataagttttaaaatgtcttttctgtcttgaagtgttgttcaaaatttctccgggatcaggttttcatcatgattttaacatcgtcattgcttatgtcaagcccacctgcactgttgtcactcaaataaggagtaagcgcctctttattagaaaacctgccctcccactagccagaaactagtattcaagactcaaatctagttagtaaaattaaaaccttttctttttggaagtattttactaagacattaacactcttcctttaactcatatttgtcagaaaactagatgctactttacacagatagttgtgcagacacggaaaaatcatatgtatttctggattttaagaattgtgtctgagacagaaaactgtgacacaggcagacagccgataaatacataatctattgtaattctcttaatattgggatttaatgaccaaatgccatttatctaaagctgcataattatgctaataaaatcatagtcacacatcaactactgttatttatgagcatttaaaaatatttgcctgctttctgagttaaattggtatttggcagaagagttagaaataaattccctttatgccatttttaactaattctttttttccttaaaaataaagcaccattgaaagactcaaaatgaaccattgaactctattatatcttttctttattggaaactcttaataatttggaatttctatctatgtatagaaaagcaaacatttcttcccagtttgctattaaaaagagaactgaaaatattttgtgtgtatatcaaatcttttcttccatagatggaccacattgttatctttttcattctttatggtggtaagatcatgtattactctttcaggacatggtgactgtgcttgcaacacattacaggtttttgtttggcctctcaggaaagaagctatgtacttcagtttttcagggttctggggaattacccaatatcctatccactgtgcatgacaaatgtcttaccctgctataagaattttcagcctttttacatctttcagcaaaggaactctaggtccctctatcatgtggatggtccaactctaccattagatataaaggcattgccagtaatcaggttgaaagaaaagctaggaacagttgtaaaaagctgtcaggagtattcaaattaacaactgtcttatagatgcatatttcccgtgttgtcttcttaagacctctttgaaaatgtcccagtgtatttcgggtactgattttatcctttaatgcaaataccattatttactatttattattattttaataggatagtcattgttttcatttatcattccaatttcttccattgaaatgtataaagaagcacattttgttatgtatttgcttgaaaacatatactctttaaacatgaagatttttaagttactttaaaatacatttatggaattgataagaaagtctttcaggattgtggagaaaatgggcagtagagcaattttacctaagctgaaatgcactataattgcttgtactcccaacacagcatctcagagatggaacaaacagagtcgttaaagagaggtttcaagtcgctttgcttaggtaatatagtagaaagctattatctcctctctgaccaaatcacttctcttgtcatttgggtaggatctgaagttcaaaaacaaactgtaatcttagaggaaacgtgtaaatctttcagggtgttattgaacattttcaacacgttgaacattatcaaaagcatatgcaactgtcttttaaaggtgtactctgtgttctctgataggcaaaatggatgagacgtattttctccctattgcccctggtttccccctttctgtttccctccttccctttctctctgttgtatagagtcttgcttttgctgatgattaagccaacaggtgycaggagtgctaaagcaagttggctttgtgcccacaagcgtacagtgcagatactgtgtcactgtaggttttggtgaattgttgtgtccttccaagagaagggataacccagctgaaatactgcaactcctgagggattaatgtgtttcctttgctttatagttcagaattttacagtttctttgtttgggagttctcgggttgcttaatgatttctctggcctccacccccaccgtgttgtgaccagatgtatattataactgtrtttggacctctgtagatttgccaattttattgattagtatgtggtataaccttttctttttgagtacatcatttttctgcagtaaatgttcatgttctgtttgttttttgtttgtttgtttttaaatgatggcattttcgactctgtagtattttagagaatggattccagggtcatactgttgtcacattattttctccttgttaatgttgtcagtaagcatgcctattttgtattataattgtgaggggatctgcaaggatttattaactatgaaagtcttgtattcatattagattgtggtgaaggagcactagtggatgaaaaattttctgatcttttaagtcctagtttgaaaggtgtttggttttcttttaattttgcaacctaaatagtctgttaacgttagaagtttttagtgagctttaatacatttatttattgttcttgaaaactggccttaagaatgaacagtttttaaaacagtttttgcaaagatggaattgtagccgttggcagctgttagagtagaaattcctttgagcttatttggagattttagaaagagcttaactccaccctggatacccccgttaactaaatatgctggctacgatgtgagctcaaagttttcttttctttttcttttttttctttttctctctcccaaatgctaaccttgtgctaaaatcaaataatgatgctgtgagatttgtggaatttgggagaggggttgggatggggcaaaactgagcacagttaggtacaaatgggaataatacagttagaagacaacaggctaaacgtgctatacagacaagggtaattgatggaataaatttcctagaaagtggaaggggacaggattaccagtccttaggtaatcctaaagttaggagagaagaggctgtacacactggtagggatgatagtaggaaaaggagggagtgtcctgtttgaggacttcagtgttcaataaagtagaaggctgtgccctgtattataggtgtgtgtggaggggcagggaggggtgggtgggggcgctgtgtagaaacatcagattcttgagagtggaccagatatgaaatccttgtggagagaagcagattgagttgactagagagcacatttgaagtttgtggttgtgtacttgtaatgaatcctcttgtcctataaggtgtctttttccagcatagctccactgcttaggcacatgcacagagaaaagtagaatattagggcaaaaactaataagccctgtgtagttgtagatgtggtttcaatgctgtgatgggtcttgacagccatggggtagagtgagtgaagacctgaaagcatgttttccttgagaaaccraaggtagctcagaatgcttagagtacagcatgaaagaggtaaagaacaagaaagaaaagagcctagagaggtaaaaggaggcaagagctgttatgaagagctttgtaagccgtgttagagcatttaactttattccttggacagtggacagccatggaagggttttatgctagaaagtaacatgataagatttgcatctgacaagatcacttcgactattctgtgaaaagttactaggggaggatcaatactggaggtaggggaagtagtcagggggctgttgtaatctaggcaaaataaaatagcctgaattaaggaagtggcactgatgataggaataaaaaatgggtgtatttgagaaatattttggatcaacattttgccttcctctgactttctggagaaaagaaagtttctaattgactaaggctccgttaatgttggttttatattacctcactttagtaatactttattagtttacctaaagagggtctgccatattttgtatcattttggtagaatttttttattatctttttttcctgactagaaaatacatggtcttatgacattcttcatagaaatggaaaaaactatcttaaaatttatatggaaccacaaaagacccaggatarccaaagatgtcctaagcaaaaagaacaaaactagaggaatcacattacctgaccaaattatagtaaccaaagagctatagtatacaaagctatagtatagagctatagtaaccaaaacagcatggtactgacataaaaatagacacgtaaaccaatggaacagaatagagaacccagaaacaaactcacacacctacaatgaacttatttttagcaaaggtgccaagaacatacactggggaaaagactatctcttcaataaatggtgcagggaaaactgggtatttatattcagaagaatgaaactagacccctatctcttgccataaacaaaaatcaaatcaaaatggattaaagacttaaatctaagacctcaaactagtacaagaaaatattggtgaaactctctaagacatcggcctgggcaaagatttcttgagtaataccccacaaacacaggcaaccagagcagacatggacaaatgggatcacatcaagttaaaaagcttcttcacaggaaaggaaatcatcaacaaagtgaagagacaacccacagaatgggagaaaatatttgcaaactacccatctgacaagggattaataaccagaatgtatagggagctcaaacaactctctataggaaaaacaatctaataatctgatttttaaatgggcaaaagatttgaatagacatttctcaaaagaagacatacaaatggcagacaggcatatgagaagatgctcaacatcatcgattatcagagaaatgcaaatcaaaactacaatgagatatcatctcaccccagttaaaatggcttgtatccaaaggcaggcaataacaaatgctggcaaggatgtggagaaaagggaatcctcgtacactgttagtgggaatgtgaattattagtagacccaatatggagaacagtttggaggttcctcaaaaaactaacaatagagctgccatatgatccagcacttccactgctaggtatatacccaaaagaaaggaaatcagtatatggaagagatatctacactcccatgtttgttgcagctctgttcataatagtcaagatttggaagcaaactaaatgtctatcagcagataaatggataaagaaaatgtggtacttatacacagtggagtactattccaccattaaaaaggatgagattccatcatttgcagcaacatggatggaactggaaatcattatgttaggtgaaataagccaggcacagaaaaacaaacattgcgtattctcacttatgtataggatctaaaaaccaaaacaatggagcccatggagatagagagtagaaggackgttaccagaggctgggaagggtagtggggtggtggggatggttaatggtacaaaaaaataggatgaatgaataagacctagtatttgatagtacagcagagtgactatagtcaataataatttaattgtacattttaataactaatagagtataactgaattgtttgtaacacaaaagataagtgtttgaggggatggataccccattttccatgatgtgactattatacattgcatgacggtatcagaatatctcatgtaccccatgtacctactacgtacctataaaaattaaaacaatttaaaaaaaawttttaagaaaacacagggtctttatagacagttgaaaattacaaaaaggtaaagcatagtaaatcagcttccctctcactatccagagacaaggattgtaaatattttgatgttttctccttccatcttttttcagaaagcattgcttgcaaactgagatctctctggaaggaaaaaggggtcagttccatacagtgattcttggagctagtaaaaaccagtttaagtttctgagtgttttacttgtaggatgtggtactttgcctctgataagtgctaggtgaccttttagatcctttattttctcctttaaggatgaagccttaaaatccagcctagtgagagagggcctgagtaatctgtttagaggagaacattgccccagtcaccacattgggtgaaaagccacttctgatgaatgccagagcacacacattcattatttcaaatgcctcatgggggaaaatcaatgggaaggagtcttacttagtttgtttattctaggtaaggcaacagagaattggtaaccagagagtaatggctgactgggtgtctttactgatttgtaagctgaaagtaatggcacatggaatcctgctggataaggtgcctctccctgtgctttattttttttgtttttaacatcccttttaacttggtctgagattgatcgagacattgtcttgaaccctggaagctgtgagccatattggaatgacaaacacttgttgacagcgttgagaagatggatggaaaaacaaactcccacgaggttcacatgtttgttttcctgttgactctctagaagaatgttgtgaccattatttaatgtaggggaagaaaaagttattgtcaaattcagtattttctgagcctaacttacagacatctctagaatacatctgccttttgcataggatgtaattaatcaaagtaggactaggaagtacatcagttgggctgtggtatttctatccatttttgttatctgtgtcattttggctcacagagttcaatagtatcataagtatatattgtctgttaggaagattaataagtgtattttgtatctgagcattaactatttggataatatataattagaattaatataatatattttaatatattactaggtaattatatatactatattaaaatataacgttatattttataatataaaatgtattgttagtctataacatatataacaatatatttataatatattaaaattaatattcactaacataaaaatatgtataataagaaagcacaaacgttataataggtgtctaatagatatttatccattggtataatcatgccctagatttttgtcatgtgagtatgaggagaaaaagaaagatccatttactactctgttaaatagaactgttcattgattcccaaaccaattatgagacaaagattaatataaatacttactatgtttatatcaattagtgcccttcagatacttaaactaggaataccctttctactctaggcaagttattttgtaggtatgatgtatatgaaatgaaatgatttgaagtggttagctttacagtgtattataaataatttaactgcacctgtctactgagcatcttctcacttttttgtaataaaattttcctttgctatggagaaaatagtatatgtgttytagcggcratactgtgtctttgtgtctctctaccagcaccctccccgtgctcacaggatagtcacctcattccttggccatgatgattcatggccgtgatggttctggacttttctcttggagctaagcagaaataaactagtttttagggtggctaggagtgtggaaggcagggactgctgttgtcattttgcctgcttcatggaaaaagtctgcatgcaggaataaaccaagccaatttaagagatgggaggagccggtgtcatgatggcatcatttgaaattctgaatcttgtccttcctgaaagcaggtacaaccctgttataagcaataataaagccccattttcctttgagctagtttgagttgtgtttctatcacttgcaatcccaagagcctgagtactataacagatcacaggattgccagagagcaataaatgtgagggaggatatgactgattgggaagggagatggtggggaagtgaacctgaagaaaaaaaggaaaagtttacggccgggcacagtgactcacgcctgtaatcccagcactcttaagaggctgaggcgagtggatcacttgaggccaagagtttgagaccagcctggacaatatggtgaaaccccatctctaccaacaatacaaaaacttagccgggtttggtggcatgcacctgtggtcccagctacttgggaggctgaggtaggaggatcccttgagcccaggatgcagaggttgcagccacccgtgattgtgccactgtatttagcctgggcaacagagtaaaaccctgtctcaaaaaaaaaaggaaaaaaaagtttacagtgaaaagagttctaaaagattggtggatttttatgaagaaagactgagaggaaaacctcttttgaaaatttaacctagtcagaaaataagttgttttctgaagaaaaggtgttattcctttccgtgcaatattaatgtttgaaatgttcacagtctttgtgtattaggatgttggaggttaaaggagtcaaaccgttgtaggtttgatttcaactggaaagggcggaggccttggaggtaacctgaccattggaattaatgtccagcctttccctcacttcccttgtatcccattctgtgttcatagacaactaagagaaaggagggcatgttttctggggctttggtttgtatagttccagggaaagacgtttcagttggcccagtttgaatcagataacacactcagtaatcactgtgtccaggagcagtgtaaggtactggattctttagcatttgagaccgtgaacaagagccttcaactagaagaaggcaggtgcagtacaagactggtccctgacagaattagcttgacctggacagctgcccaaattctgtttactacagcatattactttcagtgttctctgaagtagtgagggtatatgaaaaagggggccaaacagtatattctaagggttgatattactgcatttgtcttttgttgtcagcacaagttgccattgtttttacttcactgcttcagaagtagttggaaccaactgaaaatgataacattatgaaaaactaattattataaagcacaggaaaaaaaaatgagtaggctaaagccagctgtatataggttctgaaataactgttgaagtgtttaaattgctcattgaaataaacaatgctttatgtttaggaaatgtggtttaagtatctaaaccaatgcagtaagcctaactgaaagcattatagtaaatgcatgaagaacagaatcaagtagcagcatgagttctgatcccttggtgctaggaagaattgctgggccctcactgaaatgaaccatgagtcttggttagcatggtatttttgcccagatgttgcttgtccggcaaaatttaagcattcatgggagtcagatgctgctgccaagttatggcatcctggagtccagttgctatctatttctattcttccatggatgatgtgctagaaacatagaaaagacagtatcttttttcatccagatgaaatgatgcattagaattcctgaactaacacacacacacacacwcacacacacacacacacacacacacgagaactgccaagatagttacttaaccacgagtttatttgttaaattaggtaacaccttacaagcatttaaatcacttgatttgtaattggaatcctctttcatcccatgaaattcaattaaagtacatatatcaagtcatgaggaaagattattccaaatacttacacattgaatattggggaagggaaggaatgtgaatgttcaggcagaaccttttaattacatgtaacttcaactaattcaataaagaatatggactctaacaggctaataatttttcaacayattatataaattatacatcattttaaaataatttagtgcagtctgcaggtatgtttatttgcaatgatggtttattaaataaattatttattgagtgcctatttgcatgttactataccatttcctgttaacattaagaattatgaattcacatatctcaggaagtcagccatttagattgttagataacatgaatatactgaaaaactaaatacctttaagcagcggctctgttgaaagtaagagaagtttgtatcagtcaaagtttgatcagaatgtcagaaccactatgcaggatataagggctgtatattagtccgttttcatgctgctgataagacataacccgcgattgggcaatttacaaaaggaagaggtttaattgcacctacagttccacatggctggggaggcctcacaatcatggtggaaggtgaaaggcacatcttacatgcagcaggtaagagagagaatgagaaccaagtgaaacaggtttctccttatcaaaccatcagatcttgtgaggcatattcactactacaagaacagtatgggggaaaccgctaccatgattcagttytctcccaccaggtccctcccacaacacgtggaaattatgggagtacaattcaagatgagatttgggtggggacacagagccaaaccatatcaggctgatgtaggggttagaccttatgcattcctttgagttaagcaatctgtgaggctgttgccccagtatctaattctgggcctgacaaaagcagagccatctgtaagggaagtagaagagagcaagaacaacctggaatctgtgaggaccacctaaaactcattagaataaactagaccacgtggctgtctcttgtccttgccacttctaaacatcggactttgatgatgcacatgacctacagaagagcttgtatgttccaccaaggagcagcacacatacttggcccaggatgataagaagctggaaaagctcggggatcagctgcaacccaaggatatctggcaggagctacagaagctgcaggcccagcactgctccaggccaacagtgtgagccaacagattcacaattgtgtgtgctccactgtagtacctgaccttatgccaattttccaagtgtaagcatggctactgcttcatttccaacgtccacatctcaygtargcttcttttggccagccctaacctaaaactgtacagaaaggggattctgggcaatgtagttctggattaactaaattgacacaacacagagccatcatggttcacccttgtcagcttggcagtcagatacatctttcagccgtactaaacttccaaataaggtgatagcagaatcgtgttttatgccaaacacagtaaaactttccctcttacaaccaaaaaatcactaatttactccccaaaagagaagacaagtctctattcatctttaggtgccattcatttctcttcaagctccttgatattgcataacttaaatactgaagtatgagtctaaatactgttaacatattttacattaaatggcaggaggataggagagaggaataaaaagtttgattcatgtatacaaatacagttctatcaaaataagaaaaaagcatttataactgttctagtcctcatttctgcaactgatcacagggtcattgctggtatttataaccactttcttctgatagccagtccctattctctttgtccttggcaaacactttgtccttaccacataacatgaccaaaacctggaagtggaactttcatatactgctgtgggaatgaaaaagtggcacaaccacttcgtgaaatagtttgacagtttcctaagtagtttaaacacctcaactatatgatatatgtgtgtttagctttgagagtgaaaagcatatgtccatacaaagacttgcacacagatgttcatagctgcttttyggtaatagttaaaaactattagaaatattcagatatccattaaccagatatccatccaaaaaccaaatatccatcagcaagtaaaaagatgcacaaactgcgatactaccatataattgaatattactcagcrataaaaaggaatgaactattgaaaccctctgcaagatgatgaatatcaaaagttattattcggagtgtaaaaaattcagacaaaaagagtccattttatttacataaaactctagaaaatgcaagtactctagggacacaaagcaattcagtggctgcctgaggacaagaagcttgtgagttgggtggaagaggcggactacagggaaacatgacataacattttggggtgatttgaatatgttcaggatcttgattggtgggcgtttcatgggtaaatacataagttgaaacttaccaaagtaaatagtttaactatgtgtaggttcttgcatgtcgattataccttaataaagttatgactgttaaaaagagattggctctaacaatggataatctgtgtttttatataccgactagagtgacattgctatgttgtaaaattataaaagatttattcacttgacctgctattttttaaattatgtaattcttgatgagtgtttgttttatttgcaatttatatgaattcacataaattgcaaccacacacctctaagtggttcagacaagtgccatggggattgaaaggagagagggataacatttaagtcagaagtttaggcttcagtttaggtattttaatttgaacttagttttaagaggatgggttgggtttgttaagtgaagattcaaggaacatcagtctaatcaacggatgcagacataggtgagaaatgagcagaagtgcatgatgtgctacagtccatcacttacactgtcttttcagatcctcatagtaacttcaattgttggagaaattattctcatttgccgctgaggaaactaaggcttccgatattattttcttcaaccccagggtcagaaactggctgagtctccaactcccttgggcagtttgctcttcctgagatagtggcgagtgtgaccaggggatacaaataaagtaattgagaagcttgaaagtagcgttagggctagattagtgatagcctttgaataactttcaaagaatttggacttttcagggtccattgggaatgagcagtgtgagaagtccattaaatgtttttgagcaagtaatttgatgatgtttctatagtagtggcaatagtagagtgaaccaggaagggtagatttgagaaatattatgaagtccaaataatcaggatatggtgatgaattagatatagttggccaatgcatggaagaaatcagagccgattctaaagattttgacatgggttatagagaagttgtatgtttaacaaaaaaagaatctggagaggcactttgattttcrtggaaatgtgttgaattcaatttgagacacattgagtttgtgatgttaaaacatctacatraaaaaaaaaaaaaacagcaatcaagtgacattacagaattggagcccaggagaaagatggggctgcacacgtagtggttttattgaaagataggagagtgaggccgggcacggtggctcacgcctgtaatcctagcactttgggaggccgagtcagawggatcacaagatcaggagatcgagaccatcctggctaacacggtgaaaccctgtctctattaaaaatacaaaaaattagccgagtgtggtggtgggtgtctgtagtcccagctactygggaggctgaggcaggagaatggcgtgaacccaggaggcggagcttgcagtgagccaagattgtgccactgcactccagcctgggcgatagagtgagactccatctcaaaaaaaaaaagaaaaaaaaagaaaacaaaagataggagagtgaacacagaaggctagggtctgcactttgggtaaggctcattgtgttggggggaaagggagatgttgcttcctcttcatctccactgtcacagcccttgttcaggccctcatcatctcttacctgggcttctttacgatgttttctgtcaaaatcatcctccaagtggcagtcatagggatcaatccaaaatacacctcgtacacagcagagtcatggcacattagcatggcacgtgaggctctctgtgacccttgtctacctctggagcttcatcaccagccatccagcaacactcatgataatagcaaataaactgatcttcagtaagtacattctgtgtgccaggcatcatgccttatgtacattatcttaatccttacatcacctgacaagtgatatattattatttttggtttgcagatgaagaaattaggtttactcaggttgcacagccactattaaatggtaaatctgaattttttttttgagacggagtcttaactctggtccaggctggagtgcagtggcacaatctcagctcactgcaagctctgcctcccgggagggttcacaccattctcctgcctcagcctcccaagtagctgggactacaggcacccgccaccgcgcccggctaattttttgtgtttttagtagagacggggtttcatcatgtatccagggtggtctccatctcctgaactcgtgatccgccccccttggcctcccaaagtgctgggattacaggcgtgagccaccgtgcccggcctaaatctgaaatttaaccctaatttctctagctacaagactaggctcttaatcagtctgctgtgttgaacttctrctaggtactccagcatttcatcaaagttctgcctcctacgcatttgtttgtgcttcttctgtgtctggagtgcttgtccctcctaccctatgcccttaaccatctagycctgctcagcctttaagcttcccttgaagagtatttgaggaaaatcatccttgcccttttctgtctccctagctgggttcagagcccgttctctggactcccataatcctttgcacaactctgtccttctactgcacatgtgattataattaaccrggttctcttgtctcagtctttctagtggattaggggttggcaaacattttcygcagagtcagacagtaaacattctatgctttgtgggctatgtggtctctgttgcaactacccggctctgctgctgtgtaaaagcagccatarcaatactaaggcaaatgagtgtagctgaattccaataaaactttgtttatggacactgaaattttactttcatataattttcacatgccacaaataatcttcttttaacttactttcccaattattaaggagatataaaaagacagtggcttgtgcgccttaaaaacaggtacaggctggatttggcccatgagctacagtttgccgacacctgcatactgcatagagtaagaacttcttgaaagcaggttctgaatctaactgacttttgtatccccattgtatggtgtgtagtagacactaaggaaattgtatggactgaataatgagcctaaagaggagcactgagagaatgtagaattaggagaaccccttttaagtagtgtattcaagtcaaggcaggactgttttcaaaaggaggggaacattctaggcatttatcctgtaagaataattgcacacatatgcagatgcatgtttagggatgtttgtcgtatagaatgatgaaaaacaacctgcctgttcatctctatgggattggttttatggtatatccattaagtggaatatgctgcagtcgataaaaactgcaactgccacagttgcttccaacagaaaccaattcaaaaaagccacctgtagagtgagcactgccatttcctaatctggggtcttctcatgcagccatggcctcaggtagagcaggtgaggcaatacagactcctgacatttagtttcttactctgactacggccacactcttgggctgcagcagtgcccaggaagctctgaaaactcaggcttggtagacagttccttttgcaatgcatgtaaaatgcttaacatgtgtagcccatccttcataaaggttagccatcaagagaagaatatcttttattcttataattacagatgacaaatgctctcttaatgctgtggggatagtggtggttatcattattggtatgtggttttattttaaaggtctatgaatcacaggtacctgaccattggttaaatgagctgtaactggatggtcattatgacccaagtgtgagggactagggctagtagatacttactatgaatgacagggaatcctcactgtgggtaactactcagagtttgtgagtgaagtgactatagtaacctgaaaagaagaaagaaaaaaataaataatcgtattggaaaatgtcattgtgtttaggaatactaagacatcgtaaaaaaaaaattaaaagtagrtagtttgtagtataggatatggggaaaggaaacatatgtcaaagttttttacaaaattaaagggaacacaacttaccagatgtcccaaacttatggggaaaaattctacatttctcaaatagttcagaataaattttctttcatttttaacatatacttcttagtaaatcatactagatgacttgtaaaagtacaataaaatagaatgtcacttatttgtctttttagcactagtgtttatttttttctaatatttatagaacacatattgagtacaacacactctacaaagagctatgattcatacagacataagtaagaaatgatccctgccactcaaatctagtcagaccaggaatttctgaaatctgttacttacgtttctcttgaaaaaaggtttcatggtgaaataaatttgggaaacactgcctaaagtaaggttaatttggtttcttcactttgggatttctcagagattttattgtgctcatatgatttgaccatagagtcgttcttcctgggagcatctccggggatggtaagggaacatagctggggaagtactgacttcagccttccattgaattattgtttcgtctgttgatttggttctagcccatttagtcaaagatttcttaaataataacctaatcagcacattttttgagtactctgttttaccaaaaaaggagacaagtaagagacattaataacaaatttaagaacatacttgtacagtttgtcaaggctttggaaaattagttttgataataccttgggccttgtcttttaataggtaaacaattaaaactgtacttcattgttaggatgaccataccaatctattgtccaagctaggatgctttcagagtgagagaggttgctgttaatgatgctggcaccaagatgtaaattagaactatcctgggcagaataggatgattaccttcattgcagtataacctcagtttcatctgagatctctgagatcttaattacgtcagccctggttctttacatcagtagcccattccccagggtcagttgattcttggttgattctcaggctttgggttgtgtgaaagattctgaaattatttacaaygctaatgcttcaaacctgaaactatacagttgagccttgaatgacaygggtttgaactgtgtgggtccacttatacgtggatttatttcaaccaaacacagactgcaggatgtgaaacttgaacttaaagagggaccacattttctcataggcaggttctggagggcctactgcgggagttgagtatgtgtggatttggttatccacacatggggggtcctagagccaattgtctgcatatgccaagggacttggctacttgtatgtttaacaggtgattttcaaagtggataaaartagatattcctgacacctagtgcaaattattgttgttgttttggttttttgtttgtttgtttgtttttttggaatttttcttcaagaagtgccagggtattgatttatgctatcgaaattaaaatgaagtttactacagaaaaaatgttcagtactaaagcggaagaaaagaattgttttatagttaatgttttctgtcttttttcattctttttacagttttttgaggtgccatttgactcaaacatgaataggacaaagaacagaccgctggttcgtggacagatcaggtaaaatcacgaatacaagtgtcttccvcattataaaacattcatttgcttgttcatctgaatcatttcccactattttgctttgagctgcgaagtggaaataaaatacccacaaagaaacaaattgatatggaaatgcaatactttccacctctaaccaaagtgtgttacaaagcacttaagatggatgtaagagtggcagggtttttttttatggtagtaacttatgtgatatatatatatttttaattccactttgaagcatagactttctttcatttgtagtggctgaagataaaaacattgcattaacgcaaatgatcttcagacaaatccatctagggtctcagaagaaggatatgtctgaaatcttactttttcagataaactgataatgctgttgtatgccaagtaaagtactgcctccatcactctccaccagttgcaattaagtagaaataaaaggcatataaatattttaacatcactaatggttaataattaaacattttacttcctggagacctctaaaccggcatttaaaaaactttttttttarcctaatatatattacaagcctagaagaataaaaagggccaaatggtttatactgactatgtaaatcactggattctttcttcacgtttccaggcaatgccctcatggagcttaaaatttattgtgataacacttgtgaatcaaatgatcacacatatttaagtaaaataataaaggaagcaagtgtatatgcagtcagattaatctatgcagaaatgatctttaatattagctggttttagacatttctcaatgaatttaaaatatcattatagtaaaaagggcaatagaaccagatgaaaagatataagaacaaaaagctcacatctactgatattttatttcctttttctgaaatataaacaaaggtatatggtgtgtttgaggtttagaaactgtcaaaagtacttttatttgggtagatctgttttagaggggaaaatgcaaagtctgtaacctatctcaagagctaaaagctgctctcgccactggtaatgctttggaatttctgttcagtcatttttcctcagtgaaattataccctcctttagaaccagggaattgtaggaataggcccagcaagtagtctttaagcataatcagataaaggctcatcattttaaacagcccatcttactttgtccagtgtggtggaagcacaacctgttagtactcaggagggagcattggggccttagctgttgtaattggcaacactgtccttttaaagggggtttggatcataatcccaaaagacacagtcccaaatattgaagtctcaaaagatcaaaattcctaaagtctagaatccctaatgtccaaagkcccgaaaattccaatcacaggatagtaaaatcatgttaggtggaactatcactttaatctttatttaaaaattaagtatggtttaaggaggtgcatatggatgccaggttaacaaggggtgaacttgtggacttaattataggtgtcagcttgactagattgaagaatacctagaaaccagggaaagcattattttgggtgtgtctgtgagggtgtttccagaggaggatagtgtgtgaatctgagtggagtagatagggaagatttgccctcagtattggtgggtaacatccagctggctggaggctggaagagaacagataaagaaagtgaattggtatctctctaagagctgagacagacttatcttctgctgccttagacatcagaacgccaggcttgctggcctttggactccaggacatacaccaggagccccctgggtcctgaggctttcagcctgagctggaaagctcctagggtcattgacatcctagggtctccagcttgcagatggcctgtcgtgggacttctcagccaccataattgcatgagccaattccccttaacaaatcccctctcatatatctatatacacatcctattggttctgtatccctgtagaactctgactaatacagatttgccactggggaagccaaatattattccttcttaccgtatttcttacagcacaatggaagagatctgtgatattgttccctctaaaaaaagactatgataagttaagtgtatgaggctacctaatggtgaaagataaaaattttaaagctaattattattggtgctttgaaagcagaaaattgcttaattgcaacagctggcaataaccagactttcaaatggatagcatatacttataaaatttgtagaccacaaccactttcagaatacaagtgtaatgagtgttttgaagatcatagaagtgaaaatactggcaaaaaatacaagaaatcttctctgccaaattatgctgtcatgtacaacttctaccccttcacacataacgctatatttgccttcaaaaaaatgcccttcatcagagaataaaaggaattcaacaagcccagggacctcctgaaccaaagacacttgctgatattgaggtttctctagtgtcacaaaaaaacattaaatggtgacctattcttgattagtgatttgactgtcaaagaagacagacttcttatatttacctctaagtctgatatagaaaaatcagcacatgttttacgttggctaatggatggcactttcaaaactatccctgcttttttttttttttatcaactacatagaatttatgcccctgttggatccacaaattctagaatttattccctcctttatgtattaatgactggaaaatgtgaagcagttcatatatacttatttgaagatttggaggactttgcaaaagaaaatggattgtaatcgaatcctcaaacacagatatagagttaggtgcgatgaaggcatctaaagtaaatttcaagatgttaccaataaagtttattttttccattcagcccagtgcatttggcggaaaattcagatgagcgggttggctacataatttggcaacactgaaatccgaaaacctcactttaaaaatacatcatttgcctgcattggcattccttccaacttacaacattccaggagcttttaataaattaaagctgcatttgcctgaagaagccaataaagttactgactggtttgaaaataatcatgtgcgtgttaggataagatgacatgaaatggtgctgctcttcaaccaccagtattgtttccaccagatttatgttctgtatatgggtccatgtggaatggatttccttttacccaaaataacatagaagcatggcataagacaggaaaatttatttatttatttatttatttatttatttagagacagagtctcactctcttgcccaggctagagtgagtggcgtgatcttggctcactgcaacctccacctcccaggttcaagcgattctcctccctcagcctcccaagtagttgggactacaggcacgtgccaccacacctggctaatttttttgtatttttatagagattgggtttcaccgtgttggccaggctggtcttgaactcctgacctcaagtgatccacctggcttggcctcccaaagtgctgggattacaggcatgagccactgcgcctggctgcaaaaatttaataaggaatgctcatgtcagtttatatcaaatcatagaagagtttcaaaaagatcagaaccacattgaaaatgaatgtgaatgtattctccaaggagagccatgtcttaaaagaaaaaaagcagctattcatcgtgatgcaagaaatcaaaatataggtaatgattgtgaaagtcggcctgctctaatggactgtctctgttcagttgctcataatctatccctgtaataatctttcatttgtctgattttcttttttagtttttttctttctctcttttcagtttttttcacaattttaaattgtcagctttgtttttacaattcactctatgctatgtatttcatctgcacatcatttccaattctggaggtgtagatggtgtaaagccttttagagttctaattcactttatgtgttttttgcaaatctgactccacaaagtgcattatcacaaatttggctttgtgtattagcattgtgcgtgtatgtaaaaacaccgacagttcctcaacaaatgaaaagatgtcctttttatatatctgtgtttgtgaaagataaaagttctcaagatcttggctctagggactgtgtatgtggtggtggtgtcccatcatggtttttgagcaatcttgtgaaaaggcttaggttgtttgccatggtatttcagaggaacacagttataccgctggctgcacaccattaccatccttagtgatatgcatttatacagttcctttgacctctttatgaataaggtttgtctgcttctaactgttatgcccatgtgactgtcattagtatacctgagtgtttgtgcttgcacaaatgtatatcttattattgtctattttattgtgtaaagtggcttataaartgttctatcrtgtttttgtatgtttctcaaattcccttttaaaaatgtacagaaatatcttttaaagaatttttaaattattttttccagaattatattttcaggattttgatcttttgggattttagactttaaggattttgatttttccagatttcatcatttgggattatggcgttctgttgaggaaaataaacaacgggtttctaaacatccctttgtgcaagccatagacaaaatggcaaagaatagatccccgtgagaaccgtttagagtatgtgaccttggagcaagtgaggaagaagaagcccttcgccagacattatagctcaaagatgtatctctagctattcagctagatccagagattaaattgagtcagtgaaagaaaggagaggtgtcattgttatgtgtatatcaggtgattaggatgaaagagatcacgtagggaaagtgttttcccacgtagcatgattgtaawatgggctgaaggtcaaatgggtttgcctaggtcagtcctggtttgccccaacagaattattgataacgtcctctttccctttcaacaatgcccagtttggatgttaactacatgtcaccccgtacagagggaaagatgattatgatgctcacagaatttccttatttctaaagctttttcatgcaaattggcattgcttcttttgcttagaagagaaaaacatataaatgtaaagtgtaatgtatctaaattattatagtttgcaggtatgcaggcatacctcattttattgcactttgctttattatgcttcatagatactacattttttacaaattgaaggcctgtggtaaacctgcagcaaacaagtctgttggtgcagatttttscagcagcatatggtcactttgtgtctctgtgtcacactttgataattcgtacagtatttcaagcttttttattattatatctgacatggtgatcagtgatgtttgatgttactgttgtaattgttttggggcaccataagccgtgcccataaaagacagcaaacttaatcgataagtggttgtgtgtgttttgactgctccaccaactggcagtttccccatctctctcctgctccttggacctccctattccctgagaaccaacaatattgaaattagcccaattaataaccctacaatagccttgtgtgtgcaagtgaaagggacaattgcttgtctctcactttaagtcaaaagctagaaatgattaagcttaatgaggaaggtgacatrttaaaagctgagataggctgaaggctaggcctcttgcaccaaacagccatgttgtgaatgtaaaggacaagttattgaaggagattaaaagtgctacttcagtgaatacacaaatgataagaaagtgaaacagtcttactgctgatatgaagaatgttttagcaatctggctatatctaagcagccacagcattgcctcacacgaaagcctaatccaaagcaaggccctaactctcttcagttttatgaaggctgagagaggtgaggaaactgcagaagaaaagtttgaagctgacagggattggttcatgaggtttaagaaaagaagctgtcttcaaaacaaaaagtgcaaggtgaagcagcaagtgctaatggagaagctgctgcaagttatccagaagatctagctataagttcattgatgaaggtggccacactgaacaatagagttttcatatagacgagacaaccctctattggaagaagatgccatctaggacattgatagctagaggggagaagtcaatgcctcacttcaaaacttcaaaggataggctaactctcattagaggctaagactgatgctatctttgagttgaagccagtgctcatttaccattccaaaaatcctaagactcttaagaattacactaaatctattctgcctgtactctataaatggaaaacaaagcctggataccagtacatctgattgcaacatggtttactgaatattttgaaacctgttgctcagaggaaaagattgccttcaaaatattactgcttattgacaatgcacctggtcacccaagagctctgatggagatatacaaggaaactaatgttttcatgcctgccaacacaacatccattctgcagctcatggatcaaagagtcaattcgaccttttttttttttttttttttgagacagtcttcctctcactcaggctggagtacggtggtgcgatctcagctcactgcaacctctgcctcctgggttcaagcgattctcctgcctcagcctcctgagtagctgggattacaggcatgtgccaccacgcctggctatttctttcttttttttttttttttttttttgkatttttagtagagatggggtttcaccatgttggtcaggctggtctcgaactcctgaccttgtgatccgccctcctcagcctcccaaagtgctgggattgcagccgtgattgactttttagttgtatttaagaaatacattttgtaaggatgttgccatagatcgtgattcctctgatggatctgggcaaagcaaattaaaaactgtctggaaaggattcaccattctatatgccatgaaaaacattcatgattcagggaggaggttaaaatgtcaacattaacaggggtttgaaaaaagttgcttccaactctaatgtatgaccttgaggagtttaatacttcagtggagacagatacgaaagaaatagcaagagaatgagaattagaaacagaccctaaagatgtgactggatagctgcaatctcatgataaaacttgaacacatgaagaattgcttcttatggatgagtaaagaaagtggtttcttgagacccaatgtatttctgacgaagatgctgtgaacattgttgaaatgaaaacaaaggatttaaaattttatattaacttggtagataaagcagtgtcagagtttgagaagactaactccaattttgaaagaagttctactgtgggtaaaatgctatcaaatagcactgcatgctgcagagaaatctttcatgaaatggagagtcaatcagttgggcagtgtattagttcattttcgcactgatataaagaactacctgagactgggtcatttataaagaaaagaggtttaattgactcatagttccacatggctgaggaggcctcaggaaacttacaagcatagtagaaggtgaagcagaagcaagcaccttcctacatggtagcaggagagagaaacagcaaagggagaactgccacaaacttttaaaccatcagatcttgtgagaactccctatcatgagaacagcataggggaaaccacacccgtgatccaaccgcctcccagcaggtccctccctcgacatatgagaattacaatttgagatgggatttggtggggacacagagccaaaccatatcattccacccctggctcctcccaaatctcatgtccttctcacatttcaaaacacaatcatgccttcccaacagtccctcaaagtcttaactcattccagcattaactcaaaagtccaagtccaaagtcccatctgagacaagggaaataaatccctttcacctatgagcctataaattcaaaagcaagttagttacctacaagatacaatgagggtacaggcattggctaaatgctcccattccaagtgggagaaattggccaaaacagaggggctacaggccccatgcatgtccgaaacccaaaagggccatcattaaatcttaaagctccaaaataatctcttttgactccatgtctcacatccagggcacactgatgcaaggttgggctcccaaggccttgggcagttctgctcctgtggctctgcagggtacagccctcatggctgctttcatgggctgccattgagtgcctctggcttttccaggcacatagtgcaagctgtcagtggatctaccattctgaggtgtggaggatggtagctgtcttctcacagctccactaggcagtgctctagtggggactctatatgggggctccaaccccacattaccctagcagaggttctccatgagggctcagcccttgcatgcagcagacttctgcctagacatccaggcatttccatactctgaaatctaggcagaggytcccaaagcccagctcttgtcttctgtgcagctgcaggcccaacaccatgtggaagcaaccaaggcttggggcttgcaccttctgaagccatggcttgagctgtaccttggctctttttagccccagctggagctggaacggctgggaaacagagtgcccaccatgtcctgaggctgtacagaacagcaaggccctgggctcagcccacgaagccatttttcactcctatgcctctgggcctgtgatgggaggggctgcagcaaagatctctagaatgctctggagagatttttcccattctcttggcaattaacattatgctcttcattacttaacgcaaattttctgcaggcagcttgaatttctccccagaaaatgggtttttcttttctaccacatggtaaggctgtagattttccgaacttttaagttctgcctcccttttaaacgtaagttccaacttcagaccatctctttgtgaatgcatatgacggtacaccttcagaaaaagccaggtcacctcttgaatgctttgctgcttagaaatttcttctgccagatatcctaaatcatctctctcaagttcaaagttccacagatctctagggcaggggcataatgtctctttgctaaagcatagcaagagtgacctttactccaattcccaataatttccttgtctccatctgagaccaccttagcctggacttcattgtctgtatcactatgagcattttggttaaaatcattcaacaagtctccaggaagttccagacattcccacatcttcctgtctttttctgagcccttcaaatttttccaagccctgcccattacccagctccaaagttgcttccacattttcaggtatctttgtaagagcaccccactcctggtaccaattttctgtattagtccattttcacactgctgtaaagaactacctaagactgggtcatttataaagaaaagacgtttaattgactcacagttccacatggctggggaggccatatggaccaacaaactgacttgtttgaacatttctggcaaatcgttctggctataatgtttgttgtaatgagggagttagatttagagcctccttttattctctggcaaagaacacaccttagagtgcatatgttacatattagggacttacattgaagggtgaacmctttggtttggatgtggtttgtttgtcctcaccaaaacttgtgttgaaagttgatccctaatgttttggtgttgggaggtagggtctartgggaggtgttcgggttatgggatcagattcttcatgaatggcttggtgctgttgtcatggtgaattcattcctgctctcaggagactggattagttctcatgggaatgggttagtctctgagagagtgggttgtcttaaagcaggatggcctcaggttttcccatttgtacatgtctgcttccctgttgaccttctttgctatattttgatgctgtatgaaagctctcaccagaagccagagccatgcccttgaacttcacagcctacagaacagtgagctaagtaaactttttaaataaattacccagtctcaagtattgttttatagcaacacaaaatggactaatatattgagtaaacccgttttacaagttgaatctgcaaactcagtcatgcaatgaaggtaaatgtcagagaagtttaatctcttaatataaagttagattcagtattatccagtttttttaacttggtgactggaaaaagccaattagcaattttacaaatttttatgtaataaataacatgtcagtcttcaggtattcttcatgtgattatcatggtctgatgaaaaatgttacttaactgactctaagcatgacaagtcatttaattaatctttccacattactgcttcctcatgtgtgaagaagaatcttaattgctagcctaggccrggtgcatggttcacacstatgatttcaacaatttgggaggcaaaggtgggcagatcgcttgaggccagcagtttgagaccagcctgagcaacgtagtgagaccctgtctttacaraaaaaaattttaaaattagccgagcatggtggcacactcctgtcatcccagctccttagaggctgaggcaggaggattgcttgagccctggatttggaggttacartgagctatgattgcaccactgtactccagcctggggaacagagtgaaatcctgtctcagagaaaagaaaaattctaacctgttcatctcataacattattatggatataataataagatcrctaaaatcatgtaaataaaagtacattgttagggaagaggtttaaaactrtagagaawtatagagttgtttacagaatttraatgtctttaaaatttgcttkaaaatataatacttgtcagctaataacataaaaaagaaattcaagttattttcaaaggatggggagaagtaagcaaaaacacacgctgaataagcaaactcagagtgaaaactgtgtttccattatgattaagttggtaggcaaaaaatactcagtggaaagtagagtggtgggttattgaacctttccctcatactatcatcatcggaacacttttgtggagtgttgtctatgtagaaaagsgtgctagttcccaaggttgcagagaggtaaataacatggtcttcattctcttggaatcacgtcgaggagawggcaacacacgtgcattaaaaggacactaagtgttgtcaaaggtacatttcactcaacaaatgtgkttttttagtgcacatgccagccaggcatggtgctcgaccctggaggtgcagtggtgactaaggcacacttctgtgtcttgtggggttctgagtcatgaagcacctcatatgtgtgtaatgtgctaaatactacaaggacaggcccagtgtgacgtgggagcacaaagagaagtatctacctcaaactgaggagaccaaggattacttctcagggaatgcgtcttgaagctgagaaccaraggttgagtaagaaataagccattctgcctgttccctgctgagctcttgtttctgttccttcctcctccacctactctagtttggtggtccttaatctcctcctcatctcacttccctgcatttgctacactccacactgtctgtacctccaacccagattgcttttctgagcctagttcctctgaaaatctattgggctgcccctgcaggcagctcacattttgtgtgtattcaccccaattcactttctttcccaaatctttttccttaataccttaatttatgttccaaagtcaggcacctataagccatcctagrcactctttttctgttatctccttcatctgattactcaacagattgtgtcttttcaaccccctgatttaccctggaatctgtgccctctcacctcagtgctttagcttcagcccatcatcrgttttgcgtgggttattacagcacatcccagctgacttctctgccttcttcctaaccctccttccatctgtcttccactcaactggcagataggtcttccgtaagtgatcactgtttcaccaaacatatttaagacaaaacacatatctttgctgtgatgaaaagtactataataaacatgagtacaggtatctttttgattaatgttgatttctttccttttgkgtagatactcagtagtgggattgctggatcaaatggtagttctatttttagttmtttgggagatcgccatactattttccatagaggctatactaatttacatgccccgtcaacagtgtgtaagagttccctttyctctgcatcctcatcaacatcttcattttttatrataacaatagctcttctgactggggtaaaatgatatctcagtatggttttaatttgcattcctctgatgattagtgatgttgagcattttytcatataccktttggctattcgtatgtcttctttttttctttttctttttctttttttttttttttttttttttgagacaggtcttgctctgttacttaggctggartgcagtggcaggactatggctcactgcacccttaacctccagaactcgtgatcctcccmsctcagcctcccaagtagctggaattacaggtgccagtcgctgggcctaggtaatttttttttactttgtgtggccggtttcgaactcctgggctcaagcgtttctcctgcctyggcctcctaaagtgctgggattacaagtgcgagccaacacacccagctaattttgtttttaawttttttgtagacacagtgtctcactatgttgcccaggctggtctcaaactcctggcctcaagtgatctttctgtcttggcctcccaaagtgctgggattacaggcatgagccaccatgtatgtcttctttcaaaaaatgtsatgtcatttgcccacatttcaatggcattatttgtttgtttgtttgtttttactattgagttgtttgaattccttgtacattctgggtattaatrctcttgtcacrcgaacagttttaggcaccattttcaatactatattacagaggtgarcaaaacagaaaaattcttgctatcgtggagcttgcatgctagccattatacctggcaggtagctaatgcttaataatggatggatggacaggtggatggatgataagagaaagaaatgacctcctaggtgggagaaatacagaagtaaagataccaaagaaggaatacatggcatctgctgtcaaggcgatgagaaggccattcggacaggagtggagaatgagcgaagagacaaaatgaacatcaagatagagagacaggctgtagaccttgacagacagacagactttggataggtagagaatgaagcaaagaccatgtcaggcaagatgaacatggtgagcaaaaatgcaaagatgggagtgcaaaatacatgtgtaaggataaaaacaggcaacctggccagctgtagagggaaggatgtatataggagaattgtgaggaagtaaaactgggaagaggttaaggaaaatgtacagaccagactacactgtgaaggctgttctataggaactggaccttggtcagtgttgttctggagctcctgactagtatataataaggcaagagagagaaagaaaaggcacatacaytggaaagaaatgaaattcttttcacaatgtsattgtttayrtggaaaattcaaaggaatctacagaaaagctactaggagtaataagtaaatctagcaagggtatagaatacaaggtcagtattccaaaatcagctgtggaattccacttccagcatgacaacatgggctgctccccastgaaactgggctcggcrgaggactcttcgataaaacacaaaagccacaaaccatgcaagaaaagtagataaactgtrcttcatcaaaattaaaaacttctgctcttcagaagacacttaaaatgaaaatacaagccacagagtaggagataacatttgtaaaatacagacatgatgaagaactcatgtacagaatatagaaagaagtcttaaactcattaagaaaasaaccttaaaaatagacaaaaggggccgggcacagtggctcasgcctgtaatcctagccctttaggaggccraagcaggaggactgcttgagcccaggagtttgagaccagtctgggcaatatagtgagacctcatctttacaaaatttttttaaaaaattaggtatggyrgcatgtgcctgtagtcccaactacttgggaggctgaggagggaggatcacttgagcccaggaagcagatgttgcagtcagctaagatgatgccactgcactcaagtctgggtgacagagcaagaccctgtcaaaaaaaaaaaaaaaaaaagtgcgtgaaagatttaaataggcyctactccaaagaagaaatacaggcgttaaataagcaaaagattttcaacgtcagtaatcatacgggaaatgcaaattaaaaacacaatgagataccactacacrcctattagcataaytaacatttattaaaaacaacaatacagtgctgacaagggtgtagaatacctgaagctctcktttattgctagtgtgaatgcagaatggtacaatcaattccaagaacagtttggcagatttcaataaatttaaacaaaatttaccatacaatcccattcctgtgtatgtatggacacatgtccatacaaagatctgtacatgaatattagcttaaatatcactaaagacaacctaaacatccctcagctgatgaatagataaacaaawtacggctgaaatactactcagaaattaaaaggaacaaaccactggtacgtgcagtgacacgggtgtgtttcaaaagcactaygttaagtgaaagaagacagagacaaaagacagcatgtcgtatgattccatttatatgacattttggaaagccaaaactaggcacagaagtaagatcagtggttactgggaaayrgcggggggggggggggtgkayaggagggaattggctayagaggggcrtaagaaactttttgaaaagataaatttatrtgttcyatatcttgattgtggtggtggttacactatgtttaccttttttttttttaactcagaactaactgtacacttgcaatgggtaaatttgtgtattgaaaattatrktctgttttagactagattttcagagcacttggtttttccttggggaatagaatgttgtagaacataagattttggggtccgaytgcctggaatcaaagcctagctcctcygcctgcttcaccwtgcaascctgaccatattactaaacttctctgaggctctgtttcctcgcctataaaatgaggttygtgccttccacctcatagagttatgtgagaaaacgactgttcttataaagcygtcagtaaatgatactgctgtcatcattgttactacttttttcagaattgtgtcctcagcatctctggatgttacactctgtgctaaatgctggaatatgaccagcatgacctgatccctgccttcattccmgtccggtggrgaaggtagaactttagccagtgaacagttgagctctaaaagatcattctaggtgggcatcaatggtgccaagraaagagacagaatgataatacagaacaattgggagagagcactccagagcgggaaggcactgggagggagtggattggagttgagaactgaaggagagtgatgcagagatctgggggaacgtacggtggccagagtgggcttctacctgacactataaatagaaaggccagtgtggtgagaacataatgaacaaggggcagggtggcacaagatgaagacagaagggctggaactccatgtgcagtgggagaagccagaaatdagttgtacaaatggggctggtgtgatcagatttaggttaaaagaacccctcagctgcctgggtaaartagaccrtagaatcccaggagagagacttggggcagctcctggcatgacttgatgatagcttggaccagggtggtcacagcagaagtgaagttctkctgttactcagctcaaaattcaggctggctaccattgcctactcttctctgaaaygttcccgtctctattgcctatgtgtatcttcacctttgttacagtgctatagctctgtctacctgtaattcattataagggagaggagcagaggtgacattagaaygtaatcccagagaaggtgcagctcccctgttcagtcaaatcctcacagccagcaccaacagaaatacatttctgtttagccaggctgccgatgcttgtagcatgaagaataatagagtaaaccccrcagggaaacagaaccccatagaattctccacctctyctctactgagagtctccttaaaggcrgaatggtttgaatgcccagccatctaaatataggcttttcttttgttccctcttaatttaactgagtgattctcaaactctagtgaacacagtcattattttccagaattgtacatacataaccttccatgtactttatggatgagttcagrggattttaaaggataattttgaatrtaatatagtttcaccttagggctgacctaaataaactgaataaactgcagctccactgttycaagaaattgaaaatgcatctggtcctaatacagctttgagtgccagtcttggtgctgcttgcctgtttgttactgagctcccttttgtctatgttgtttcaaatgatggagaaagtgaccttgaatatatgtaataaacaaggaatagtaagataattgrctgtttttgaaatagttacagtaaaaaccctttrcattttaagcaacatagamattttctataatttttttttgcaaatcaaaggggaaaatgtttatagctaaaatrccatttaatgagaamaaaatcaatgcaatgacattgtcatttgtttcattttcccaaggagaatacagaggacagtacttaagttttagttatgttgattgcttgtgtgaaatgctgattcctgccagcagtcgccaggtgtctctcasrctgctgggagaggaatgtctcgtcttcttcatctggttgcctccgtcactgttctagrggcttctggcactggtgcaaggcagagctgtgcttccttgrgagtgtgccaagcatttactttggttrtttagttctagtctgggagcagacacaaaaggaaaaaaaagaaaataccaactccatgtgtctgaggtatcacttatagtttaaaaaaaatgattgtcttatcatgtttgggaaaatactggtcttcctgttttcctcctatttaaattcatcctaaaacttccagggacacaagaaattattagctattttgaccatccattccagaaaagatggtggccttacaataattgcaagtggttaatagaaacatccttttacagcttctatttaccaaatgtagttcctgtggaagcacttgaccccgtggctttctgctttttatgtcagctctggggcctttatgatagaattatttatcagagtctttaatggctcggggccacttgatgaacttgagtacactgtacatcacatcacttaggaagcatcccagatgctcatggataaatctagagtcgtggtgcatttggctaaagagctcctgcatgtgaggaagtctggagaaaagtgctccagaggggtcayaatggagctgtgttaacctctgytgtcagcttctcaccacggagtttatccctattacttggagccaaaccactgcatctgttctccttaggctgtgtcagcgcagccacctcacagcctcagggacccayggcttccattctggatactcacactggtaagtgggacttggcagaggccaaatcaagtagtttgtttctgacacctctgagcccatttctttgccagttttatatcatcactagtaactcccttccctgtacctcttacacatcacacaggcagccagtgtccttgaacaccttccacttaacgaagctgcatatctgcttgcaacactcgtcctaataggataaaaggattwagtagttttagggtggccaagaggaggggacagcaggagacaagtggttaaaagtgaaygttcccaatatttcttctaaaatatacctcagttcttctcaggaggataaaacyargtgttttgccctagsagattatagctgccagagtctaacacttattttggaatgtttccrggggtccttgggaccccttttctrtcttatggtcttccrtgctgtaagacctggagaccarctggcctgaatggaggttgtggggcctgagggctctcccrgcacctctgccagccctgtcgcctcattggttccttctcttctgacttcatatttgacaggttgtccttctgtcttagacaaaaatctattaaattcgctgctccatccagttactcttctrtttctcctytttgtagccgacttctggaaagggtggcctgctcaccacttcactagttgcagctcagcttccagcctcaccattcatctctgcttttctctgtactttcactgcatttttctctctgcatggcggccctkccaaccrctcttcacttaaatggactcatatcaaaatggcaacctcagccttagcccctaggtcctccagctgagttccctgtcccaattccaaatctttatgagagaaaatttgattgctccagcttgggcctgatagttccatttccctggggcaaaggaaagggttataaggacaattaagcattagggatgggaatgggaggacaaaagtacytaaggcaaagggaaggatccagggcagcttccacgggactttacgtggcacttggccagatgtgtatctaaagctatgattctgctttgtaactttctagctataatcyacctccccaactttcaacaaacacattatgtcaaattctttctgtgtgttataattaaagccaaagagattcttaatatttaccaagtcttaatttcgcttcagagatgtgtttcctagttcrgttaaaattggagtttctgttcatgttctccttgttttcagagaagacagagagatgtagacaccgttcatctacyatctyttatcaaacctgaggtccttcagacttatatttttaaggtatcttatatatatatttttagtgatatcctttttgctggtctatcctaatttaatatttcttaargaygtcaaggcctactgtttcttttaaatattttagaatcaaataattattttcttcaattcmtcaagagtgtattgatcacctgtaatgtacaagcactgtcagttttgtttttataatgctcaaagttttataatctgggtgaaaaactagccacatgtataaaatgcttaacagacagcataaggcagcccagaaatatgtgttgaatgaaatgaatagatcrgtacaaacaagaatttctctggaaagtcagacaaagaagaaggacagagtggacagtgaaarcttcctgcaggcrgagccaggactgggcctttcttcttgttatttcagagacatctgtattttgattatgtctcttttgaattatctattttccagcttggtracgctgacagggaaataatacatgtcagcattagtttttccaacttaatggatcagatgagagtgatccataacatgtaagctttaggtgtgggctgtaagcaggagagattgcacgataagagcagagcaaaaggttatttagagaggataaattaaaacacttggaattggggtcagtcaatacctggttttgaaatgaatgatgaagatggagttttagaaatgaaatgaatggattgtttrgttggcattattaacttaaagaacagggtttagsttaagtattatagggctttacaggagacatttttcaaatttactgagggttttaccagtaagcacttaagcaaatgtaaacattttgtggsctgcaggggagctgtggatattattcatcacccaggcacactagtctagcagacgggtacccagccaggctaaagctctgcagagtttctaagggttgttatgattagtctcttggtgtgtatatattgctaatgtaataagaacataaacattttataagtatagaaatttctttttttttagtgttaaccagtgaagtggcaggaagaacaaatttggcctcaacttaataatagtggtrttaatgtagagaacttgttcttaaaataaaactgttctctattaaccatggtatgaagagttcrcaaaaactttttgtacatattgtcatgcttagtcattacaatggttgaacaagaggaacrctgctgggattttctgaaagttacactccyttctctcatcatgagaaaaaagaaagcatttgtgactattttcaagcgttgtgagctgtgacagtattcctagggatgaaggattcttctgttctcatctcccttttytaatcagmaaatgcccagatattctaataaatatgaatatgaagagttaactgtcatagtaacttagtctatcacttgtagccaattaaaacataygttttaggagcaaatatcttttactaataatctagggtcattttgcctaatgtctcttcactttgattcctctcttttcmcrtaagacgatgtgaaaagatgggacacaattaaatgctgttttcattggttggtgttagatgagtggaagtcataccatagcgttctctcttttgcatggkttgtaaaggttcmttygggcaccattcttaagttcagagaatataaagatgaatagtscaaagtcactkcactgaaaaaacacagcataaggggatgggcagccatggcagcagctcatgttagcatgaggtctaagaagtsctgtgagagcttgggaacagacatggagaccaaccatgtggaggggctcaggaaggtgagaacrgagagagaaaatgtccttggaggagttttttgatgtctaagctgagtcttagaggatgagtaagagatgsycatacaaaagatggagagaagtgtttcagggggcaaggggsycaattctaggscaaaggagctagatgcacagttaattagacacgttcacagaayagatcagagatgscaaaataatggccaatagaccaaatcctgaagaagcattttttgtttgscctsctgtgccaggctggtccttgtagatgtctgcatttgtaaacatggtccctgsccaaaggtcctggtcccaaggggcaggtaaggagatggagtaagaggtcascactatacctccgggtarctgcacgtgcacgcagctsccagtctccaaagcagcagagatggatagttttatttcccagcttcattctttataaattgtgttttatttaagyttttcaaagactctttaaaattcattgaccctatttggtgcaggtgaacaaagctattttttaagtagagtcytataaattaaaaataaggaggcagatcagagaattcaactatctggctcartcaggagaaaggaaargtatgtgtctgtcacgtggcaggcattgggtgttatgggatccaggagtaatggagggattcrgtagttggtccctgccctcaagraattagaaaaacagactaagagattggactacaatgctggaaactctgattttcgtagctgggacaataggaatcactcctccttaaaaattcctaagtctttgtacaaattacccttaatttaagatgaattggtgtagcataattcaggggtcaccacgtactcccctctgaataagaaggctgaatctcagtggtcagcaatgagggagattcattttggtatttttttcttttttmttttataggcaatctttcttctcwtccttctagattaacaggattctttcagtcagctttcaraactcattcagygtagatctggtttgttttcttccttgaaaaaaattattaatataataccacagtctctgcrccgaacatcatgatgcatgcctataatcgcagctactcaggaggctgaggtgggagaatcacttgacaccaagagtttgagcattttttagagatgggaccccatttcttaaaataaataaataaataaataaataaaataaaaaggtgtctgtgtrtgtgaaaccacaatctccacgttctgaatgtaattatgccaaatatattttcttcttayattcttygsatttcttttaaacatgttttaaaatttaattttcttttaaaataggttttgttttcycattttcttcacaatttccttaagttctgaatttacatcagkcakctgccactctayaatatctataacttgagayatgttcagaaatagaaaactcctaaataagattctggggagacattttcaaaacagttttctgtagaggctttctccagaaactcatttccaagctccaatgtgggatttacacrggaaattaaagttaaattgtcttgayttgattaaggttttgcatttycttttgtttttgaagaaaggatattttattttgtaatttcaaagtcatttattgtggaagaatgaccaagaagtatgaaattaatttttgtctaaactaattacctgcagagctgctcaaaatataaagctttcttgacttaacatttcataggcttctctgagacattacttaacagaaaggccacatttttccaggaagttatttaaaagtcaggtaatttaaattacatttattaagtgcaataaataggcaccaaattaaagcttgtttctctcttatttgttcttaatttctgtagaaaattatactttcgtagagctatgtaggggctgatgtttagtaaacaaaacaatgttatatttaaaaaggagaaaaaaataattcatagaaatgtgtggaccaatttttccccactctcaatccatcagtttcttttctacagtagccttgggcaggaaaggcagaggtagaaaaatctcaagcagtgatgctcagtagaaagacatcttaatttaaaatgtaattcagttttgtatatgagttttgaaataaatcatcattcaaccctcagcatgaaccatgaaccgatttgcatgcgtgagtgaatgaatataaaagaatttttttgttcaagaaaattagtctttttctgaccacccccatcaaatagtgctgtttttcttattcayacatttattctgtgttgttgaaaaktagaactttttttrcaatattatcacaccytgttcaactctatttcagattgytcttatawaaattcaatccagcaagaatcactcacagagattattaattcctctgttcttaataaaaggccattacagctactgttgcagcagtgcaagagcaccaacgtttaaaaaacatgttttgkatgtgatcaatctagcttttcaatataccrctttttgtaatttggtataataaaattaaattgtaagtaaamttaaaattgaagatraaaatagtggtatattcataagtctttataagtctgacaaaataaatcaggggaaacaatttatggcaagtttatcagcccctccctccagctctatttaaataggtccttcctatttaaattattctgtcttatttcatctgttctttcttgtagctgaytttacaattggagagtycacggyagttacatgtgttkgtttaaggtctgtcttcctttctagactaaactcttgctgttttgttcactgctgtacagctacacttagcatagtggctatctaggcaatgagaaattttaatgaatgaatgaatgaatgaacaagtcaacactatgtgctcatttaacaagcactttttaagtgctttatttacatcattgtatttaattcttaagacaactctataatacctcccatcttacagatgaagaatctaaggccaacagattaaataatttgctcamgatcacacggctaaacaagtagaaacccrccttccctattgtctttttattgagcctttttacctaagcaagtttgacttgaaagtttcagtcttgccattgaaagagccataatacaccctttcagttgaggaaaccaaggaccagagaggttaaataagttacccmcttttaaataactagttaacttcagagtcagaactagaatgcagamcacctgatcctactcagcatgcttagttatgstwccatgaggaaaccagaatwtagcactaataataaaaagtattaaagtattttwaaaacatatttcttatgaaaaatcccaacagatggaatagtagagtgagtacagtggaccctcaacatactcatskcccagaatcaacaactatcaagacttttaccacacttgctycatcttgccctttaagtacttttaatgaycaaaacacttgtagctgtatgattaaattaaaacaaagtagatagtgcaggyaagtcagaagtctaaggatatatccaaagttcctctgctaattgataacagagctagttcacagccctctrttcttccactagaacatgccaagagatatataatgaaagacaactgaaagtggrtgacctaaccaggccggccgcagtcagcactggagtggagcggcttatgttggctcagcrtatgtagcttggccagatggggaccagcatcacattggtaatggtatagtagttatcaaatctcagagagcttccagaccacgtggattcctaacaagttcccaggtgatgctgatggtccaggagccacacttagaatcatggtgtggaggatctacccagaaattccaatgaggccctctttcctaaggtaactgagcccagagacacccaagaaggccagcttagcctttcttctcctcatcttgcttctagaaaccagatgtcagartaacacttgaactggaagcaaactgctaaggaatttaaatgataaaaaggagwaaaaggactaataaaaaaaatatttcacaaaaaatttaaatattgaataaattatgaaaggagaaaactcaggtgtgtatgtgtgtgtgcctgtgtgygtctccaggcttgggatgctttcaaaaatccatctaggaatrggaagagccgatggtttttgtttttttaatcaaaggctgaatggtatgattaagagaaagagtatatagactaattgacctaaaataacaagaaatcagtctttgacataatagtgtttgagatctctgagatttagctctgaccacattttatgagcactaaggcagaaaatcatagttgtgtttaactgagatgaaaaatgaacactcttttctaacctttttctatctaaaagatagatctcttgattaaaacagctaaayttcaacaacctgaatrtaaccatgatatttaaagatttcatggyaaatcaaacttaataacccacatattawttgatatattctctctttattccaaaaccattattattgcttgtcctctttctacttaacagttccaaagagagtcctttactttttttttactgatgtctcattgtatacaaatattctaaagaaaatcctctagttacccctttatttaacttttttcctctgccttatttcaaacaagagttcaagtaacttgcaaatatatgtaaaatgtgacaaaatagtccagaaaaagaagactaagaagagacaaagtggagccaagaataatagaacttaaagtgmaaaccatgatcaccctcatgtcattagaccaaagagycgttcagtgggagaggagggcccgctctctgcttctaatgtgctccaccartgcattttaggaaatctggaagatagattaaagatacaagctagctgaaggctgtttctctcaacgaagcatttgataaaaattatgtggtggtgtgcccacgattcttcttcctttraaatgcctaacttgagcctctcttgtgaggtgaattaaacaaatgcttgtctctctttgctgacttccacatggcaggcagagtagtccttctaaaaagcagatctgatcattttcttccactttttaaaatctggaagacttcactgagtctgcatttgcccagaggtctctgtatgtggccttcctaatttctgtgctctcttgacacctcccaccctcattctactctccagatatgtggaacataaacttgccattcttctcctctttggccttctcacwcrctgttcccactgcctgcaactctcttctccaccctttccgcccatctcccacccatccatcgggtctcagtttamacatcacttcttcctagaaacaccccctgtccaccacccagcataaactaggttaggtgcccctgactgccccgtgttccctgctgtgccacacatgcttgccttggccacgaactgaccaccactacagcatcagtgcccccaggacaaggaccacacctgtcttgctcaccacattatatacagttgtttygrtttcagggaatgcrgtattaggctatttgcataatggagtaaactgaaggtgcttttaagcccacaggaagctcctcccaggtgattgcatcccaactcaagactcyagccaccccaggccctcagcagacccaggaaagaagargctcagcaagttgtattacaccagtgtgccccacrtacagttgggagactctgggttaaactgatgagccaacaamygagcctgagtataggtcctgtttccaagttattttacttgctttgagtctcagtttcttaytgctaaaatgaggtaaygctatctcagtaaacttgtcttattttaaggtttttttttttaagaaactcaatactgttttttaatctatcctattggcaaattttattttttgttttgctttgtttttaatgtcacagccagtgttgatacaggttctagaagatggtgctctcatatagtgctggtgggagtgtaaayttgtgcaaactctctggagtacagcctgacagtacgtgtcaaaatccctacaacatktgcatatcatctgacttagcagtttcacatctaggaatttatcttcggaatttcttctaaccagagctgtgaacaaaagtctacccataagatatttatcccaacaygctttttgatttttaaaaatggaaaaagactgaatgtctgaaaaaaagtatattggktgaattaattgtggtrtatccaaagaataagccactgtgtgttataaatattaatgatgttgatgcamaaaatatatttaatagcctggggaaattattaagatatattgaaataaatcagggrataaaaccacaatttagcatattctcaattttttttaagtagttatatcattggaaaaaggcwgagaagatatcaactagtatgtttctccgaataactcatgaagaatttcttctttgtgattttctagaattgccagttttctgaattggatgtatattacttttgttataaatgttttaggaaaaatgaaacataacaggaaaataaatttcacacagtttgcawttggagtacctttgcccataacacaagaaagctctgaaktccactgattgwgggctcctcgtgccagaaggggaaggattccttcaggtgcctggatgctgagagtgatcatggcatcctgggtaaatagcttcattttcgtttgcatggcttgtcagcctacccagttttcattcatgcccttgtgcacaytgatttaaacaccaaaattgagccacatcattttctgtgacttcaacaaaggtcagaaactaaacttmcacataaaatggcctatctcaataaattaaattcatgtgtgctcttctaaaagggcttttcrtaacactaatrtctytgaatccaactggcctccacagaacttgaagaaggagtaaacaaccttcttcttcttttttttttttttttttttgacacaagggccaattcaggaaaaataaaatgtttatcagccacatttttctccctcccaaaataaagctagttttttagagtctcatagggaaaaaaaaaaatctgttcttataagctataaattaccttattggaagaagaacaacattataatatgtgcactgctttttagccatctaaagtttcctttctgggtatataggagatgtaacaacacagaggtatctttgtaatctttcatctggaaaatcatattgtgtgccatgttgggaaratagatggttccaggtcatatgaygtatgagggaacttcaaaaagattatggaaaaaatagaattaaaagataaaaattaaaaaaaaaaamctatttctcaacctaatctccatcaaggtcaagacactttggtaagcagtgataccagccatttagtctatctgtaaagaactcacagagtcctgggaatttaaccatgtcaaagcattcttttttacattattaactgaagagaaatggattccctttaaagactttttaagattaggaaacaaaaagayggcagarggagccaaatcaggactgtgaagtggatgcctaatgatttcccatccaaatgctcacaaggttgcccgtgtttgatgagaggaatgagcaggagcattrttgtggtggagaagaactctctggrgaagctttctgctaaagctttgctaatttttttcaaaacactctcataataagtagatgttattgttctttagccttctggaaaggaatcaagcaaaatgccttcagcatcccaaaaaactatggccatgagctttgctcttgatctgtccrctttttctttgactggaccactcccacctcttggtagccactgctttgattgtctttgtgttcaggattgtagtggtaaagccatrtttcacctcctgttatatattcattttcttctttttttttttttttttgaagaaatgcctcaggatcttgatcccatttgttkaaaatttccattgaaagccctgctcttgtctgcagccaatctgagtacaatggttttggcacccactgagtggaaagttagctcaactttaatttttcaatcagaattgtgtgagctaaaccaattgagacgtctatggtattggttgttgtttctacygttaaccattggtccacttaaattagggcatgaaaaagattcattttttcctcacaaattgatgtggatggtttgcagctgtggactttaatcttcaacatcatctgttcttaaacaagttatccatttgtaaactgctgatttgggggggcattgtccccataaacttcttgtaaagcatcaatgatttcactattcttccatccaagygttagcataaatttgatatttgttcttgcttctgttttagcagaattcatgttgctttgataagggctcttttcaaactgatgtcttatcctccttaatgcctcaatctagatcctgttcagacatgttataacaagttagtatgagttkattttggtrcaaaaaatttttgaaatccatgcatagtcttttcagaatatgcattttccatgaactttttsaagtccccttgtatacctccaccttagagaaatgtgtttcagcagytggtgagggatacagttgaggaacaaataggaaacagagggatggaagagakaaaggcaakgaatgtgtgtgrtccactccatcaggatgcttggctttgaagagtgttgaagcaagargggtattaccttgggggaaatatgaagaaagtaattwatttgatgcaggargttaatagacmgtagagatagaagataaaagacasattagggaggagattaaataaaaacaaaagtggagggtttatctttaaaaggaatgaagacagcctcttctgaaatgggaggaaggaagtaaatctgagggcatttgtcactgttgtataagagggaagggcatctgttaaggcgtcttgggagctagagtgaacctrgagccttgagaaggcaggagaagagttaaaatagtcactataaggaacgaaartggaaatcagccctggctaagcacccgcactgttaaaccatccccttgaaatggggccagttagtatragtgtwagcctttcccagcaggagcagagacagtargttattgagcagatccagrgtgggaatgttggatggacaaggcagaatggattattgagggtgcctgagtgagtattgtggaagtaactgaccacagggttcagaagagatggcccasgaacaggtgggtggaaatgccacctcmaggcagaatgtgcactcagaagtctctcagctgtaatttatrgttcttctgtcacargcaccttgacagcaacataycccttatattttctcattttccatcaaaattccattctgttgggtcactctttgggcacagaggctgcaggccaggtaggaaagagtcagtgctggcccctatagcagagtggtagagtggtggccagaattctccatcaagtcacttctagctttcatattctgttgccctgacttcattcmgtactgtagttccagctgctgggctctcctctggcmccctcccrgctaaattctaactcgtcataattctacaagttagtctttttcctagaagggccctctcatagatacaggccctctctcctgccataggaacactgcaaccctgtgcatagaagggtatcatctcacatgtgtgcacatagggtaaagtctgcctctctagggagttggctgtttttaaaaccagagcacyctagaagctgcacactggtgactcttgcttgctaagaaacgtgttgtggaatctgtaatccagcagggtcactgaacactacacaaacataycttactcagaagtggaattatggcttctgctaggagaaggcaggcttgagtaacctccttaggtttctcaagaaagaataaataaacatgcatataagcaggaactagtagatccaatttatctagactctcaaaaagcctttcacaagattcyatacaaagtctacttttagaagttggctcttttgagaaacaggcttataataatcattatcattgtagagttttagatgatgggtttcatttgcataaataacactgtgcgacctccccttgaaaatcccgtgtscataagtcacgttacrgcactggtactacacaacrgccaccyggtgtttactgttgtcrggaaccggtagcatgctgagcctgtaattcattacagacrttgtaatgatggcagtcagaggcacwtcattgctactcatgatcactaattaagtgaygtcttaataaagtataaatacaggggaagaacagcttccagaattcaggtagtattttctgcccaaatcttccaatattgtgtytgaagtkgtttgttcatgactaaatataaaatggaacactgtgcaggaggcattgtctcagtcagtcttcaaccctaggaggaaaagatgatcatttctcttrtagagaggagtragtgaaacctagctgccctatagccaggaagggacagaacctatatgaatccagaacactctaatcctgactctcttaaccactttactcttagctagcaaaatcaagaagagcagccagagctcccacaaacatattctttcttattrtaagtttgtttcataaagaggattccccatatccaggaatcagccagatcagtrctgcctctactggataggtggattatttgtactttgtcagtgccgattttaggyagtrtgattgagttgagttggagatgatcactccasgttctctgcctttttccagcccrttgctagctgtgtcctttgccacttgttgtgctgttccdggagttgccattctgaccttgggggtgaatccacwcacaggagccctggggctcttcaacattttcctgtatacctgctgctacacaccactgaaaaggatcagcattgccaacacatgggtcggagctgtggttggggccatcccgcctgtcatgggctggacagcggccacgggcagcctcgatgctggtaagtgtccyrcgatgtggagtctcayatgagcacactcggtcaaggaggcatttcctccctgagctgtagcacttggttcgattccattccatcccacrttaattcttttagcaaatgtgctgatgtggcagactgaaattytgtggaygcagagtaaagagagaccgtgtcatcctggctggtgggtgcacatgacatacactttcccttrtagggaatgtctgggagaaaaaaaaggaagcagtgctgcctacctgtgactacaggtggataaagaaagtacctgaagctatgatgaaaatcacaaacgaagctaggactaacgaattcatggggcggggagaaggtayctggagctggcctccagtctcccatcaaaggggtttcrtctcacgagccagcctcctgngttcccctcttatgaaagggcagattattttcattagtttctaatttatttttatatgatttgcttaaatcgttcatactgtctatagtaaaactattgaaagattcctacatttttttggtggtatgtcacaactaaatttgtggggtgaaaatagctcatttttaccatstgtaagggaagtttcacagtctaattagtcaagtaattagtgtttttgaccgacacttaggaaggaagtggtgaggtttcctgcaatatatgtaagtacatatttttcacatgagagatcaaaaggcagttgaccataaaccgttaccctgtaagccacatttctgaaacttttcataaaagctcttacactccaatttggcaagcttacaaatgcgattacacctttaccatgattgtctcttagaatggytttaatatcctgtaaatgtcagattttaatgaatctacraataccatattctaaaacgtatgtgcttgtgtgttctgtgataaacctaaaaccagagccccatccayrtgggaggcagtgtcagcaaagyggtggtgagcaaggaagccggcggcgctgcctggatggggagcccgaccccaccgctcatgagctgtgcatccttcgcrgctgaaytcarcctctttctgccacygtctcctcatctcccacatggggctaataatcttctcccctcctggagtcattgtgaggatgaaayraattgttatttgtaaggtgctggaccatggtgagggctcaatttgggatctgtatgctgttgttatcattcaggagtcctccttcatacagtggaggractggcacagatcaggaaatggaagattttgtttggtttgtaagctgagcgatgcagccttgtcctctggctgttattttgaagactgaggcgcctgcagcctggtgggaaagagtgctggggtcctttkgtgaggtttgcagtggatgagggaagggagggtttaaagcctgggcttggcatccctgggctagatgacatctgcgtgttcatcctggtttatagttgaccttcacagagcacacctgcacaccaccagccctcctgctcccggtcacgttcctcttccttagttccacctggagctcacctgacttgaccccaattccctctcccycttaacrcaactgtcctcttccctcttatttccctcaaacctttatagtgattgtgcagacatttgaggtggagaccatgaaagacagtgtgggacttcctaggctgtgcatggggagtatcccccttcctcaagggtgtagccccacttcagcacttgggtccctgcactgagccacctgcctrtctgatggagacacccccatccctggcaggrgtgcctgaacyctattcaacttcctcaaacctggcaccaagcaacaagaaccttctctttctgggaagacccagacagggccagagtcagggccaagtattacagccttagggacaggtagtacaggagactggtatgggcagttcagtcccaggccatggagaacttggtcaccactgttgtgcagtgttgtcctagggcccaggttcttgctgagggctagaggcccttgtcacacttccrggcagtttcctcctgaagagagcctcagcatgtgcaggctggagttgcctccccggaggctagagaaaaagagcttttcaaaagtcctcacttargagtgcacattcagacaagagcccttatttgtttaaggatagtctggatttggctaaactgctaatagtcatgtttaaaataattttttttcttttgagatggcgtctcgctctgtcgcccaggctggagtgcagtggtgcgatctcggctcactgcaacctccgcttcctgggttcaagcgattctcctgcttcagcctcctgcatagctgggactacaggygcccgccaccacgcccagctaatttttatatttttaatagagacggggtttcaccatattggccaggatggtctctatctcttgacctcgtgatccgcctgcctcggcctcccaaagtgctgggattacaggcgtgagccaccgcgcctggcctaaaataaattttttaatgttgattatagtctttctataatacagatttaatcatttgtatacaaactcattaatgatggacagctaagggcagctcatcccttgtttaggtagcagaatgaaagtacgtatttgtcttggaaaatgagaccccttttctaccccaacagaacctggtataaaacagagcagtctgaaagacatgtataaccacaaagagaagttcccttggcagtttttgaggttggcttctattacagtgtatccttttactttaaatcttaaagatgcattgtggggcacacagtaacaacatgacttactgcccccagaatcccagttaattgcagatcaaaccatatgcttaaagccttgtcaagattatacagaaagaatactactagtttacataatgctttaaactacttcaaaaaagtttccaaacattaatttgatagaaccaacttgagataagcagcaaatacttaattgaatgaacaaatgagtgaacataggtaccttctattttacaggtgatagaatctaagagaatgtatttttaaacagatttttattgctgggattttaggaactgggttgaatatggtcttatattgctaagtcatcttctagagctgtactgtcttgtgtrgtagccactaggctcaagtggctatttaaatttaaatttatactaaactttaaaattcagttacccagtcccattagccatatttcaaacgcgcaaaggcacatgtacctagtagttacactatcaacagcacagatgtaaaacatttccattattgcagaatgttcacttagaccgtactgcctgggtggaaaggttgatgtccttatgaatctatatttcatcatcctcacatgaatatgtacatcaaataatgagactgtacctgtggtctcactaaagtctaaaacagtggtttgcaaacttcagagaacatgataattacctggagagcttactaacacaaagattcctgggccctacccctggaacttctgattcagtgggctggggtggggtctgrgaatttttatttctaacaagtttctagttgctgctgatgcccctggtccagggaccacactttaagaaccaccagtttgcaaagacagaaccagacagagctctagccattagaatatcttgaaaatacctggagattaggacataggcagatggtattatttgagatgtactaatggtgtcatttatattattcacagaggggatatctctcatctgggtttttatcttaggggacatgtatagttataaagagcccttctgagaaaaaaaaaatggccaaaaaggtttcccgtcttctgtggtattgccaagcacttaatctttgagcccccaaagatggatcactttagatcaccacctttataaactggtccccataattgcttcatcatgcaagtgtcaactggggacctactgtttgccaggcatcgagagacacaaacataactaaaacccagtgagtgccctcaggaaatcacgtctcagggtctttggggagaggcaggcaggtaatcaaatgattgagtgatctaagagctttagcagggtatcttcagagggctgtgggctctcttaacttaccccaaactggtcccagatgactttggagaagaaagtctacagaattaagtcatgaccagttkctttgaggagggaatatgctttccaggaagagggaagagcctgtacaaaggcttacaggcctgaaagccagtctagagtggggtggggacacgtgcaaggatgagccacctgcagaggaagtcatagttcattcagtggtgagaaagacccactggagcttgaggcagcataacagcagggtcatacatttaggatcatttaccagtgtgctgcaggttctccaagatattggaaagtcagtaaattgcagaagcctgcctttattgtccttccaagcctgtgtgcctcctctcacctactacttccyctcctccacttccttctytctccactagggctccacctaccctagacctgctccctcccacactctctttgccctccctagttaatttaacagtttgccttttaagtagtgaagcatcaatctgatcatcctttgaagacgcagcttgttaacaccagtgaccctccaagcggggaaatggatgaaggatacatgtttgaagggaggcaggttgcacggaacatattcccttctgagccaagacatcaaatacccagcaccaaccctttagtcacccagtcaccttgactgaggatacttttgcaaaagcccttcctggggctcagtagatggtagtcaagatggagaggaagccgctgagccaagatttgaaatggaaatcctgcagcctcatatattgaaggcccaatatattttggaggagagagatttaaagattggtagctatagaaaacactgtgcatttgaggcagcccatgggtcagagtgctccaccaagcaaggaaatgcagtatgtcgggaagtaccttttcccctttgtggtgtctggctcattttgtgctttttgtggtggctacagggccagattaagaattccagggggccttgagcactgaagagattgtgatgcctcctctcttcctgcaaagacataaaacataaaataactctaaggatgttccatgggattctgattttttttccccccacaactactttgactttttaaaaatcagatagtgtaaaagaacttctaattgttctagatgcccggtgagaggtgtgggtcccacataggtgtctgaccggcccacttcgggaatccagcatggggtaagtgaggtaggatggcagggtgaagaaaatgacacagatgagcagatggatgttgtgaaagctaagcaaatgtgaattgttcttgatgtttgctattttataactgcacaatgaactgtaagcagctcagcttttctccccrtcacagtgccaacrgctttcagtccagtgcttgctacagagagtgctgtgccgcaaagcrtgggcccagcccagagagtgctctttgtggttgttctgtcagggtagtcaggactctgcggcccagctgcttctgtgcacaggaaataacttcattttacaaagccctctgtctataaaggtaatcattataatgggattttacttgtrtccattttcctctcagcctcagagttaggccttttcctctcacctgcctaattaccttatcttaatttttttttaattcagcctaactgctgttagcaaaaaccattaaaaatgcttcctagctaagattcaggaaaggcagaatgagagggttgctttctggcccctggtctagccagcttgttgtcacaggaactgccgcacttggtttgattctgcacacagggaatggcaatgacagaagtgacctgctggagccgcggtgaaggagtccactctgaggaggtaggggagggaggggactgcagataagtgcccagccgacattccagctgcaagcgggcctggagccacacgcattaggcctctcaacagtgtttatctccagagactattagtgtatctcagaggctttgggttaaatctgctccccctccttcttgccaaggccccctcttttcatcactccaatatcttagaaaggttcagattatttttcctcattttcctaaatttgaataagtcccatgtttcgggagtgtatggattgggccttcgtaatgaccatcttgtagagtggatttgcagttgcctttggcttgtgattcaaatgtgtgttaagcattaattatgtcacccaacatttagttacaaatgaggactcagaaatgggatcttatcaggaagtgacatttggcagatggatggttttagtaacaaaaagagaatgagatttttttaccctcagctggtaaactacaaaatgttcagttctgtttcactttatttacctcccttattcctggatgagaaagtagagtcggagtgaatttattcactcacccattcaacaaatatttattgagggcttactaagtaccaggtactgtttaacccaagcacttaatgatttcctttataacgctgcctcggtttgaaaccaagcttgaaaatgagtatctgtgtctgtgttcactttgtataagattttaccataactagttttagcactccagattaagttatactagcgttggagctccagattaagctaaatgatagttttaaagacaaaataaacaaggaacattttcatgggaatattagcaaacaaacaatatttagaacactatattctcttgaaagaccaaaaaaaaaaaaagagctacgaaagaacgtactagaaattatgttgcaagcccccagattggtggtataattggaggcaaactggtactaagggcactgaggtcttgtcagttgtgctgtgttgaccataattgatcacaagcttttagggagctgggccagtgccttcctgaatgaacgatagatgacggtgtgccagcctctggtagacatggtgcctggagcagagtgcacgtgtaactagtattcttcagtgaattaatatttaagtgataaagatggaaagaccttccaatatgagctaagggagtaggaagcatttgaatttcagagagaattcacaggtgcttgaaacatccttccaaggaaatggcaagaagagaaaaaggggagcactgttttcagagtcagagctttttgcttcctttactcccatctttctctctaagtgaaacctcctcatgactctgcctggagggcggcagcacacaatgaggtgaaggagaggagagaatccagctccctcccgcccactgagcctctccattattcctaaactactagcaaagaattcttcaagggcaagcagttattgcccactctatttcctattttcaggggacttttaatcttcccttttgtcgcctgtgcagttgataaactggccccacatcctcttccctttatctgcagcaccatagaagtctattgcactgttgaagctgatctgtttcacaagctcctttgtgttgcccctcaaaagaaaggctttgaaatctgtgaccatgaagctctgggtttggctttgcttccccagctagcccccagtctacataaccacataaccctaaaagcacaaatagagccagtcatggagcagacgcgctaccgtgggccacatcagagaggagactattgtactggcgagggaagacctcccaaacccagcaccaaggttcactggagctagggttctttatcctttgcaaggccatgcgtggatggtgagtgacaatgggtttggggggtgggggtgggaaggtgcccactgggcagtgagagaaaacaagccgaaaccgatgaactccattccacaaggaatttcctgacagagtcagagctccagcttgaggatttttgtctccattccattcagataccatttagctggaattgccttagttttgtcagcaaagtgatggaggtgtgctgtggacaagagcatttctggacaatgtgcagaggtggaaatgattgcgattctcctccagtctgtatgttgtagaatgtttgatagatgcttcgagagaatataaaaatacatagcattttcaacgagtcatcaggaagacattaatgagccttgccccacctaatacagccctctaatcagagccaggtgccactggatgggggttccctccagctgttcttacatacagtacagcagatgtgcccttctccattttctgaggaaggagggaagtaacgatgccctgcacacctggacattctatggagttgcctttgcagtgggatttcagctccatgctctcaggaagctgccgtgctctggagagccatgtctacagatatgccacctagattttcagaattttctatgttcacagactagcaagtatttgattaacagaagagaagtggacatttctttcaaacatgattaaaccaaatgtgtacaaagattgtgcagggttaggtaggaaaatgggaagatacagttaaaagaagtcgaaaacacgtggtttgtttgaatggattgaaactcagagaccaattttagatctcagtttacaaattacttcttccaggaagccttccctgacctctcaaggctgaattaagtgttctcctgccctgcactaagtaacattcaccatgggctgtaatccctttgtgttgtctttcttcctggccagacacgagcagaggactttgaaaacagactgtgcctatctctaggggcacacagtccagatttgttgtcatagatgacagacccaataaaaatggactgctttaggagcttgaggcagaggagatgagtagaatacttatcttgaaggaaggtgaggtctttgaattagtcaactgagtgctttatgtttactccacaaggaaggtgggttccaccacagccccggcactaattcaagtcttcctgttctagttcaccttatcttgatgaagaaagtaatttgttttcatcttttataggaggagaggcagttgaagcatatcaagtaaagccgtgtgtgggtggtggttttctgattacaatccattaaggctaggctgtgatttccaaacctccttcatttgtgacatgagccaaacccacacccaatttcctcttacagaaaacagcatgctactctcaggaaaatgatttctttaattatgtttattttaagcagaagcattactgaaaaaagtgtattgagcaaaacaaaatacttcggttgacacacacaaaaaaggagggcttttgagaaagacaaggaaaatctcacatttggagctggtattttagccrttttcccagctgaggttgctctttctgagccatttctagagcaaagcagacactgagctctgaatgatccaattccttcccccatttctaagttatcactgatgttgtttttcttgaaagacacttcccccgtgcttgtggctgtcataactgcaaactctttgaatctgagacagctcgtgagctggggctgggcttctctgtacctcgtgttcaaagtctcagcgtgaccccacgccccaagactctgacaacgcttcctcttaccagtcactttaaaatccagaggtcactttatttaccatcaaaatayaaagaagtctacttgcatcaccctgtttactccgtcagttgcacctgagcattccaacctttcctctgtcctttttaattccctagcagtactcactgccaagaaaaaatgccttctagttgatagttttgtcattaaaacagatctctctctttttttttttttaaggtactagaaaatgcttctgcaattttttctttcagcaagccttcctctacccagagcacccaacagtccactgatgtgggaatgtcacaaacttkagtctgtgtgtggcaacaacttttttttttttttttttaagaattgatgtcttgctctgtcacccaggctggagtacggtggtgcagtcatagttcaatgcagcctagaactcccaggctcaagcgatcctccctcctcagactcccaagtaggccggactataggcacgtggcaccttgcctaattttttgtagagatggggtcttgctgtgttgccccagataaccaaccacattctaacagaaggtgctaatatcttgtgccagtagtgctgaatatcatcaggcaaattaatctttctcatctataagatgatgatgatgatacctataggcggggttgttgtaaggattcgaaagcatatgtgtaactgcctggcacgtaaaagccacaggcatttcaactgagatgtctgttatgtacctgaaacttaaaatagtcaaaagtaaaaccgttcgtgtctctaccgtgagcacactcagcagtgtctatcctagggttccccacctgagtaacccccctctgccaccccctctgtctctcgacccccagcctgttcccccctgcgctgggggaagatcccactccttatcttgatttccagatgccttcccagccccatcttgtaactctcccttcctcactccagcctccatgctgtctcagaggcctactgggacctttcccagcatccagtagagttctccttgccattagttgagtcatggcttaaatgtcacctatggaaaggccttccctgagcactcagtctcaagtcacccgcattgcattaccctgttttgagtcgtctcaaaataggcatcagcactgttacttgtgtttatgtccatctccctctagactttaagcaggacttgattgccactgcctttctagcacccagaattgtgcctacatgtgagacacctgtcatctgtttaccaggttaatggattcaatgaataatagctgctcatattatcagcattaaaattgagtgtgtttgcatgagctaagatttatacatatataaattttatatatatatgtataaaatttaaagttaaaaatgaatttgggggatttgacagtaaccctactgaaatagggaccctaaaatcaggtctttgttatatttcctcccatactggaagactgaaaaggggttgactgacttatggaagccacagaaaactattcatggatataaaaggaggccctcatccctcttaaaccatctgtacccacacaaattccgcttgataagctacaactgccccgtctgataaacgtaactcagaaatgattaagtttctccccagaacaatgtgcattaaaaatcctcctcctttcttttagatgacttgcaaagcctgcccctagtgtcactctgcactctgtgctgttgaggaatacagatcagagattaaaggaggagctggttccttctcatgctcactgtcatttgcacaaactggggcccctcagtggcttatagccccagacttattttctgaagtattctgcattatgtaaagtgctctgtctcctggtgagttctgcctagcagtagcccccagctccctttttctgaacattcccacagaccagggacttaaaagatcctcattacctgaaataggactgtggttacaaattctcaacctcttctctccctgggcaggatggtgctttccagggcagatgacacagwgggttggtgaactctcagttctctgccagggaccccatggagaaggtggttccagaggaggggaaggagaagatagacagaatcctgtagtttgcctgactggttcccaagccggtgttgggaaacagtgatcttggggataacttaattggctcccttgatgagtttgggcgcactttactacaatatcattacatactttctgtgttctaatgcctggagattcacgggaaagtgaacataccctaagaagttcacctcaggtaggaaatgcagacacgtaaatgtctgcctggaccctgtggcttgctcaggaaaagacgctcacagttgcttatcacagaygacacccacactctggctgccacaccctcttagtgactttccccttggatgtcccaaaggcatctcagactgaacacacccaaggtcacactaatgacctcctctccccttcttccctgcttgtctcagtaagtggcatctgtatggatccataagcccaggatccataagcccaggacttgctattgatacctcctccctctctcctcccctccttatttacactgcacgcacatcctgtcccttttgcctcccaaattccttccaaatttatcttctttgcaactctactgtcaccatcctgatcctaagtactgtcatccttcatcccctcactccttatctcctgattggtccttccatacctkctttaggcccctccagtgtatccttcacaaatagtatcacttagcactggtgcccctcccctcaccccctacacacataggtgcacacactcacacagaggtacacatacacgcaggcacacatgctcagcactcttatacgttaagatccttctgtggctttctgttgcttttagaatagcaaagtcaaggctgagtgcagtggctcatgcctgtaatctctgtactttgagaggctgaggcaggaggattgcttggggccaggagttcaaggccagcctgggcaacatggtgagaccccatctctacaaaaagttgttttaaaaagttttctgagtttggtgacgtgyacctatagtgccagctattcaggaggctgaggcaggaggatgacttgagcccaagagatcgaggctgcagtgagctgagacygtgccactgcactccagccaaccttgtcctgaggaactttccctgtcattctcagcactccagccaaaccacaccaccttccttttttttaatcatgcaataaaattgactttttaaatatatatagttctgtgactcctaacacgtgttaatcttcttttttacacygcccacacctcaaaccttccagccccaaggcctttatgaatactgtcccctccaccagccctgacttgacaaagtcaccactctctccagctcagctsagacatcycttcctcagagaagccacctctggtcccctagactcagtcagctcctcttatgtgtcttcactgcaccatgyacttttcctcactgcatttggagtggtgactttagagtcactagtgtggctcttgatgtctacgtccttgactgaagggtctgctcggtgcaggcaggagcacgtgtggattgttgctcgccatggtatccccagtgcctagcacggtgcttaccccatagtaggcgcccggggagcattttttgcgcgagtactcagtcacctgcacaggaataaccagcccctgccttccagcccccaccctactgcctgtccttaggtggcttcgtgcatgtcatagaaggaccctggcctgaaaatcaagcagccttgttttgaattgcycttccgtctctttttggagaacttggcattgcctaattttttttttcactgaagtttataaatctacctcaaaatccaatggtcaagattaaatggggcaaactatgagagtagggtctgtcacataataggagctcagcgagcagcagccttcattccacccatgtgggtgctggggagactgttccagagaaaggggcaaaatggtgctcagggtgttatgtccttgttgaaaaattacaaagccatagacaagttatcattgtactctgggaccgttttgtcyttgtgactcattttatttaacacatgtggttttgacacctcccgcttgtgccattgtgccaggctctgggggatggtgagaggaatgtggcaggcttgtgccctggaagccctggtgaaagaggtaaacagatcagagccagggtgtgacgcacccgcctgcaggtacatccrgctctgtgtcagtgctgagccaggagcactgactgccctggraagggagccagggctcacagaacaggcggagcggacttgcagcgtcctccaggttacrgcactgcttccacctgcctgaagccacacacccgggtcccagcgggcggaaatggagctcagcgctccagcacartggttgcacccagaggtagtactgaagtagatactgaattccctacaagtgtttgccygtgtgtaggggcttctttgctccccacaatgtggggaggtgtgaggagcatcaggtgggcaggagccagcgatggtaagcgtcctgcagcgcaggcagcccccctgtgaagcagggtctgagccagaccccacagcctcctgcccccaggcacactggcacccccaggtgagaaaggagggatcttagctcatyggctgccccaccagcctgatgtaggcacmtgtctcccagccaccctgtgatgtaggcaggcagcratgagagcacagggtggcagagcttctgaggtgccaggcargctctcccaggagaggaaaccattctttggaaatctctggtgatgactgcctttgtctccctctccttccctgacccccgcacaggcgcatttctcctgggaggaatcctctactcctggcagtttcctcatttcaacgccctgagctggggcctccgtgaagactactcccgggrcggctactgcatgatgtcrgtcacccacccgggcctgtgccggcgcgtggcgctgcgccactgcctggccctgctcgtgctgtccgcagcagcccctgtgctggacatcaccacatggaccttccccatcatggcccttcccatcaatgcgtacatctccyacctcggcttccgcttctacgtggacgcagaccgcaggagctcgcggagactgttcttctgcagcctgtggcacctgccgctgctgctgctgctcatgctcacctgcaagcggccgagcggaggcggggacgcagggccccctcccagctgagagcactgggacgcccaccgcccctttccctccgctgccaggcgagcatgttgtggtaattctggaacacaagaagagaaattgctgggtttagaacaagattataaacgaattcggtgctcagtgatcacttgacagttttttttttttttaaatattacccaaaatgctccccaaataagaaatgcatcagctcagtcagtgaatacaaaaaaggaattatttttccctttgagggtctttatacatctctcctccaaccccaccctctattctgtttcttcctcctcacatggrggtacacatacacagcttcctcttytggttccatccttaccaccacaccacacgcacactccacatgcccagcagagtggcacttggtggccagaaagtgtgagcctcatgatctgctgtctgtagttctgtgagctcaggtccctcaaaggcctcggagcacccccttcctggtgactgagccagggcctgcatttttggttttccccaccccacacattctcaaccatagtccttctaacaataccaatagctaggacccggctgctgtgcactgggactggggattccacatgtttgccttgggagtctcaagctggactgccagcccctgtcctcccttcacccmcattgcgtatgagcatttcagaactccaaggagtcacaggcatctttatagttcacgttaacatatagacactgttggaagcagttccttctaaaagggtagccctggacytaataccagccggatacctctggcccccaccccattactgtacctctggagtcactactgtgggtcgccactcctctgctacacagcacggctttttcaaggctgtattgagaagggaagttaggaagaagggtgtgctgggctaaccagcccacagagctcacattcctgtcccttgggtgaaaaatacatgtccatcctgatatctcctgaattmagaaattagcctccacatgtgcaatggctttaagagccagaagcagggttctgggaattttgcaagttatcctgtggccaggtgtggtctcggttaccaaayayggttacctgcagctttttagtcctttgtgctcccacgggtctgcagagtcccatctgcccaaaggtcttgaagcttgacaggatgttttcattactcagtctcycagggcactgctggtccgtagggattcattggtcggggtgggagagttaaacaacatttaaacagagttctctcaaaaatgtctaaagggattgtaggtagataacatccaatcactgtttgcacttatctgaaatcttccctcttggctgcccccaggtatttactgtggagaacattgcataggaatgtctggaaaaagcytctacaacttgttacagccttcacatttgtacaattcattgattctcttttccttccacaataaaatggtatacaagaacaggagtgtgtgtgacgtcattggaagtaatcatcctgtgctgagttcgcacagttcttggtagaaccgacacttgatcacgccttcaagagctggcagagggtgcgtgggaggttggttttgtttcgtaaattgacaaattgtagttgtgtatatttatgaggtaataaagtgatgttatgatttatgaagacaattgaaataatgaaatcaagctgatgaatgtattcattacctcagatacttatttttgtgataagaacatttttaatgtactcagtaattttgaaattagaatacattatttcctgyattcacacagtgtgtgatgtacgtcaaagggaggagacrtactcrtcataactgactttgtaccctttcaccatcttgtacccattccgttcaactcccagcctctctaaccaccattctactctctgcttcaagtctgattattctggattccacatagaagtaagaacatgcagtatttatctttctgtgccatattaagttgagaactttaaccttttcgcttaagagcagcaccttctggcttctctgacatctctggattgccagcatcactatgtgaggccatgattaagcaaaataaagcttactgagcacaagctctgcaatgccaccacagttggatttgataaccgagatggctgctaagtgactcatgggtgggacagtattcagcatggatctgctggacaaagagataattcaggtcccaagcaggtgacgctagattgcatcacactaagtacgccacacaatctgaaacttatgaaatgtttatttctgtcattttctatttagtatctttggaccttggttgaccatgggtaactgaaacagtggaaagagaaaccacagataagggagaactgctgtacatatctgccagcctggagaaatgagagcaatatacctgcttcttgtttgttggaaacccaaatataattgacctgctggacacattacactttttggcatcttttggccactatttcctaattgtaagatgtgaagatacgctctggatcaaagaggctctcatgttcgcttaataattcagagtccatcactcagtggctggactctgccatgcacatcacagagcatctgagaggcaaggtatccaccagcgtgggacaactctatgcttgcattctgatcatgcctcactcctcacacttcagcttgtgtgatgccaccagtttgagccctctgaaaatcccatctgaccactgctaacctcctctaccaccaccaggttggttgaaccaagcatctatccgagacacatgcctgcaagacatgcctgcagtttattttcctctttgccccagccttgtctgtttttctcatggcagccagcatgatccctctaagctaccaggcagatcctgccattcccattctccaccctgtagttgctttcctacctggtcccatgccatctggtcctgctcccatctctgatcttggaaataccttcttgccacacctactaccctgcccacagatctccacgcttttcttcaatactcaggcacacccgctgtggggtattcatattaatacctcctgttccctctatgtggggtcctctcatttcattgagaggacacctccttagagagggcttttttggccactttatcaaatagctcccctgtccccacctccttgctgtgctttgcttttttttttttttttttttgagatggagtctcgttctattgcccaggctggaatgcaatggtgcgatctcggctcactgcaacctccgcatcccgggttcaagcgattctcctgcctcagcctccagagtagctgggattacaggtaccatcacacccgggtaattttgtattttagtagagatggggtttcaccatgttggtcaggctggtctccaactcctgacctcaattaacactatttcatgttctatgtctatttacatatctcattatttaatgtctgtcttccctgcagtataagttccatgaaggcaaggactgtatctttgcattgctttatctccaacttctagaacaatgcttagcacagagtaggcactcaataaatgcttcttcctgaataaataaaagaataaccccgtctgggttatatgaggtccctgtggtcagagagaaacggcctgttagcctgggataaagaatgaatggatttggaaaggtattgatgacctgtggttccatgagaaaagatggcttctgtatagtccttatctggctggtgcaatcactgttcccactcccgacttcaggactctgtccccaggctgcactaaccagaatgcactccactgcctccaggccaccaccccactgcttctacttgtttctggaattgccttttctaacttcaaacttccaccccccctccactgccactgtcattcctgacatattcatttcccatagcacctattaatatgtgacatacacatttcacttacttgttattgactaccgactaccacccctgaaccgtaaactcagtagggcagaaatgtctgtttctcactgctgtctccacaggcacctacaacagaagacaatccataaatgaccatgtgatgggtgctccatcaatgatgaaaggaatgaatgagtaccttttatggcatggtgggaggtggaggtggcgggagcacttgaaggtggaggagattggtacatgcctgccccttgtgactgaatctggaacaggtgcacgtttctgcctgcttcgtgaagcaaactgccaaagtcgaaccaaggcaagtgactatttcttcctagtttgactcatcaattctcatcattttctgtatcttcaggggtaccttgacttaactacttggtaacagagttttcagcccagtaaattaagttggattcttgaccaatatttttactttttaaatgcattagcagagaatctagtgtctgtctccatcttcatccctcatcatctgctgcgaaaggctttgctttaactcattcccaccagataggagctcaggcttcacctcctgagcaccagcatcatgcatccaggccactgtaaatgagggaaccattcccggtttataaattggggacctgcctgtgaagtagaagccaagacaataaggactcccagttgcagagacggtcaagagggcaggtgggccccattcagggaacgagggtgcggttccagggtcgtgggaaaagcctgtctttcctcacaagccggcagccagggggcgctgcaggctggggcgctgtgaagctgctgttggctgagggctccccactcagcaaagcggggccagagccggggattcaggagagagcggggcgacgaccgcacagcacacagtgggcgaggcaaagcaaagttcttggttgagtaaccgcaccccacccaaccccaaacgtccaaagagaggcaaggtgaccaaggcaatctggagaagataagccacacacaccagacaagctccccggccctccccagcttcaacaaacacggaaagcaaggagccaagaaccaaaacagagacccactgagaggagagccaccttccgcccagcagccagctttcctgtgcccactgagcacgagattatgtgtgaggcctcgtgtcggggagcgagatgcacccgaatattcccagcccccggcagctcactccggagatttcctagagaggcaatgcagccatgaggtgggagtagaaggagccttcccctccccaccacsccccgcctccaaaccccgttcctaacctagaatcctccaacctcgcctgtgacactctcaggacccgccacctgactcggggctgcctttgtgcagcctggctgggggcttctcaacatccgcttctccatgatcctggctcttgtgtcccttgatctggctctcagggtccttcgttccgggctccatctctgtcacagggctggtctggccataggccctgactctataaggggacttgagccaaaccgagcactcaacccagcccatggctctttttttttttttttaatgggatagtctagcctctacgcatcaccgcagttgtgtttctgtgtctcaaaggaaatagttcagcataggcgattggtcattaggccaaacactactagggagtgtggagaggagagaaggcacttcaagcagagagcagggtgagcaaaggcccagggtgaaggggcatcgagtgtttggggagcattcgcagttctgcatggctggagggtaggggccaggaagagctggaggatgacgttgaagacagaagcggagggaccaggtctggccaactttatgtttgcccaactaagtcacctggactttaccctaagggcaatagggagccattgaagagtaaagctggaaagtagcatgatcatgtttgtgctttagaaagaaaatccaggccacagagcagaaggtggatgggaagaactgggaagaccaggggagcaataatgggtctcaatctgggcagatgagggagagggagagcagaggaaactccacagggttgattggggtgagagaagatcctgggatattcccggggtcccagtttgaggacaagatggtgccttcactcgaggggagtacctcttgcatttctcatgtccccttttctccctttgcctgtggtcaccaatatctcaattgctggtctcagctctagtggaagacccaggctgcctcagcctggcccctaccccttcacgctcacataatcctgcctcccccagtaatgcagacccctggccacccaagcctctgcctggaatctccccactgcctggcacgtgggaaatagcttccctggcctgtcccagctgcagtctcctgctgtggtgtggtgtgctgaacaccagttcattgaagactaggtgcattgcctttgctctaacagaattgccccacggttcccctcagtcaactgcgtctgcctggaagatgctcaaagcaggaactcctccaatttttctctccatccaagtctccccaacctgaataacccaccaacctattcagtcagagggtctgaattcatttgacaaaaaggaagaatgggattgcttgccttaaaactgacccaaactgtggctgatgtccagatccctcacacagccatttgacacttagtcacctccaaaatagaaatgatctccccagaaccagacaaacagaaaaaactcttccctactaagcccgctgtctgtttgtagacagccattcccatagcgctgtttcctcatgagctgaccattaaccaaccttcctgtatccatctggacacataattgcaagtgacaggaattccaactaaaactgaattgatcaaaataaggaatgtgttggttcatgtggttggaagttgagaagcacactggcttccggcaagacttgatcctggccacagctcttggtaagctctctccctttaagatactgagaacccttaaacaattattcattcctttatttctctatatttaactaccttgggccagatactgtttcaggtactgggaatgcagaagtgaacagaacagtcaaacatccctgccctcatgcctataatatatctctagaaaaaaaatgcaaaaaacctagtaactctggttgcctctggggtgaagaactgcctggctgggagaagcttcttcctcaaacctagtaagaaagaggaagtcttggaattgagatgcaggtcttaattggtctgattcagggttggtgcccatttttgattcaccgagcctggctcaagtcaatcagtggctgcgtgcagaaggcagtcttcccttcccatgactaaaggtttgggaaatgtggtaggaagagggtggaggaaggggaaattccttccagtttggtaatagagactttggagtcaggagctctaaggaaatgggccccagggtcttggagaggagtgccagccaaggctgggcccagctcctctgcagaccctcaggctctcccacccacagccaagaggtgaggctgtcctgagcattttacacctgtggtcccagcttattgtaaagaaagaccacatttatatacagtcccagattaataggtcagcctattacaagaccattaacactaagacaacccaggacattttactaccttctctttaaaccaaatccaccctaccccctgggatttcccaagccagcgccatgttcagggaagacagagccacagtcagggctaaggccaaatcccatcaagagcacctgaatcagcacctttaaacttctgcagctttcttctcgaaataaaatgttgcttgr

SEQ ID NO: 94351 - DNA, 18292 bp, Homo sapiens
aggggcctagacttagcaaacccaagaggacagtggctcctagaggaggaatgtggttgttccaacactgcagcccttgtgtgtgctgcccaggcagcagtgaagaccactgcccaggggttgccagaggggtcaatggatgaatttagtggctgtcctaacatggtggccatgagggagaccccagacctcagcagcttctgcatctctgggcatggtgagaagccaggagtggaaactaaggaggtcatcactccagcagttggggagggcacttggctttccttagaaggtggcagcaagggagggctcaatctcccaagtccaccggctttgagttgcagcactcaccatgtgattccattctcttgtgtgtccatcgcagccctgtgggcctcagagtccatttccttaagcctgtgctctagctccttgtgatggcttcacaggccccccacaggctcagttttcccctgagactcacccatctgggaaattcctatatgggcgtcctgtaacccactgcaaacttcaaacactcctattcaactcaacatacacgtttttaggatcttaaatactgaccatgctattaaaggtagaatcatagacgtcttagagtaaattgggaccttagagctctccaacgctcctgaattttacaaatgagggaagtgaagctcagaaaggttgagctgcttacccaaggtcacacagctagcttacgggcgggggtagaactagaagcctgatgttcaccggaactcatttctccatgccacattcttaacaaatgtaggttttgtcaggatttagactaactcatctgctaaacttcaagttgatttatttgagtgatgtgtttagttgattcattgtatatctctgctggaattatttctagccattgctaaagcggttaggtctgaaaatcagaagaatctctgtaaaatgctgaaagatgagccaatttttaaaacccagaagggaatgtgtatggcctgtgtagctggaggcttctaaacattttttttcttcatctgtggaacatttttatcattctggggaagatttagacattgaatgtactaaaaggatttcatttgactgctatgtatttacccctgcctgtaatccgctaataaatactcgcaggcagaacagcctaattggcaggatgagttaatgcacaggccatttatctgccaagcacatgacacagaccatgaacaaaataagctggtaactgcctctccctcttagcaaatgcttgtccgcaccccgccctctcccaacctgctcttcctctggccttgagcttggggacagtttgatgcacaactgccatgcgccagcaggcttcagataagcctggaaagaaatggaatggaaagaactttctggtcaggagcacctctctccgcagggaagtggccaccccaagttaaaacgtgtgctggctgggcacggtggctcatgcctgtaatcccagcactttgggaagccgaggtgggcagatcacctgaggtcaggagtttgagaccagcctggccaacatagtgaaaccccatctctactaaaaatacaaaaattagctgggcatggtgagtgcctgtaatctcagctacttgggagactgaggcaggagcatcacttgaacccaggagatggaggttgcagtgagcggagatcacgccaccacactctagcctgggcaacagagcgagactctgcctcaaaaaaagaaataaaaatgaaaaatgaataaaaataaaacgtgtgcttataaaatatagctaaatacaagttctgttgaggaggatgaagtgtctctctgtgttggtcacaagagtggattgcaataaaacaactaataatgataataaatatgatcacactggcttggccaggggctgccttctgctttagtcttccagaaacggtttagcaaagtcattgtgagactactgtcctggaacctccactcctcacctactcgagaatatatcaaggctgtctgggcctcctgccagccctcagtcctgtctccatgctggcctgccatgcgagggcagcctccccttcttggaggcccgcttcgaaccagtctcctagatctgcacaaaccctccctccagcctgggcatgaccatgttgtaggccgtgcacacaatacagcctaccctagggcttgtccccgctgtacgtggacaccccttccctggactcactctgcaaaggggcctttaactgagcacctctgctctgtgccctcacaggtctcycaggcagcygcggacctcctggcctactgtgaagctcacgtgcgggaagatcctctcatcattccagtgcctgcatcagaaaacccctttcgcgagaagaagttcttttgtaccattctctaactccgtgtgtgatgaaaacgcctccttttctgaccttcaaagtcccctgtagagaccatgcatgctctaagccttagggagtgagaccaacacccatccctgcccagccaacagtggccggggcttgtcttatgtttccatctgttttcttcgtggcattcaatttcatttttttccttttcattttcatgttattttcattattggcaaagaaaatcaaaatgtttatagccaaataacaaatgtgccatgtaaaagtaagtctggacttaagagtttaaaatttttaaacatcagtttccaagtttatatcatattaatacatttcagtggataatttatttaaaaaaaaaaactatgcctaaatatcccttatttgtaatattcagtatcaaattagagcattttgaccaactgaaacatataacgttttcatctcctttcctggagaaagcagctgcagaggttctgtatttcctgcatttccatcatcctagtaaaaagacaacaacccacaggattggaatggttttcttttgtttttttgttgttgttgttgttgttttgagatggagtctcgctctgtcacccaggctggagtgcaatggcgtgacctcagctcactgcgacctccacctcctgggttcaagcgattctcctgcctcagcctcctgagtagctgggatcataggcacgcgccaccacacccagctaattttttgtatttttagtaaagacggggtttcaccatgttggtcaggctggtctcaaactcctgacctcgtgatccacccgcctcggcctcccaaagcgctgggattacaggcgtgagccaccacacccggccgtggaatggttttcttagcatatcctcctggggccgtggcgccccggctgtgggccgtggtggatgtcccttgtttcagtggtcctacaaaggtagatggtgggcggacaccgaagtcaacttgactgtaaaagtaccccataccgttgacgcgctgtggcagacctgtgggtgcggtctcccctctccaaatgccacctcttcctgctccctcctcttttggctcctactcagtagttccattgtgggctgcagtaatataaggacctgttctggacacagcactgggcccgctggggttttagtagggcagccccttccctgcaggagtgaggcatggtgacagcagtcccctatgtgcccccaagtcatctgagcattggtgtgcattaaggtactcaatcttccaacaataaataccataagtgcatgtctgttttattttatttatttatctttttgagacagagtcttgctctgtcgcccgggctggaatgcaatggcacaatctcagctcaccgcaacctccactcgcaggttcaagtgatcctcatgtctcagcctccctagtagctgggatgacaagcacacgccaacatgcctggctcatttttgtatttttagtagagacggggtttcaccatgtcggccaggctggtctccaactactggcctcgagtgatctgcccaccttggcctcccaaagtgctgggattgcaggtgtgagccagtgcacccggccgtatgtcttagagtgaggggaaactgaggcacaaagcgtttatgtagtttgcccaaggttacacatggtaagcagaaaaactgggatttgagggcaggcagcccggccccagagttcccttagccccctgaactgtgctaccttccaggtctacctgtttgcaggtagggagacccacaaactatcataactgcacaccgtgaagcaaacacctttgttgcagtaacccgtggcacacttcacttcccacattctccaggaggaagccgtattctggtagtttaaggaaggtgattcatggatgccccaaggaaaggctagacatcgatgaattagctcttggattgtctaagatcaacctgaaggtcctacctaaaccaaactcatatgatcccgatgaaagaggagaatacacagtgggagcagagctctttgtgtaagtttgttctattctgtttatttggaaactgcctctctccctagttctgaaagagacttgctgtgtgatagagaacaggccatttgtgcctgaaatgttctaacctgcaaattgggtttaatggtaattatcctgcctttctgtctgggaggaaacagagatgctacatagatgaaagctctgattatcatttaaaacaaataaatgtactaaatgccgtggtataatatagggaagaatggatgacttcaaagagaccatggttccgttggaggcataaaattgcctgcaaagaggcaaatgtaatttccagaccaattaatgacttgctgccctcgtaaatggatttaggacatctttgttccttgcttcttttgttaaaactcattcttagtttcattatcagctcactaataataccagtgttgttaagatgctcaaactagagcagaattgtatgctggatgtgacgctaggacctcagatcctttgatagtgcagttatgaccaggatctctttattctgtgcttcacgtcaacatcattaacccgatgaagcgaagcacaagtcataaaggcacatcagagaagccgagaaagcggggccgtacagagagcatcaaaatcaggtcagaaaaatgctgctttcctcttccaccaaaccttctccctgttgtttttacatgccccgtccctccagattcagcctccgttttgttctctctccttttccttttcctcctctcttccttaccttcccctgtgagatgcttttctgtccttttactgcacctcttccagacctatggcatttggggacgggtcacccttcctagagtgatcctgaatccagctgcctcttctttttttgtttttgtttttgtttttgagacagagtctctttctgtcgtccaggctggagtgcagtagcgcaatcttggctcactgcaacctctgcctcctgggttcaagcgattcttgtgcctcaacctcacgaggagctgggattgcaggcgcccgccaccacacccggctaatttttgtatttttagtagagacggagtttcaccatgttggccacgctggtcttgaagcccagacctcaagtgatccgcccgccttggcctcccaaagtgctgggattacaggcatgagccaccgcgcctggcctagttccctcttcttagatggagatttctgcacatgagctgtgagatccacagacatgtcactgagctcccccactctgtcagtggaagatgaatggaataaagcctgcttgcattgtggagtgcagctgtggggacagttgtcatttttgtgttttcagcttaactgtccagcatctcccctcccttcctacagcagggacatcatgccttagatataaacttagtggtgtgcagtacccaccgtggaagctgaagaagggaagtatttcctgtctctcaggcacaccccgcttccagccccataccagtcgggaagtggtcattgacctggggtggactacctggacccttgcttggggctatgagcctggagaatgtgacacaaatgaagggatgctgagactcatttcaaggaagccaccgtggtccggggttggtagtcatacagcaaggcaggtgggtagggctggcaggctgcagggatggtgtgtccactggtagcaatgtccagggatggcagcgtcctgggaatgtcatttctgctccactccttggactcgctgagctgtctccgcctccacctatcttcctacagacctcccttctagttttctgtcaattctttgagccagcaaactccatccagtacattctttcttctttcatgaaagagcttgagttggatgtaaatatatatgacctaacaattccacccctaggtgtataccctacagaaatgtgtacatgtgttcatccagagacatgctctaaatcttcacaaaaacactctccataataacccygaacaggaaagcaccccaatgcccatgttggctggataagcacattagggtatattcacacgatggaatcccagactgcaatgggaatgagctgcaactccacccccaacttggagtgtattcaccaaccctagtgttgaacgagataaggcaaaaatgcaccataggattccatttatataaagtttaaaacccagcaaaattcatccatgcggttgcaagtagagatcagtcctaagaagacagtaaccagaagcgggcatgaggtggtgcttctggggtgttctgtttcttgatctggttgccggttacctgggtgctttccgtttgtgaacattcttggagctgtacacttttgatctgggcacttttctgtgtgtatgttatacttcaataaaaagttgggctttgtgactagcaatcaagaatcctacttttttggcactttgctcaaatttttactcctctttrgrtatcattaacattacattaatgataactaacatcgctagtggggcattttaagagcatgcttgacatcattttaaaatacaaactacgatcctcggctatctggatggagaataagccatcagcaccacacaggtagggccctgtgaacaagatgcrcaaatgctgtggaaattgtgtcttttgggaagacagtgaggaatcccactgcgagttcccacttgatggcagagatgttgtcctctcaggctctcctgccttctgaccatcaggaatggatggaggagatagcctgctgcaaaaccctatcatcagacaccaccgttggggagggagccgcagcacaggccccagggggctctyctatgacacctctgaatgcaagctcagatgcccaggtcgcccagcccgtaggtattaatacactggggccggaatactgatggccatgccttgctccttccactctgctcacatccctgggggctctggccctgcttctgaacctcggattgtttctgagcatctcccagggcgtctcccttgttctcagctaccaagcagcctctgccatctccctgtggcagctctgacatgttgagttccagggcaatcacagagcagcttcacgctgggaccccacgaccatgagtcaaaakggcttgcctctgatcctgagctccagcccccatggaagtcaactactaatctgtgaattgtcagcagcccccctgctgctgggagccaggggagggagcaaaccaaagggcagaaggaagtttgttctggtgactcttcagatttgagatgacaataataagagtaataacaagcaacattgatctgatgtcagaggcatgtgaaccaaaaactccatcttgaataggggctgggtaaaatgargctgaaacctactgggctgcattcccaggcggttaaggcattctaagtcacaggatgagataggaggtcagcacaaaatacaggttgtaaagaccttgctgataaaacagtttgcagtaaagaagctggctaaatcctagcaaagccaagacggccgcaagagtgacctctctggttgtcctcagtgctacactgccgtcagcaccgtgacagtttacaaatgccatggcaacatcaggaagttaccctatatggtctaaaaaggggaagcatgaataatccaccccttgtttagcatatactcaagaaataaccataaaaatgggcaaccagcagccctcggggctgctctgtctatggagtagccattctcttattcctttactttcttaataaagcaagtttatttcactttgcactgyggactggccctgaattctctcttgcatgagatccaagaaccctctcttggggtctggattgggacctctgttcttaacactgagaagaacrtggatgatagcaatccattagacagaattattcacacttacatctcctcagctcttcggggggtaagacgccagatcatgggcgggttttttttgttttttgttttttgtttcttgagatgggatctcgccctgttgtgcaggccagagtgcagtgacgccatcacagctcactgcagcctcgagctcctgggctcaagcaatcctccagcctcagcctcctgagtagctgggactacaggtgcatgccaccatgccaggctaacttttttttatttttttgtagagacagggtctcactatgttgcctgggttagtctcgaactcctgggctcaagcaatcctcccacctctgcctcccaagcactgggattacaggtgggagccaccgtgcactgccatgggctgttttcatgaaagatcagaggatgccctctactccccagcttccagccacatctcctgggtggcgcactgctccgccgtccccaggatgtaggcccagagcagcagaggtggaggatgagctgggcgtctgcccagttttaatgcttttgttgatgtgtggacaaaacagggacacactagtaccatcctgcattccatctggtttctaggaaaaccctcacaacttgcttcagtttcagctatacataatttactaacttgtaaatgttcaaacccacatacaatcattaaccgcatgctggtattgtagccacttacttcaaagattcactagtgacccagggtggcctccaaggccctgcctgccctgactcctacttactctccagcgtcactttcacacctcactccccctgaaaaccctgtactccatccacgctggtcatgattcaaacccacctactagccatgcyccctgctgccacaaggcctttgcacctgcagcttcctctgcctggcacactcttccctcctctctttgccagatggacttatttggtagatcttgactcargcatcactgaagactcaagccttctctgacctctctgacgaggtcaaatctatctctaggttcttattcactgcgaggctctcctttgagacccktgtcatggttgcagttgtacryttgtgtaagtgatgactcaaggaagatctgtctcccccacaatgccataaaccctctgagagccggggttctaggtgtgaaaggaaaagaaatctccccgaaatcactaagccagagggaagggtcaagctgggaactgccttgggcaaacctgcctcccactctattcctaagtaagatagctacatacccaccccaccctccaccaccaccacccccgcaagccccgcactccctcacaatttgcccatgaggaaattccttgcagacaaaggacaggcagaagtcaaagtcatccctctgctcatgtgagacaaatgcacatctgatttgcttgctctgccctattgtttcackaagccagactaaggcataagtgactaktcctgtaaatcagcagtcccaaacctttttggcaccaggggctggttttgtggaagacattttttccacagatgtggggtgggcgggatggtttcagaggaaactgytccaccttggatcatcaggcattagttagattctcataaggagcaatctagatctctcccatgcaccgttcacaatagggttcaccctcctatgagaatctcatgccaccacaggtctagcaggaggtggagctcaggcggtaatactcactggctgctcacctcctgcttcctaacaggccacagacccatactggtccgcggcctgggggtaagggaccactgctgtaaactgtttattcaatgaaaggctaatcagaaactcaaaagcatgcaacagtttgtctcttatctacctaggacctggaaggcccctccccactttgagttgtcttgcctttctggactgaaccaatgtacatctgacatataytgattgatgtctcatgtctccctaaaatatataaaatcaagctgtgccccgaccaccttgggcatatgttgtcaggagctcctgaggctgtgtcatgggtgtgttcttaaccctagcacaaaaaactttctaaactgattgacacctatcttggataccatttggtttatatggttttactcattcccagtacctaacatatcatctggcacatgatggcaatcagaaggtattatctgaataaatgcatgaaagttactactagtcctttcttgacattaagtgcttctccttaggggtgtgaatgaacccttagaagactgaaatagtaaccaaggaaaggggggygggggaaccaatatttgttgagtgcgaacatcatgtgccaggtcttaagcaaaagagttaacttcttttttttttttttttttttttggagacagagtcttgctctgtcaggctggagtgcagtggcacaatctcggctcattgcaacctccaccccccggtttcaagcgattctcctgcctcagcctctcaagtagctgggattacaggcacacaccaccatgtctggctaatttttgtatttttagtagagatggggtttcaccatgttggccaggccggtctcaaactcctgacctcaggtgatctgcctgtctcggcctcccaaagtgctaggattacaggtgtgagcaactgtgcccagccaggagtttttaaatctttacaaattgcattgtgatattctttatcctcatttggtagatgtaggttcctcatataaatatgaggaagctgagtttaggctgrgtgcagtgtctcacacctgtaatctcagcgctttgagaggccgaggagggcagattgctggagctcagaagttcaagaccagcctggtcaacagagcaagaccccatctctacaagaaatttaaaaattagccaggcatggtaatgcatgtctgtaattacagctactcaggaggctgaggcaggaggatcacatgggatcaggaggtcaaggctgcagtgagctgagatcgtgccactgcactccagcctgggcagcagaaagagatgctgtctcaaagagagagaaacagagaaaagaaaagaaactgaattcaaattaagtaacttgccagatgttagacaactactaagtgactgaatttgaatttgaatcagtccacttgacaacaccactaccctgcctgctgtcagactgaggcatttaagaaccaaaaggctcggccagcacrgtggctyacgcctgtaatcccagcactttggraggcagaggcaggckgatcacctgaggtcgggaattcgagaccagcctggccaacatggagaaaccctgtccctactaaaaatacaaaattacctgggcgtggtggcacatgcctgtaatcccagctactcaggaggctgaggcacaagaatcgcttgaacccggaaggcggaggctgcggtgagccgagatcgygccattgcactccagcctgggcaacaagagtgaaactccaaaaagtctcaaaaaaaaaaaaaaaaaaaaaagagccaaaaggctctcatctcctccatacctcatttaaagaaaaaatgcagggccaggcacagtggctcaygcctgtattcccagcactttgggaggccaaggcaggcagatcacttgaggtcaggagttcgagaccagcctggccaatatggtgaaaccccatctctaagaaaaatacaaaaattagccagcatggtggtgcctgcttgtaatcccagctacttgggaggctgaggcaggagaatggcttgaaccyggaaggcggaggttgcagtgagctgagattgtgctcactgcacaatctctttactctctccgatggaaactacggctcaacgttctttacagccacaggctttcacggacttcacgctatcattggatcaacatttctcactatctgccttctccgccaattaaaattccactttacatccagccaccactttggctttgaagctgccgtctgatttgacacttcgtagatgtagtatgactattcttacacgtctctgtctactgatgaggatcctactcttttagtataaacaataccattgatttccaatcagtttcaataatatccaagagagtaatcaacctgacactagccctagtaaccaacaccttactggccctattactaataacaattgcattgctcccacagcgtaatacttatatagaaaaatccagcccctgtgaatgcagatttgacccaatagcctccgcctgcctcctcttttccataaaattcttcctagtagccatcacattcctccttttcgactcagagatcactctactactacccctgccatgagcccttcaaataaccaacctgacactaataatcagcgcagcccttatacaattaccactttaatcctaggcttgacatgaatgagcccaaaaaggattagaccgggatgaattggtaaatagtttaagccaaaataaatgatttttactcattagattatgatagaccatgtttaccaaatgcccttattagcacacaccatatcactgctagggatattagtctatcgatcccacctagtatcatccctgttatgcctagaaggcataatactatcaatagttatcataaatactcttacagctttaagcatacatttcactctagcacccataatccccatcatcctcctagtatttgctccctgcgaagctgcagtgggctttgccttactagtttcaatctccaacacatatggcctggattacgtacaaaatctaaatttacttcaatgctaaaaattattattccaacaattatactgttaccaatgacatgattctctaaaaattctataatctgaatcaacatgattattcacagcctactcatcagcctcgccagcctactattttttaaccaattcagcgataacccatccaacctctcattaattttctcttctgacccgctgacgtcaccgcttctaatcttaatagcctgtctactgcctcttacagtttttgctagaagccaatatcacctgtccaatgaatcacccccatgaaaaaagctctatatttctatattgatttccctactgacttttttaatcagagcattcacagccacagaactaattatattttatatcccctttgaagccacactagttcctaccctaattatcatcacccactgaggcaaccaaccagaacgcctcaatgcaagctcatacttctattttacacactagtaggatcccttcctctacttgtaacacttgtttatactcaaaatacctcaggttcactaaacatgctagtaataatacttactacccaagagccattagcctcctgatccaacaatcctacatgactagcatgtatcatagcttttatagtaaaaatacctctatacaggtttcacctatgactccgcaaagcccacgtagaagcccctattgcggctcgatagtacctggagcaggactcctaaagctaggtggctacagtataatacaacttactcttctcctcaatcccctaacagaacatatagcataccctttcctcatactgtccctatgagggagagttatgacaagctctatttgtctatgacaaactgatctaaaatcatgtattgcctactcctctgtaagccacatagcacttgttatcatggctatcctcattcagaccccttgaagcttaacaggtgcagtcacccttataattgctcatggactcacttcagccttactattctgcctagcaaattcaaactacgagcaggcccataggtgaaccctattacttaccgaacgccttcaaacactgcttctgctaatagcctcttgatgacttctagcaaatcttactaaccttgccttaccccacaccattaatctagtagaactctttgtgaccgtggcctcattcttctgatctaatatcactattatgcttataggacttaatatactaattacagccctttactccctaaatatgctaatcacaacacaacgagggacacttgcatattatattaacagtactaaaccttcctttacacgagagaacacattaatacttatacatcttgcgtctatcttcctattatctttaaaccctaaacttattatggggtttgcatgctgtagctacagtttaaccaaaacattagattgcagatctaatcatagaagcctgcaacttcttacctactgagaaagtatgcaagaactgctaactcgtgcccccatgcctaacaacatggctttctcaacttttaaaggattagagtcatccgttggtcttaggagccaaaagcattggtgcaactccaaataaagcaacaaacatgtattcttccactgctataacatccctaatccccttaatcttaccgattaccattaccttagccaacccccgcaaaagtttcacacccaaattacgtaaaaacatctatcgcatgtgccttcgttattagcctcattcctacaacaatgttgatatgcacagaccaagaagtcattatctcaaactgacactgaatgaccgtccaaactctcaaactctcactaagcttcaagctagactaattctccacaatatttatcccagtaacactcactgttcattacctgatctattatagaattctcaatatgatatataaactcagaccctaacattaatcaattgttcaaatacttattttcctcatcacaatattaattctggttaccgccaacaacctctttcagctcttcattggatgagaaggcgtaggaatcatgtctttcttactaatcggctgatggtacggccgagcagatgctaatacagcagccaagcagttctgtacaaccgcatcggcaatattggctttatttcagctatagcatgattcctcctgtcctccaacacatgagaatatcagcaaaaaataaattctagaccctacccccaactccctcccattaattagccttctcttagcagcagcaggaaagtcagctcaattcggcctccatccctgactcccatctgccatagaaggcccagccccagtctcagccctactccactccagcactatagttgtagcaggagtgttcctgctcatctgcttctaccctttaatagaaaataacctatcaatccaaacctttacattatgtctgggggctattactaccttattcacagccacctgtgctgtaacacaaaatgatatcaaaaatatcatagcattctccacctcaagccagttaggccttataatagtcacaattggcattaatcagctgcatctagcattccttcacatctgcacccatgcctttttcaaaactatattatttatatgttcagcgtccctcatccataacctcagtgaagaacaagacatccgaaaaataggagggctattcaagactctacccctcacttcctcctcccattttatcagcagcctcacaacttacaggtatgccttcctcacaggcttttactccaaagacctcattattgaacctgcaaacacatcatacaccaatgcctgagccctttctattacgcttattgccacctccttgacagctgtctacagtacccatattattttcttcgctctaatagggcaaccttacttcatgactctggttattattaacgaaaataaccccttcctaattaaacacctaacaatcagcagcatcttcgccggattcctcctcaccaacagtattattcctgcrtcatccccccaaacaaccataccactccacctgaagctcacagccctaggtgtgaccaccttaggcttcttactagcaatggagtttaatctcataactaataaccttaaactaaaatacccactacagacattcaacttctccaaaatactaggattctattcagtcacaattcaccatacaacccccaactcaaacctatccacaagccaaaatctggcttcactactactagacctaatttgactagaaaagtctataccaaagaccatttcacaaacccaaatttcagcctccattactgtgtctactcaaaaaggcctaattaaactctactttctctctttttttatcccatcccttttaaccctactcctaattatctaatctattaccccgagtaatttcaatcgcaacgtaaatagtaacaaataatgatcaaccagcaactaccactattcaacacccataactatacaaggcagccgcacccacaggatcctcatgcaacaacccctccccctccccctcaaaaatcatccaactctctatgctgttaaaatcaatcatgatccccaccccatcatgctcaactattcaccaaaccgacagcaacccctttaatactcataatagtaaagcccctcagatgtcaatatttgaccctcatgtttcaggatattcctcagcagccattgccatggtatagccaaaaacaaccatcatgccacccaagtgaaccaaaaagactgtcaaccccacaaaagccacaccaaaaatcaacacaataccacaacctacagcaccactaataattagctctaggcccccataaataggagaaggtttcaaggagaaacctacaaaccctataaccaaaaggacacttaataaagatataaaatatgccattgttcccacatggactataactatgactaatgacatgaaaaatcattgttgaacttcaactagaagaacactaatggtcaatatccgcaaaacacactcgctaataaaaattattagttactcactaattactcatagtgtgcactccagcctgggcaacagagtgagactctgtctcaagaaaagaaaaaaaaaaaagcagctactaattaaccatgaaagcacactttttttttttttgagatagggtcttgctctgtctcccaggctggagtgtgcacactattgacttcatagtattgttatactttcttgccatttaaaaatcaaaaagcacctgcattctataaatgcaccttcacacagtgtagctgtgtactggtttcattgtggtaattaaggccggggagggccactgctgctaagaagtgaaagaacagcttgaagaggaaagaaacattgtcccatgaaacacgaaggtaacatggtccgtttagttcacacataaggcctgttattaggagtagggagtatctgaagtgtttccgtgagaaaagagacctattattaccatggccaggtgtgcgcacaagtatgcattctctggctgttctttccaaatcatttggtaaaattctcattatttagtacattttatctcatcttttctttttcagttatattagacttcattcaatttgattttacatataaaccaatccctggggcaaaataaaggaattcattggtttggacaaatccagtgctatgcagctgatgccactcttctttatttatttctttttgctttgttttgtgtttttgagatggggtctcgctgtgtcacccaggcttcaatgcagtggcacgatcgtggctcactgcagcctgtacctcctggtctcaggcaatcctcccacctcagtttcctgaatagctgggactacaggcacacgccaccatgcctaagttttctattttttatagagacgaggtcccgcgatgttgcccaggctggtctcaaactcctgggctcaagcgatcctcccgccttggcctcccaaagtgctaagattacagacatgaaccactgtgcctggcctttgatgctacttttctaatacctttctcctgatcaaataattagttgtttcatcttagcccttactggtgtgtaacatttggaagtgcagatccacattggcacagcttcctttagttaaaaattacggccgggagcagtggctcacacctgtagtcccagcactttgggaggccgaggcgggcagatcacc

SEQ ID NO: 94352 - DNA, 30481 bp, Homo sapiens
ccgcaggtttcattctgcccctctccaggtcagggttcctaatgcactccccccaaagctccccatcaccctgccctctccaaatcctcgtcactgtcacaagcttggtcttccaggcaccgtgtatggccgtggtccctgtagtcgcccatacaatcactcccttcttagtaacaggaatcttaatttgattcagcttcagaaatactttttccagcctcttttgctgacaggggtgcctgtgtgatccagttctacccagggaattgtgacccagcgctctgtgagcttccaagagaggaggaggcagctgccatccaccctttaccttcttccttcctccttcttcctaaaacgtgtgctggctggagctcccgcagccaaggaatgagacctgacctcgtgctaagaagagtgagactgagacctgagaaggagcctgggccctgacggtggaggaatccccacaccagcctgcaccatcgacctctcatttccgtccggcgctgggatccaggcttcctgctctgcaactgaatccattctgacacactgtcttacagttctggtataaagggtcagacttcaagttagccaagggaggcagtgggggaaagtaacagccttggcactacccggccccctttctatcaactgcccccgctctgcccgctccagacacatgtggagggggattaagtgtcgagggagccaaggtgaacagcaggaaaaggaaagcagtggagacagagatttccaccaggctttactcacaatgcagccatacggattaatcccacagccaccacagaaggttgtgttacccccgcctcacaggaagaggctctggcaggaagaacagctggacccgagtcagacacgcaggtcacgggcccagagcagggccggcccaggcccaccgcactctatgacatcggccaccaggctggtctccaggaaatagggccctggtgtctacttcctaaactccctgtgaattgccaggggccagaatgtgggtaggtgggagaacagatggaggctgaaggacctctggtggcaaaacactgacctctacagaggtctcatcagaaagcctgaaatcccacgttagatatttcagaaagagggcaagcttctgttctatacatttgtatgttatttaaagttacacagccagacaaatatgtacataacactatgggttttggtggtaaatgttttatctatgcatattatgtatagatgtgaggaagacgtctggaaggatacaccacccacgcgtaaacacacgttaagggagcgtgtgcagtatgttgtatctaaaatgaacatgtaatacgaaaagccagtagctggtatttgtaaaggggtgctctgtatctaaccctctaaatgccccccacctcccaccctcttggcctgctctgagggcttcgtctccgtttccctggcccctcagccttggcaggcttctcatgcagggcccagtgaaggctcaggagggccttggccagactccatcagacatttgtctccactgggggcgacttgatccacaaatgagatcccaccagtgacccaggtaagaggattgcaaaggccaagaggcttgaggagggaaggctgcccggaaggcagtctgtcctggagacagagtgagcaggaacccacagtgagagcaggagtggcaggaggtggtcacagctggaggcagaagcaggaatgcagcagcagcagcagccaggcgcaaggcagctctgtaaacctgcaaactcgaggctggctgaactctacagcattgactaacacggggcttttccatctggcatttccacttgctttggtatccacaggcgcttccgggcccgggggcagccgccacgcacacacgcatgccacctgagcaagccttgatgggtgaataccaggagacccctgaaggtgctccttgcttcaggagcctgagaacccagtctttcgtcttgtaagggggtcctctggcaccgcaggccccaaactctactcctcccgccatctctcctggacctccccgagccacgcagccccctcttcctctccaccctcacaggagaccgccggtgcctggcctgagaatccaagtgcagctggggaatggcctggaagaggccgtaaaggctggaatggaacagtccagcctcacacagtggctaacagcacagagttcattccaatccggctctccctcaaccatctgtgtgaccttgggcaacttcacctctgtgtgcctgcttcctcactggtaaaacaggagcaaaacagtacccaccgcctaggcttgctctgaggatcaagtaagttggtacttatcctggagcactaagtaagttggtacttatcctggagcactaagtaagttggtacttatcctggagcactaagtaagttggtacttatcctggagcactaagtaagttggtacttatcctggagcactaagtaagttggtacttatcctggagcactaagtaagttggtacttatcctggagcactaagttggtacttatcctggagcactaagtaagttggtacttatcctggagcactcagaacaatgcacttggctagctgcatgacatgctatgcgcatggagcgtggcggccaaactcctcctggctccaccggaaagggcacaatgcagctatcgccgggccgattccacgtctgaaatcacggataatgaccacctccccttatttaacaaaaaatatggctaaataatccatctaagcaacaggggaaggcaaaacccgctccacacaaatctcaaaggttaaaataaaaccaatgtctgacactggtttctgagcccagatgggaggttggagctgctcccaaggccacggccctcgacacagctccccagacaactctgccaccatctggtgtcgagctccaaagtagtttctgccaagaaagttgcctagcccagggtttttggtttgttttgttttgagacgcagtttcgctcttaccgcccaggctggagtgcagtggtgcgatctcaggtcactgcaaccaccccgtcccgggttcaagcaattctcctgcctcagcctcccaagtagctggaattacaggcatgtgccaccacacccagctaatttttgtatttttagtagagatggggtttcaccatgttagccaggctggtctcaaactcctgaagtgatccacccgcctcagcctcccaaagtactgggattacaggcgtgagccaccgcgcctggactagcccagggttttcaaacccactcatgaaatcaagttcgtgagtcacaaaaagcgttttgtttttccgagacagagtcttgctctgtcgcccaggctggagtgcagtggtatgatcttggattactgcaacctctgcctcccgggttcaagtgattctccagcctcagcttcctgagtagctgggattacaggtgtgtgccaccatgcccagcaagtttttgtatttttagtagagtatttttaggtttcaccatgttggccaggatggtcccgaactcctgacttcgtgatccgtccgcctcagcctcccaaagtgctgggattacatgtgtaagccactgcgcccggccgcgttttgttcttttaaatgaattagtggagaacagaaactctcagaatgttgcacgtgatatgcagaggtaacagtctgtctgtgttctgggtattagcaaaacaggcactctcactggggttgcgtttgggagtccaagcgccactgtgaggccaaccctggtatcagctgtgtaccctgaggctccccggcacgtcataaagggcactcaataagcactgcctgggccagcagagggcaccgggcacaaagcaccactcagggaccaccctgatcagaggacctggttcttccccagaccaggcctgcccagccagcaggaggcagaagcaggagacactcaccagctttcctgctgcggcctcctggctctacaggacgatcagcaggagcacagtccggggctcctctccaccttgtggcctggacttcctttcccacctggcccccatcccctgggctgtccctggctcttccctcccactcatctgctttctttcctcaactttgcttcctcccacccgtctagccctctccttaactcttcattctcccttttcctttctttccctgcctgccacctccttttccaggacacacacacataaatatttttcagacaattcagcctttattttagaaaataattctgtagcttccactttctttcatgaaactgaggtcaggcaagaaacaaaaatccaccaagtcctctccatcctgccatggcgtcctggcctgtgaggacatggggcgcctgggagcgggcggggaggctgggcagcactgggccagaggcgtcctggtcactgctccacctggtcactgctccacctcatgctgagaggagcctgtgtgtcaaaccccaggggaaaaagggacaggcagatcgaattctgtcttctaccaagccagcaggagcctcctagagcaacagggagggcactgattttcagaaaggaggggtcagggcatagtccctctctgaggtaaggcaagagagaggttgtcccagcacaaggccttcctccctgcacctctctcctgacagctgggcatgggctgaggagaggtcttgcttgcccccttcaactttccatctcagaactataaactgctaggctgcaaggagagaagggctaagtgggggtcagacaggagagaagggcaggaggcagtgagccccgatgacccaccaactccaccaggccctgacaaggaagcccctttggttagtatcattttggccacaaatatgtccccttctcccataactcagtccccactgggggaaggggagcaggtatagaaggagggctcgtgccctggctggaagagccaggtcagggagaaggggtctggtcaagagagcgaacgttgccaaactctctgcacatgctccaggagaaagctcaggacgtggacatttctggccccaacaagcccagtgccccccaccacacagtggtttcctgcttaataccccgcaacataccctagaatagttcccctgatctgactcccttgagaacgggagaataatcctcttgttatcatttgtgcacttaaatgccactcggaaaaatcaaaaagataaatgcacctaagagggaaacacaggcaggccgatgcagcctggggactgtggtcccacctcagctcatgatgtggcaaggaggggcccaggaaggacaggcaggtgctaattccagctaggatcatagccctcccacgtcagtgggggcgccaggtggacacggcggccccggaactggaaggtgacaataccccggtagccagctctcggaacccccgacttaaggtcatccatgacacccagagccttggcgaaagccttgaagctgtccctgcccgtatactgcacccgcacctcccccagctccttccggtcattggtcctcactttctccacctgcagctggggagcaccgtagacgcgggcgaggaaatctcggtcataggcctcccgctgcaggtaagacaggtccagctgggtgaagtgcacaaactgctggttcagcttgataaacttgaggtgctggtcaaagaactgcccgtggctcacacccttgcggccaaaggtcatcgttcttgagatctcagggcgtatgcaggcccgcccctgccgctgctccggccgccgcatccagtcgtcccagaaggcctttggccacttgggctccagctcagcccagagctcggccaacagcagccagcccaggccagggaaaaagtcggtgcggtagagcagctcaggcctgctggcgtccaccatctgctccttgccgttgtcattccaggccgagacgcaccacagggaggggtcggccttcagcagcggataggtggccygaaagtactcgaagaagtccggggccacctccaggtcatcctccaccaccacggccgcggggaagcgaaactgccggaagacctggcccagcgcccagcggtagtggcgcgcgatcttgtagtagccctggaacttgcggtggtccggcggcaccgcaatgctgctcaggtcgggctgccggatgtgcgtgaccgcgctgccgtaggaggcgatggcctgggccgtctcctcgtgcccgcagtcctggctaacgatgatggggaagagctcagccgagggccgataatgcagcagcttgtccaggcagcgccgaacagtgctgcggtcacaggcgatgaccaggatgggaatcaccgccggcgcgggggtcacaggcacacgcggctgggcgggaggggccgcggtgggcaccctcccccgctggctcgacagggcatccccgatctgctgcagcagcycacgctgccgctccagctccacctcggcgtcttgggccaggcgaatcacttcccgggtgaggctggcggggtcgycatygagagcgctgactgagggtggcctgccaggtgctgggcgcgtccagaagaagaggagcagcagggcattccaggccacaaagaggatagcgccccacagcacaagccctgcagactgcttcttcagcatcctggcccccacyggggagggcaggccagggsacggttcaaggctgccctgggcttgcccggctcccttgcccgcagtcctagggatgcctcctctggactatgggattaggaggcagccatgcacctaaagacaggagagagaaagcaaaccgtcacacaaaggctygtggctccatgccccacaggtagaggaaatgggggcaggaaaaggccaagagtgagggtggaggaaggccaggaggttgactccagagctctctagggagtcaacatatatcctgacccagsaacgtatttttgagggagaggcagagagtgatgctggtggagggagagagaaaaagaaccccaactcccctctttctacctgtcagatttcatttcccctccaggtgggaaggaggaggggaggggcaaggagtgacagcatctgcctaccattcctctaacctaagcgccccaagatgactgatttttaaaatcaaatgtcccacctcagggctacagttaaccccttaccaacagggaagcaccagaggcaccccacgaatgtcaggagcaaaacgaagttgcccatcatctccagggttatttaacattttgctggaggaagcagccaatgcaaatgaaccaagaaaaaaaaattcaaagcagaagtggaaaggaagcaaactatttctattatctttacttgtgagaatatgcctggaaaactcaaaaagaatcaataatgaactgagcaaggaagtgtaatataaaaatcaacatatactaatggatagccttcatatccacaaataactcatgagaagaaaacatggatgagaaaaccctacttacaaaagccagagaaatgagaaaatatttagaaataaacttaaataaacttaaacattcaaaacttatgtgaacaaaactatcattcctgaaagacacaaaagaacatctgaatatcccttgttcttggtcaggacatttcagcatcatcaaaaatcccaataaaaatacctttttatggagctagacgaactgacagtaaagttcacatgaaaaactaggaaaacaataaaaataagctgtgaggagggactcagccctaccagatatgaaaatactgcatactggccagatgcagtagctcctacctgcaatcccagcactytgggaggccaatacaggaggatcacttgagcccaggagttcaagaatagcctgggmagcacasggagaycctgtctctacaagtaayaattaaaaaaaaaaaaaaaaaaagctgggcatggtggcacgcacctgtggtcccagctactcaggaggctgagatgggatcacctgagtctgggaggctgaggctgtagtgagctgtgattggattgtgccaytgcactccagcctgggcaagagagtgagactctgtctcaaaaaawtttttttttattatatatatatatatatggcatactacaaaacctccataattacaactgcgtggtactggtacataaataaacagaccatccagtgaaatagaatttaagctccagaaacagactcattacacaaaaaaatctaatatgtaataaaggtgctacttaaaattcccaaggcaaagatggtcttattaatagtgttataataattacgtagctatgctatagcttgaatatggtttgttctctgaaacacatgttgggatttgatcccctgtgtggtggtgctgccggaggtggggtctagtggtaggtgtttggatcacaaggggggcaggggcagatccytcctaacgtcctctggtgagtgagctagttccccagggataacaggctgttataaccaagcccagtctctcctgcatgccccatttctttctactttcagccatgtccctacaaaaacctacacagsagtgttgatggtaactttattcataatcactcaaaactggaaataacccaaaggcccatcaacagggaaatacagataaacaaattgtggtttactcatagaatggaataatattcagcaataaaactgaataaaccactgacatacacaacacaatctccaaataattacacaatatgggtctttttgggaaaaacaaaaaagagcacatacactgtgattccattgacataaaactgccgaaaatagaaastaatctatattacagaaagcagatcagttgttgcctggggatggaggcagagaagggcagtagggtagttactacacaggggcattaggaagcttctagaagggtggatatgtttattatcttgattgtggtgatacttttacaggtatatatatatatatatatatacacacacacacatatatgtcaaaacttatcaaattgtacactttatatgcagttctttgcacatattgatatcaattgtatgtcaatgaaacctcaaaaaactttttttaaaaagacgttattgggtaaaatgacaaaggtggaatatggacagtaggttaaagtatcagtgataactgattaattccaattcttaggtaatacacactgaagtattgagaagtagaggaccaggatagatgcaacttctcaaatggttcagaacaaaaacatactctgcacacatagagagcaaatggagcaaaatattaacaggtgaatctgagtaaagagagtgtgtacgaatatccttatactattttttattcttgcaatttgtgtaagtttgaagctatttccacacgaagtttcttgacaatcaaatatgtagatattgcccatagctctgaagagcttcatccatcagcgtaatcccagctggcacatcagcaaggcaaattgagatgatctgtttgccctgaattcctcggtcagtcacctgacgacgtgtatcacacacctgctctctgccaggctctgggaaggaaccaggacacaaaccagtgagaaaaaggcatggtcccaccaatcctccaagctctaccagaccacattacttgaaaggatctgaaacactccccaattcccagccagctgccactccagaccataactccttgactgtcctgcctctggtctaccctttacaccccaaagcttcaggcgtgcaccctcttacaccaacagctctgccagttgccctctgcctcacaggctactctctaatcctggccaaaaccttgggcctcagatctaacctctgaggctctgggctctcaaaccagcagatctggtataaaagggctgatcctgaagggcctctaaagagacatggattctgtctccctcctggggagacttcaccagcccctgccagcattcaccaccaaccacttgtcttcttcctagaaaccaaccacccccaccacgccaggacatcagtcttctcagaaacgtcaagtctgtttccatgtaactgtgcaattaaattctattatatcagggctcaaatattatgtatcaattagatacatgttgtcaagtgaccgagaaattcagggcaaacgtcgtttcagttggccttactgctgtgcccagctggggccatacagatggatgaagctactcagagctgtgggccatatccccatatttgatttttaagaaagtttatgtggaagaaaagagtgatgcacaaaagagtttcagttttttttctttttttttgagacagagtctcactctgtctgttgcccaggctggagtacagtggcatgatctcagctcactgcaacctctgcctcccaggctcaagcgactctcttgcctcagcctcccgagtatctgggattacaggtgcctgccaccacgcccagctaatttttgtatttttaatagagacgggctttcaccatgttggccaggctggtgttgaactcctgacctcaagtgatccaccctcctcagcctcccaaagtgctgggattacaggtgtgagccactgggcccagaagagtttcagtttcttcttcgctctcccctcaggatgttgtccatgttggaactttccctccaatctaatggccaggattccctgtctcccaacttcccacctcctaaatgactgtgcaagaaaaagactttatataacaggatggggatggagaagagggactgaactctattcagtgaagtgctgctctgcatggcttagaagggtggggccccactgggcttggtggctcaagcctgtaatcccagcgctttgggatgccaaggcaggcggatcacctgaggtcaggagcctggccaacatggcgaaaccccatctctactaaaataaaaattcaaaaattagccgggtgtggtggtgcgtgcctgtaatcccagctactcagaaggctgagacaggagaatcccttgaacctgggaggcggaggttgcagtgagctgagatggcaccactgccttccagcccggatgatgaagcaagactccatcccccaccaaaaaaaaaaaaaaaaaaaaaaagggggggggggcccagagggatagcccgtccctgactcatcaatgacctgcaggcccttatggcaaagcctcctgggacccttgagataacttctgcaccctttagatgcctttttactcttctccagacatcagaatttggtggcccacacccactacctgatgcttaggacctcctgccccacccttctaagccatgcagagcaaaccagtcttctgactgagtttttacttggcaagtctgcacacacatggagtggctgcagagcccacaggaaaagctgccccggccaagccctggcctccaccttaatcaatccctgggcccttgttctccaccccacagccctgtgcttcaaacttgctcctgttgccataagaggacatgacacccctagttccagcccacctccttaggctcagcctgggccccagtgctattttcctactgtttatccacgtagttcctgggataggatcctcagctctgcctggaagttagtgctgtgtgcacacacatgaaccaggagccatacaccctctcacaactggctgtgcccaaaaggatgatcaagcccagaccytggccagcagcggtgacctgcttctccaggaagcactgctcaggccaccatcaggagagtgcagcagcaacaaaggcaagccagacagcccagaggcatcaccctacgttttgccacatttctgagactcaaactgggttgctgtgaagatcggatgagatgagccatgttaggtgtttagaacagtgccggcatgacaacgtaaatatcggccgttatttcactcctttctccccattttctttgctccactctaccacactcccgtctggtaccccaacagccaagcctaccrtcggggtctttgcatgtgcccatgtgccagctctgctcttccctatcttcttcacctggcacactctgattcgtgtctctgccaagatgccttccttgacgcctgggaccatgtaaggtccacctacccttcaccaacagcaacaagcgcaaccacttgctcaacttctctcaggccccctcagctgcaagctacatgaagacagggattggctccaccagcactgccaagccgctgtgctagggctctcaacattcagcagatgtgcctgggatctaaaaacatccacagttcctcaactgtaactgccaaatccaagaagcactaaaacacagaagttttctaaactcaattggcagtaaaacctcatccagcctcatttggtaaaatctgatctgatctaatatggggctatttatagtcttttctctctcctgctgtggctattcatacattttgctacagaaataaacatggtggcttatgccatgctgcttctgatcttccactacagagtaaattcaccagatcatcttttcaaaatccaaaaaattctcaattctgaaatacatctaggaccaagaacttcaaaactatgaaaatggaagtacaaagttactcattgactgctagcatcccatgtcaagccctccagccctttaacctgaactcattccttcgtaggaaacactgttttaagtctggactcttgatgtagtttcccagctggtccacctgtcactaatcttgcttccctctcacaaaccttcccaacagcaacagcgcatccttcctgacaagtacacctggtcacgacattaacttgctttaaaaaccatcagaggctgcactgcccacaaactcaaactcaaactcattatgatgacatccaaagcccttcagacagactgtctgaaacatycyttttcaaccttacctccaaccactaaccccatggaccctgcactctggcctcagcaggctgctttttccccagtaagcatatacctggacgctgctgtgtctctgctccagctggtccctcatcctggaatttgacccacagcgccacctgccagccacccacacatcctttcaggccacttcaggtgactccttctgtaacatcacagacagagccaggcctccctatgactacactcccacagcactctctccacgctgtaacagaatctgtggccacgctkacctgactcccaccttcctccttaggaaaaaagactctatgacctctgtgcccaycacagtgcttggcacatgtatgaggttcaagtggctggatggaagactgcttgcactattaccgaaatcagggagaaagatggccaacgcagcagcaagagmgtgaagtgtgacattttccagagatgaccgcacatatcccattccatatgctcttcttacaagtgataaagacactcctgcctccagagctgagggtctatgttccctccctttggttctgggaagagatgctatgtgacttgtgagactaactcataaaaggcagtagtttccacctggtcctcttaagatgctgactcctaggaccctgctatatggacaggacactgctacatggacaggacccccataggtattccaactgaccaccccagctaaggtcccagctgacagccagcatcaaccgctagacacaggagacagccctccagattatcccagccccagctgactgcaatggcgtgaaagaccacaagcaagaaccacatagctgagatgttaataaaatgattctgttgttgtaagccactaagttctggggtgactcattatgcagccatcagtacctgaagcaatgagagaaacagactctagataatcttgacaagcagggcaagtgccctccctgccctctgtgctcagctccaagtccaaacactgaggccctgtctccactcatgtctccttccttagtaggtatctactcctgcataataaattacctcgatatttagtggcttaaaacaatagttatcacttactcctcacagtttctattggtcagaaatgtggacagtgcagcacagaggagatgacgtgtctctgctccactatgcctgaggccttgctgaaagactcaaaagctgagggccagatgcccctagaggctctcacattctctcacatgtctgtaggatgatgttggcagcagctgagaccttatcagcaggagtgctcactagaacccctctatgtggcctggaaatgtcctggaagtggtggctgcattccaaaggtgagtgttccaagaaagcgggcaagccaggtgaaagtgtatcctgttcctgattcagccttggatcaggtctgtcttactcactggtcaagggaaccacaagtccctattgacatgcaaggggagagaatcataaaccccaccactaggtgggaagtggacaatgtcaaactataactacatgtggaaggggatacttacgggtgaggcccttgagggaaaatacaatctgctacaccttcctttttaaatagaacaactgcccttaatcctgacctgagttcctaatgatgtcatttatgagactggcatgcaaggcacagactcaaaactggctttgactttctagagttttcacaactcctttagggaggtgacacagccaatccacaccaccaggtacaaagacatctgcaccatggtgggagatgagaagtgagtcttttcagtacaaaacccttcagctaaaaccgaggtggctctgggtaggcgccacctgcccctatggggctcactcagtttctgaagcatttgaaggactgcctaggagctgtgagatcctttctaacactctgataccatggtgttctccagcctatttcctttatctggcaaaaaatgtttcttaaatagcaagtgaacaccagatagtcaacttccaatcatgagcaataagcgagaagttatatttagctgtaaaattaagtacagaagtggaagaaatggtaacagattttcccttctatctctgctttgcttaaagttaaaaagcactacgtaaaaattccagaaaatatagacatgtcacaggtaatggaactctaactgaactgctttcatgttcgttcttagaccttggctggactcctgtatcatgtaccaggcccataatttcaggacggaaaaaaaagaaaggtagtcagagaagatacactaaataattcaagagttgagagaataagacctaggagggaagggatgcaggttattcatcctggaaaagaagagctaaatacaagtgccacaaaaggcatgaggcctgggattcaggcgatccagccagcaagccaggcaactttggacaagtcacttgacccacttgtaccttagttctctcatctataaggtgacagggttgatttggttcatcacaaggtcccactgcctggatactgacgacagtgacaatttccctactgccccgaacagtaatgagtttcccttgttaacacaggccactgaggtcaggcataccgcagtgcttctaacagtgagaatgagacacagaagcagggaaatgggtgagctcaatggtccccagaattgggaaggaccaggacgcagtgattgctgatggaaggcagatcctggatgatgtgagcacgtaagagcaaaggctacacggcctgaaaaaataccgtaaatgactgaaaataaagctgggcaacatctcagccagtgatgttctaaaacaaaacggcagacccactacagcagcaagggttaaccaaagtgaagcttcagccttcagggagccggccagccacagtccctctacttcagagtttatcagacgcgggcactgcacgtcccggggctctctactccacacacgttagcaaacaggaagaaaagttttcttgccaacttattatatatatatttcaacactgaatcaacatttcctttctgctgaggagaatcagcctctattaacttggggaaaggatgctggagtgaggttaggggggaaaggccactccccaatcccaccccctccctgccccgcacgcacggacgcccggggccgagtttcacaacatcctccccagtccgcggagcccgcccttcctctaacagctggaggcccgggattccgaaagcagaaggcggagttccaacctctcggctcgggaagggactaacgcgcagctggcaccgggtcggaccgggccgctccccagccaagccccctctcgctagcactcatgggcaccggggctttggggcgacccgacgtcccttgggctccctctcggcgcccgcgaggcctcccccggtctgacctccgtccccggacacctactcaccaggtcctcccgacgtcctggccccgaacttggcctgctccggggcgcagggagcgagcccggtgcccaggcgcgtcccaagcgctgycgcggccgcctcgcctttcgactcgccagccctttctgcggcgcgccggggccggacggccgggcgggcaacgtggcccttccccggcaggcggggcggggcggggcggactgaggggcgtgaccgacagccccgccgcgccccgccccccggccggcgtccgccaggccccctcctcctggcccgcctcctttccccgccgcttctcagtcaacccaggacccaagttttcccaggaccccaacttcgggagtcggctttccggctccctggcgcaaccctgagggtggacgcccgaccccacccctgccctcggccctccagcgcagctgcccakcctggagccgcgcctgaagtgggcccgcagtccaggaaaggcgttcaccaaaccctaggccaagggctgggagccagtccccccaccccaacccaggggaggctgaggagcccgggtgggagccccagggtcgcgtggggcagggacagaacaggaaccagggtgcccgacggggggccggggggaaacacctgtgccaaagcaagccggggccagctgtggcttcttcccttttgtttttccttggtgggtggggaatgagagcktcagttctgagtaaagaaagcgaagagagacctaccagcaggggaggcccaccagccctaggcgggaaggactcggtcacaagctttggcggaagcaccatggaaaagcctagaaygggtctgcgcccggctggtgttttaaaggggaggaaggtgcggacctgaagaggaggtggaggtggacccaggcccaccraggggagggagggacagctcttccatagcaaatacctgtcgctgagccaggagtaaagtctggccgggaggaggasagacgcagaagaccagggrctccagcgcacagagccagtttcgccagcgatcaggtctgaggcctggattccacgaggccggtgcaagccaggagccagccccactccctcgcccagctccctccggcctggccctctgcagaagcctgatgcccacccagctgtctcaccatgggaccccaggcggtgagggtgggtagccgaggactacagkctgctgggtagctgacttccccaagaagggctgctgccatgtgatcaggacccacgcccctgacatcaacccctcccccgtgttccagagcacggagcagcycggaactctgcggcctgtggttactgactgactgctcactaacttgtttctacatgaaaccacgaatcgtgcagggttctagagaaacaaagggccgcgcgcacccgcaggcccctgcgtggaggcgaggacctaaatcaaaactgctaaggggtcaccaggcatggtgaggggcctcacgggccaaaccctccctcggcctgtccttcaagcctcagcagctctgcggagtgagcgttatcatccccattctacagataactagtttgaggctcagggtaagtgcmaacgtgctgsaagccaccagacctggtggggagcatagccaggttttagaccgggcactcctgtgcgccccccaacacccccgcacacatcctccagcgccagtgctttgagagggctctgtctcctctcaggcgctgccgtgaagcctccgcttaagtggccagagcccagacctggaggyggagtgggagaagggcaggcccacygaggccgccgtgtgcagtgtgcgatgtgcgggaagcccgtggcttccactttagctgactgcgcgcacygyggcaggagcctcgaacccaggcggatatgccagtcagaggccagtgtctgtcacctctgccctatgtttgcctaatggaggagtcaggggcctgggggctctgcacactcacactaggtgtcaaggcgtaaaggaaaaaacaattgtgtttcctaaaagtgaaaaggctgggaaacactggtttgtagatccaagacatgaggagccaaaatcaccttccaggagaaaggacagacatcagggggtgctgaaaggtgggggaagatcagattcccaccactgaccctgatacttctccatctaaggcaggtgaaggggaaacaggatggcggctgttcgtgcactgtaacgcacaccccatctctaccacccttggctgaaatcccaaggctcacaggaagatccaaaaggagaaattcccggactgcaagagaccatcccaaaaagaaagggcctggttagggaatcagaatgggcttcatggaggcaaaagcaagcacttggtctgagaggcaagaaaccagggtaaatgagtgccaaactgacctggggaaaagaggctctgagctcttgatagaggttacatggggagcagtgactggrgtaagaaggatagaaacaaggggccaggattctgggggtgggcctgggattggattatgtgcaaaaggaaaaaacaggaggataaacagtcacaagattagaccagattatccaggaggataaacagtcacaagattaggcagaggaacaatactctcccctgcccactccaccactgacaaaagagaactgaaaagatgaaaaggaagtgaaaactgttccaggaaactgccctcccataaaccatgcccaagatccctgacactttttacaatttggaaagaattcatgcccttaaattaaaacatatgttggcttgaaaacatcagtaaaagtaaaagcaggctgggcgcagtggctcacgcctgtaatcccagcactttaggagaccaacgcaggcggatcacgaggtcaggagtttgagaccagcctggccaacatagtgaaacatcgtctctactaaaaatacaaaaattagccaagtgtggtggcatgcacctgtagtcccagctactcgggaggctgaggcaggagaattgcttgaacctgggaagcggaggttgcagtgagcagagaccatgccactgcactccagcctgggtgacagagtgagattccatctcaaaaaaaaaaagtaaaagcaaattttttaaatcagtgttttgtttcccttctccctgcctcctaatatctctgcttgcccctctccctcaccccacaatggagacccagaaattcatctcatccaggtcaaagaggaaagattaacataataatcactaaacaatgtctgtgaaatgtaacttttggttagccacctacaattctttttggaataaagaaggatataaataattaattgagttaaaatacacacacggccgggcaccgtggctcatgcctataatcccagcactttgggaagctaaggcagacagatcacaaggtcaggagattgagaccatcctggccaacatggtgaaacctcatctctactaaaatacaaaaaattagccgggcgtggtggcgtgtgcctgtagtcccagctacttgggaggctgaggcaggggaatagcttgaacccaggaggtggaggtttcagtgagccgagatcgcaccactgcactccagcctggcgacagagcaagactctgtctcaaaaaaaaaatgcacacacagtctggttaagtctatcactgctcctggctaagtagcctgacacctgctgagtgctatgccttggcatcctggtgcccatgtgaaaaagccaatggttgtcttgaagggactgtctcatggaagggtcaggtgcagggcaggagggtgggaaggtcagggagaggaatgcttgctcactctaaggaggaaacgttctaccagagaggctgtctggcagggcacagagcttctctccctggaggtttgcagcagaacccagatggcctggtcaggtcagatgctgtggaaacagcacagcactgggaggtgatttcagtgcctaccgctctacccttaggcaaacccttcccactcagggcttccgtagcttcccctcaaactgggaaaagaatccctgctctgttctcctcacaacaaagtggtgagggaaaacagacaaaacagattgactggatcacgtgatagaagcattacgcaaatacgcaactccctggtacctgggataccagagatggctgaggaggcaccgtggcatcacgtatccccgagggatcactgtgacccctgtgtctaagcaaagactggcaacagaaatttgctgggtgaagctggggaaggtggtacacccatcttgagacccacaccttataaaggagcagcctggcctcaaaggggctgccccaggcaccagaccagaggagaaagtacagctcgggagcagcagctccacccaggccactgcccacctctcaagccgctggagggagtgaggaaaactcctgtggcaaaaaaggaaagactggggaaggggatggaagaaaaaaatttaacatggaaagtaaggcataagtacaggattttcagtttgcagatgacctcactgtcacccatcctcaaggaacatgtgaggcctaggtgttactgagctagggagaggcagagacatgccagaagccaggcctcctgccctttgcccaggccaccataccctactgtctctcaaaattcccaacactgtgctctacccctcctttctgctgtgtgttgtccctgggaaaagcaggcatcttggcacaggtaaattggaattgaaggagggagcagacaggaagtgagaagataaagacaaacagggctgcttttatagggaatacagcctgagaaaatacaaagggcgaagagatgtctggaaaaaaacgtcatcttaaggagcgggagagataactagcatatggcacaggaaggtaaagaccaccactcactccaagaaaagtgcctagccagacacctgccctcaaggcttaagcatccttccaccccctctttaatcagctacctcaaaggggcacactgaaattggactggagagccataagggccaatgcagtatctgcaagactccttcaatccaagttctccttggatctattcacctgttctacaacttgatgatcccaagtactgtttaccaacaagatgatgaaacacattcaggggcaggcttttcactaaggacatcttcttaggctgttgccagcacactatttcaagaagaaaacagaactcctgactcagagttgtttctgtgcttttaaggcacgtagagcaacatcgatgttattgtttcctgtgtacacggccctggatacttttcaaaatccttgtttcatttgctcctcgtaacaacttgtaagggacctggaaagtcagttttcccccattttgtaggtgaagagaacatggcctgtgtagggttgtacactgactcaaaaagtcaaagctagaacacaagtactccttcctgacccccaaacctgtgttctgttcctctgctcttttcccgagctttcatgggctaagctccccttatagaagtaggaagggagacaacttaggaggttatctagaccattcccgccttctccccccaccagcagtccttttcagttagctccccaaaacagagcagctgcctctgcctaggtaatccattccagtcttaacccagactgacttggaatcctattatctcagtgttggaagggcctttaaaggtaatctaatccaacctcccttcagaagtcttcaattattatcatgttctccttggcctaacctcacaactgccattgctcacaatcccttacaaggcactcatccagcttgggtaaggggaagttgggaacaagtctataccyggacagagtaatggagaggtgtagcttccagtgtactcatctggataagatttcctgaatagtagcctccgygaactcgccagctcaacaccttctgcacaggcacagcaagacattaagtgggaaatgagacaggagccttacctttcttctcttgtctcagttgctctccaggagatcatcaaatccccattcagcactccattttcaaaactgagaatcccaaatcagatccaccaaagtgcagcttctctcttcttatccaggtccaaagtccatggctgagctgaccctgacggggaggagtctgggggggaaggggtgtgtccaggcccctccccccccactgcagacttcagtgcccctctcaggggtccgttacctcccttcattcagctgccttattaagctcagagtctggtgatggacagatcccagatactatcccatctcttgctcaggcaggggaagttatccactgtgagaactggcccatctgtcttgtgctggggctcatgagaagaaacaggccttagaagcggcatggcccaggaggcagatttctgtgttaacctgcagaacatttaaacattataacgctctctaatctagatacccaaatagagtcctaaaaccttctagtttccactccccacctaagagtccatactaggctctatcatcaaaacaccttcgttaaacactccgcaaggttatacaaagcacctacttaactcacgtatcacacgccagaacacagtcacctcatcaatagtgtttacatatataaacacatataatataaacatattatatgtatgtacaaacatacatgattcaggataaaagatggatcgtacccgttctcaccacagaaaagtaaccggagactcttctaagaaatcgagaaaagaacgccctttctcctgccctcctgtctaaagcgcaacataataatcgaatctcccaagcttcttagggtgctgagtgttttaatccaccagccctcttcaactagttaataaatcctttccagaccgagatgctggcatcttccacttgcattctttgctcctttaactaagctccccctctgcttgcaaaactgtgccagagatgtaattcccaacctctgttaaagtccttcccggggctactcccgagaacactctcctggaatgtttaaggcccaagtcctgcttgcagcagccccacagtgttcccatttctcagcccgaaaacccacccctgttgccccctcccctccaagtttattcgtaaacacacacacatccattctctctctcaacacacatccatccacacacactctctctctcctttccttcctgtaggggcgtggcgtccacatgacctccaccccctccaagaatttaactcctcccacccttctccccggaaccccgtgccccgtgttcacaagagaagagggtgacactgcgacccttcctggactyygacccccacccgtccgccctgcggacgaccctcgctctaactgcgccgggtcgttacctggttcccgcccgccccgtctcggctaggagccgcggcccgccscgggtcgcaatccaggccccaggcccgatccccagcgcyggcccaggccccaccccctcgacccccagcggcccggccctcccctcgcactccttcccccctcccaccatccaccgcagccacttccgcccgtcctccggaagtgggccccggcaacgcrgcsttccacatcccgcccatttttctacccmacgtccccagcccgtcaccaccgccaccacgggagcgagggaggtgggtctgcagggcctgagactgttctacagccactgttcacagggctgaagaacaggtgtgggcagaaccaggttgtgagaaggamgccgggcgcagartagcggccgtacaggagggggaggggcagaagagactggccagcagcggaagcgcgcggcaggtggagccgcgcgggaagaagcacgcatgcgtcgcgggggggttggcccttggggtgctgggcggagcttgggaggggcgaggacgctgaagtaggggcggaacctgtgcggtgcagccytgccctctccctccgcccaaaggtcgcccagcgacggcctgcttgacctggyttctcaaaragggtgaccccccccctccgccccacgctggtcgcgggtcctggcgagaagcctttcggaaagcaccggggcctgtgtgttcccgcttcctcggacgcgagctctgtgtagccgtggtggaggaaggttttgtttcgttcatcgctgctgtttctcgctgcctctcttgacgaggcagggcccttgcagggtgcgcccgcgctgccctctgacaggtgctgttggtacctgcggccgggcccgccgtcgccggcgcgtgaacggcctgcccgaggctgccgggaggagggctgcctggccggcgcggcccttcccgtcgtgccccgggctcctcggaagcagcctcccgctccttcagacgtcggactcctgagtttcgaacctgccccgcggtttccccctcacgctgaatccaggggagccgctactcgtttttgaagttcctatgcagccctctcccgacatgttcgagaatcttgccggactggggatggatttgcagcctccgtgtttgcccccacggttcgaaaaccggaatctaggcccggtctcctggcctgtgttctgtcgtgggatttctccagagcacggactgacttaacatttccattactgggaatgtaatggttgctgcgtcaggactctggagatgatttttttatttggaacgatataatttttggaatttccttaaagggaaaaatacatattgcttaattatattgcttgggatatattattgcaaggaagaagaaaataagaccctttcttcccccaccttcaaaccttctccgcccacctgtctttcccatgggcattaatggcggctccatttactcaggccagaaccagaagagccagcttcactctctcaccccctctacacaatctgactagaaatcctgttgaccctaccttcaatctgtgtctaggatgcaacacctcaacatgtccacaccccccttcatccctcacctgaacacctaggtctccctgccctccctaccctcccagtcgctgggtttccgtacagcagccacagggatcctgtcgtttctgtgctccaaactgcacagcggctcctcagtttacttgaaataaaacgccaaagtccttacaatggctgcagagccggacaacccactggcctgcctagctgtctgacctgctctccccttcctctgttagctgcattggcctctgcaccggctgttgtctatttgtaaaacaccccttccaggcatttccaggactgaacccttcagctctttcaaatctttcctcccatgtcacctcagtgaggcctttcctgaccaacctgtttaaacctgcccctgacccagagcactgctagtctcccttggcctgctccacttttcccaggacgctcaccacttcctgaaatactcgccgggtttaccatgtattgtctgtctcccactactagaatttaagttccctgagtggaggcacatttgatttttgattgctatatcccggtggctgcaacagttggctggcccatggtagcagctcagcacacatttgtggaataaatgaaccaatgaatgaacttgaaaagctactttcaccgcagagtattccccttcgggcttctctcacatggaaatatatgaacataggtataagcacagtatacagattttgcattatgatttctaatcataccatagagactttacatatttctaagtattttcataattataaccatttttacttaagtgaccttcgatttttcgtgcttgttataacaagtcatacagagttgtgtaaataaaaatttgtctcctgtccccctctcatcccaccctgctgaaaggaaccacttttaaactagtggatatctttccaaatattttttatacacacgcacacacacacaggcacacacacacacacatacataacaggtacaaatttcacagtccaaagacagatattcctgaattgtaactttattttctataattcgagtcaatttgtattttaggtctttcctcccatagtagaaaaatgaaatctagtttatttaaggtaaatgttagtatgtaatgatgtttatttattaatgagcaattacaatttaatttcagttgcttcagaatttactaatgcccttctctccttttcaccatataattgccggttttaaaaaattattaaaaaatatgcaataattacaggaaaatataaatgataaaataaaaaagcaaaaaccacctgtaaaaccagcagctagaaataagtttatgaaaaatatacttctatggcatttttaatgaccaagtggcatactattatacaaatgtaccataattatctcccctatttttgtacatttgggttgttttcaacttttcacttttgcaaaattacttgtagctaaatctgtgtgcacgtcattttttttttttttaggataaagtctgggaactcgtgtcgaaaggtgtgctcattgttgaaggcgtttgtttgatatgaaagatacacagaaagatggcacagctttgacaccaacttttctccacaccctgcactgtcacaccattttttgtcatctttgttaatatgatagaacgatggttttgcattgttgttttaagttttattccactaattgctagtaatgttgaacctgtttttatgcatcacttttgcagattgcctacagcatatcttttgcccacttggattcatctttgtcttattcatttgcaagaactctttatagaatatcagccctttgttacctatgttacagcaattttcccagtttgtcatttgctttttaagtctgtttatgtgctcttttgacattgcagtagtcaccgctagctgggccaaaagtctggtcttgctgtacatactgccttcagaataaacacttaggagtaagctagagatttttgttatcagttactccacctagaggaccagcaggtggagtctccatgggcagagtctcgcggactgtcatttggtgtggggtggccaagagggactgaacatctggagaacatggttgtcgggctctttataccagtggacccctctttcctatggaagcctcgcatctccatcagaagcagcagtaaaatggcctctgctgtcttctgcctttcaagtctaactcaagggcacctgagtaggtgaacctaattgcaagggagttagatatgtaacctattcaactagaaagaaggtagccagaggggctacctacagtccccaccaaacttatgtatcagggcttcccatcctggctgttgaattacctattctggcagctgttccagtcaatacagctgatagtaaattttaataactggcagtaaaagtcttccccagtaaccctgattttcaatgttttgttggccattttcacacattttttcaggtgtatattttttcacactatttgttcagatgatcattgtaattcatttcagaaactagatatctcttgtaatttcctgggcttctccttaccctggcgagtattctttgtaccgattttagtctgaagtctggtaggtacaaaagttagtttgtgtatttgctatttgttaggtgcccttcatcctggtatttaaaattctggcccataaagaaacaaccacactcacttgttccctcaatcttattgtgcctcttggcagcttctgacattgtcaaccgctcccttcttctgacacacttctcttgactcccacgccagcacgctctctggggttccccctcctctggctgctcctcctcagcatcctagcaggcttctcccttttctctctttacccaccacttgctgtacaaatgcggagttccctagggctctttcctgggcccttgtgtcttctcattttacactttctttcgagatgatcccacagaagtcacatggcttccagtatccactccatgtcaaagatacttagtctgtttctattgcttatgacagaatatctgaaactggggtcgggtgcagtggctcacgcttgtaatctcagcactttgggaggctgaggcgggtgggtcatgaggtcaggagttgaagaccaacctgaccaagatggtgaaaccccatccctactaaaaatataaaaattagccaggcgtggtggcaggtgcctgtaatcccagctaccccagaggctgaggcaggagaatcgcttgaacccgggggggcggtggttgcagtgagctgagatcgcgccactgcactccagcctaggcgacagagtgagactctgtctcaaaaaaaaaaaaaaattaaaaattaaaaacaaggaatatctgaaactgggtaatttataaggaaagggaatttatttcttacagctctggaggctgagaagtccaaagttgaggggctgcatttggtgagagccctcttgatggtaggaactctctgcagagtcctgaggggttcagggcatgacatggcagggggactgagcgtgctaaggtgctagcgcaggtctctcttcctctcttataaagccgccagttctcccatgatgaatccattcattagtgggaatagagccttcatgatccaatcacctcttaaaggccccacctctccatgctgccactctggggattaagtttcaacataagttttggagggaacacccaaatatgcatgctcaagtcccttctctgtgctccaggcccacatgtccaattccctgcttgccctcccaactcagtcccctcacagatacctctgactcacgtgtccaaagtgaaatttgcagtgctcctcccagctcctctctcagcagtcccgttctcaggaaatggcaggccagaagtcttccacaacattcccacatccagtcagtcaaaagcctccgaaagcttgtctcccggttatttcgtggctcttttcctccaccctctcctttgacctggccaataccctcctgaaactccttcctcttttacgtctcttttcatgtgtgattcattagatccactaagttccacccctagaaggagagggtggactttcctgcaacactgaagacaaatttccctcttcccctttttcatgttccctgtgactttttaaattaaaaaaaaaaattcttttttgttttggccctgagttgcactgtaaatacaggactgaagatgacgtgacaaacccagacatcgccatgcctaaggcgtagagctgaagactttttatgtgtcataaggaattctagcaaaacccagaatattcagcaggaacatggaatggagttggggtggaagatacagaaatttcagttccattcaatcatggggtaacagttacctaagtcccctaaaaaatcacagcactttctcgcctcattttacaatgaaggatgtctggtcttgccttatttattccttgtatggttattttaattacgtttattttggagccgggtgcggtggctcatgcctgtaatcccagcactttgggaggccgaggcagacggatcacctgaggtcagaagtttgagaccagcctggccaatatggtaaaaccccatctctactaacaatacaaaaatcagccgggcgtggtggcgcatacctgtaatcccagctagtagggaggctgaggcaggagaatcgcttgaacctgggaggcggaggttgcagtgagtcgagtacgtgccactgcactccagcctgggtgacacagcaagacaccatctcaaaaataaataaaaaaaaaatttttgaacatttctccacaattagatatgagcttcttaaggacaaacattctgtttaccttaaaataatcatatatttctatattagtgcaattcaatgaatatttatgggtgggctcagatcctggctcctctcatttccgtggactccagggatccagtttcctcttcataaagcgaggataatgaaatctgtccttcacccctggcaaggcactcatgaggatcaggtgaaaccatgtgtgtgggaacccttttaaaaccgcaaagagctgcataaacatctgagggctttaggttcgcagatacaatcggaaggcgcctggcgctgctgggcattgagcttccagggggcacttggtggagagccctgca

SEQ ID NO: 94353 - DNA, 41260 bp, Homo sapiens
cctataatcccagcattttgggaggatgcagtgggagaatgccttgaacccaggagttcacgaccagcctgggcaacacagggagacccccctctctacaaaaaatagggagttgaacaatgagaacacrtggacacagggaggggaacatcacacaccagggccagtcgcagggtggagggcagggagagggagagcattaggacaaatacctaatgcatgaggggcttaaaacctagatgayrggttgrtaggtgcagcaaaccaccatggcacatgtatatatacctrtgtaacaaacctgcacattccgcacatgtatcccagaacttaaagtaaaataaataaatagataaataaataaataagaaaaaaagaaaaggagtgaaatgtatgaaataccactaatgcctcacataagtcctcctcaccgtcccttcctcctcactctattccaggaagtagccaccatccaggaattgtgtgcaccattcctttgcatagttgtacatatttgttaaatgtagatgtagccataaactacatacgaagttgtcttgtatgatttcaatttgaatcacgtggacggcatcgtcttataccgggattgtctcttcaaaggaggtaagaccgtcttttccatttttgtaattgtagtaaaatacacaaaacataaaatttaccaccttaatcatttttgtgtaactatcaccatcatccatccacaaaacttctcatcttgcaaaactgaaactccatacgaacttcacatccttccttccttcagcacctggcacccaccattctactttctgtctctatggttgtgactactctgggtacctcgcagaagtagaatcatagagtgcttgtctttttgtggctggcttatttcactcagcataatgtcctcaaggttcatccatgctgtagtgtgtgtgtcagaatctccttctttttaaggctaaataatatctcagacacatcagacacatatttttttttgagacggattcttgctctgtcacccaggctggagagcagtggcgcgatctcagctcactgcaacctccacctcccgggttcaaatgattctcctgcctcagccccccgagtagctggaactgcaggcgcgtgccaccacatctggctaattttttgtatttttagtagagacggggtttcaccattttagccaggatggtctcgatctcctgacctcgtgatctgcccacctcagcctcccaaagtgccaggattacaagcgtgagccacygctcctggccctcagacatgtttttaagaagtcaggctagtccaacaacccaccatctcatgtcatcctcacttcctcctctacaagccccctgccacctatacacaaacaccctcaaagatggagagcgcccactcttccaaaaggaggtaaggagtagaagcagcttcatgcagcaaagcaagtgctggtcctgatggaaagaagacaccgctaacaggacctgcatttcacctggggaacatgcagggtggagacaagggatgatactgacccaacgatttactgtttataaaagcatgtgtagggtcgggcacggtggctcatatctgtctgtaatctgagtgctttaagaggctgaggtaggaggatcccttgagcccaggagctccagaccagcctgggcaacaatgcaaaacattgtatctacaaaaaataaaaataaaaacaccaggggccaggcgctgtggcttatacctctaatcccagcactttgggaggccgaggcaaatggatcatttgaggtcaggagttcaagaccagcctgcccaacgtggtaaaactccatgtctactaaaaaataaaaaataataaaaaataaaaaacacaaaggttagccagtcatggtggcgcgtgtgtgcaatcccagctactcaggaggctgaggcaggagaatcacttgaacctgggaggaggaggttgcagtgagccaagatcgtgccattgcaccccagcctgggccacagagtgagatgccatctcataaaataaaataaaatcagcagccaggtgtggtggtatccctgtagtctcagctactctggaggctgaggtgggaggatcgcttaagtccatgaagtcgaggctgcagtgagctatgattgtaccactgcactctagcctaggcacagagtgagaccctgtctctgaaagaggaaaaaccatgtgcacacattaccttgtttagtccttgcatcctttacctacgagttccaggaatattactgcacctcgaaggcccccaggggatggtacagtgatgtcatttttctatattccgtgagagtagcctccaaaactcttgaccaatccttccccaaacctgtccagtgtcctcaggagtggagcttgactttcaataaggaaaggcaatgaggagaaccaacacagactaggaataaaagggccaggaagaaaggagaaacagaagctatcagccccagcaatgggccaggcctacgcaaggtgatgtacacatcacctgttacattctaattctacacagtggtgtgaggagtgtaataatatgagtgttcccacttccattcaatggccatcagattcagaaggtttaggtgcatgcctgaggccacacacaagtcagaagcagcactgagattcagaatcagggccatccaactccagactttcaaagcataaagtctagggaatttgggtgggtcataaagtctagggagtttgagtgggtcaggaaccacctttcagggttggctcatgacacagccacatttgtcagagtgggagaacaaatctttcccccctctcctccctaggtgaagctgtcacagggcaggggcctggggcattttatggggagaaggaaagctggaaggagtccattgagggtggatttttctctgatgcagagatgagcaggtgccgagccttcaagatctgcaatttgaagctaggagtggttctgcttgggaccaaggagattgaagaggccccagaggagaagatgggctgggactaactctgatctagagctcagctttcacatcccagggtttccaggatggcctccaactccaaatatgcattcatcctggtcagtcttagctctcaattcttgaattagaaaatactgtaatttggccgggcacagtggttcacacctgtaatcccagcactttgggagaccgaggtgggtggatcatgacgtcaagagttcaagaccagcctggccaagatggtgaaacccccgtctctactaaaaatacaaaaattagccgggcgtggtggggggagcctgtaatcccagctactcgggaggctgaggcaagagaatcgtttgaacccaggaggcggaggttgcagtgagccgagatcgcaccactgcactctagcctgggcaatgagagtgaaactccatctcaaaaaaaaaaaaaaaaaagaaaagaaaagtaaaaagaaagagagaaaggaagggaaggaagaaagcaaagaaaggaaagaaaagaagaaagaaaataccataatttcagagttaggcaaaacttcaggattctttcctacatagaatagtaaagcagacaggtgtttggagaaagaatctctttgtggacgacaaagtatgttttggttggaatattccttatctgccctgtggcaattaaattgaaaaaaaagaaaaatctgaagccccatgcccctgagtagatctgagttttcattagttcaactaaagctcccagggaactttgtccaaattcaaacataattccatgacaaagaacccaccatcctgtcctgcctcttctccatcatcagggacatgaggcaaaatcgaagttgtctagtgttattcaaccaagttctgaggaacttgtaggctaaaaacttggagcatcttttaggcttgtcgagaccatcatccaaatagccaggtaggcagatgctttcaaagcatcaagtcccgggggtttggatgagtcaggaaccatcttgcagggttggctcatgacagagccactgacagtaagtctgagggagagcagaaaccacacaatagtcttcacacagaggtgcccgtcaatgtcaccaatgactccacatcactaaagctgacaggcacttctcagaccctacgttacttgaccaatcagcagcattgaacacagataataatttatttaaaaaaaacttggccaggcacggtggctcatgcctataattccagcactttgggaggccgaggtggccggatcacaaggtcaggagattgagaccatcctggccaatatggtgaaacctcgtctctactaaaatacaaaaattagccgggcgtggtggtgggggcttgtagtcccaggtactcggcgcggctgaggcaggggaattgcttgaacccaggaggtggaggttgcggtgagccgagatcgtgccactgcacctcagcctagtgacagagcaagactgtctcaaaaaaaaaaaaaaaaagaaaaactttacacaagaggttgtttgagcaaagaaaatacacatacaggtaaaactgtatatacgcttttaaaagttaggaagtagctaccctcagggctggagagagacatgatgaggcatgttggcaatgttctgtttcttgatctgcatgctggtcacgtgaatatattcagtctatgaagattcatcaagctctacatttacgtgtgtgtttctaatatgtacattaagtgtcaataaaattctgggacttttttaatcttcctggttatttctaatttccaagaaagaaatacagtcttctttaccccccccacatacgcacacacacacacacacacacgtgcacacacacaggtgcgcacacacacacgcacgcacacacgcacacacacatgcacacacacacatgcgcgcacacacacacatgcacacacactgctcttagtcctactcctgattggctcaatgctgtttaccgcacaaattaggacctgattgtgattggccttctggtttgggatggctccagtacttgaactgggtttctgtctctccagttctaatcctactgagtttccttatgtaatgaaaatatttcacatttgggataaattcttagtatcctcaaccgctaaagataacagtagttaccttcctacggcccgggatctatgctaggcccacactgtgcagtatggtttgtcctcccattggtcctgcccattttacagacagggaagctaaggctcagagaggtgagaaacactctcaagagtgtgctctttctgatatttcctgtcacacctcccagtggctctttctgcaaaaggcttcattctgtttagcagttttctatgcttttcatctccaattagaaagcaaaggccagatggtcttctgccacatgcatccaaactacctggaagctacctgattacgagggttaccggaagtgagggcaaggatgtttgtgctgaaaatcccaggtttggatccctcgtgctcagtcccaaactgcagaggaaacctctaatactcaggcaagccaggagagctttggcaagagccctgaaatcagacccggccagcatgtgttcctgaatatcagaatagacactatatttaccctgacagccttttagtgcaactgaaagctataaataaccattagggcccaagcaagtggccttaacacatggattttcttccaaaaatgcagacccattttaattaagtttgtaattaaccactggggagggcaggccccctggattcggtctgctttcggagacactgtgagtaacttcctatttgttgaacatttggggattagcacgcccactgggtgttcagcttggaggcttgcacagagctgagctccctgcagccttgggcctccccctgccctgggagtcctgatcagcgtctctttgcaaagccaatccccttttactccgttgtcccccagaacaagatgggagtcatggccatgctgatgctccccctgctgctgctgggaatcagcggcctcctcttcatttaccaagaggtgtccaggctgtggtcaaagtcagctgtgcagaacaaagtggtggtgatcaccgatgccatctcaggactgggcaagggtaagctggctttgctcccacctgtgcccatttctgcccccagggactggcaggatggcagggtggcagggcggcagggcgctgtgtgggcaaacctgctcggtgggaggggatcgatcctgtgttctctcccagcttctatcattaaccagcaagtttcccatcttttggaggctgcagattcctgataaatgagggtggtggaatatctagggttgcaaactcacagcctaagggctaaaactggtctgcagatgtgatttgttttggcttcatggggtttccagaaattttgaaaattcaaagcctttagctggggcaatgtactggttgtgagcccagactcaggagctgggttcagttcctggctccagcaatgactagctggttacttcacttctctgccttaaacttctcatctgtaaggcgaggataacagcagtctctacctcatgctgccattgtgaggaataaacgagttcatagatggatagcacttagaacagtacctggagctacagtggatatcactcaagggttagtaatgatgatcatgaacacatataggcaaaacatgcccacgctagtgggccacacaccccacccatccctattgcatcacacttggcctgattctttcaatcattacactttctggcattgaaggcatttgcatttgcaactcctgaattatatcacctcagagaggcccttctgctggtgacatctatgacatgaggggccgtaattgtccttaagtttgcaagattctgactctatccttccagacaatggtagtacaactttatatgttacatagttagtgcaacttttgctgttgtttttattatttttaatagagcatagatcccacacagccaaacattcattagtaactcagtaagtgtccaytgagtccactatgtcctgagcattgccccgagagtccctctggggggctgggcacttactctcatagtgctgccatcgtgagaacgtttgtaacctccctgagaattttctcagagcctgctgcttagcctcttcggcatcccaatgggagccaatctgcacgctttgaggatggcttagttttcagtgggtgatcgacccaggtgcatcttgttaagataraaaacaaagcataaggcagatagactaggctctctaagtggcccctagatgagtctcacamacaattcccagagaggatatcctgtatcaaaagggagcgaggtacacaaactcaaactccttcttcaagggcaagccagggcacacacatctgtcaatcagaccagacaaaagacaacagggagtgtgccgccctggagagctggaaaagagatgcccacctaaagctattcagaacagaaggctttgcgaraaatttgctctcyaaatagcgcacctttgtctggcattgcaccrggctgctaayatgcgatccctgatacggcctctaccctggagcctgtcctgacaccttaattgctccttcctcttgaatggtccttgtggaccagcttcttaactggccccttgtaagtgcacaccacattagtgtatttctcatgctgtatctgtgtgtttctcagtgggtccactagatacaggcttcctggtgctggagcctgtgttttgttcacccaggcagcctcagcacctagctcaatgcttggttgacatcctcagaaaatgtgtatttaatgaataacctctaaaagtracatgtgatcagggaaggccctcatttggataagtgtgttcttgcaaatttgttttattgctttccagcttgattccaacatggttggagaatacgctctgtatgatttcgattcttttaaatgtgctgaggtttgtcttatgacctatctcgatatgggttctgcgagtgcttgacaagaatgtacgttctgccgttgtcctacaaatgtggattcgatcctgtttgttggggaggttgctcagttcttccgtagccttgctagttttgtgtcttattaggtagaaatacagttttactgatcgttgagagatgtgtgtttgttttaatcatctcattcatttttaaaacacctcattcagttgtagtcacacgtgatcaaatcaggcacccaggaaatacatctcatgagggaaacagcctttgcaggacctcatggcctagcttgtcgtgtctactgtcactgttctttttttactatatctcattgacccaccctggaaagaaatgcaaagaagaaaaaaataaagtcccggtacttagcagtaacttgagatgctggatgtgtgtgaccttaaataaatgcctagctctccacgctgctgacggcagtgattccaggctcccattgctgcatgtcttaagtccagggcactgagtggatgatgcaggctgtgcacagccgctgcacaccctggtgccacggaacctgcacgaaccccatgggtgccatcgggagcagcagggattgccacaccaagttgtttactagggaaatcaaacagacagacaaagactggggcatctagccctcgctctaaacctcctggatttggccaagcggggaatcctgtcaccttgtacccactgtgtctgcagcaagagtgacaatcaaggccaggcacggtggctcacgcctgtaatcccagcactttgggaggctgaggcgggtggatcacttgaggtcaggagttcgagaccagcctggccaacatggtaaaaccccgtctctactgaaaatacaaaaattagctgggsgtgggggctcttgcctataatcccagctacttgggaggctgaggcaggaggattgcttgaacccaaaaggcggaagttgcagtgagccgagatcatgccactgcactccagcctgggtggcagagtgagaatccatctcaaaaaattaattwatttatttattttaaaaaaagaatggctatcggaatagccaacccctgcasttgagctgcttcagaggatacagctgaaygycagccctgcctgtgtgttatcacctcaaaggtgcagtttctgtcctttaaacatttctgaaatcagactgattgtctttccatccatagcatcttacaatccccataggccaccctttaaaatgtcgctgtggctcacgcctgtaatcccaacacttttgggaggccgaggtaggtgaatcgcttgaactcaggagttcgagaccagcctgggcaacatagtaagacccccgcatatctacagaaaatgtaaaacttagccaggtgtggtggcatatgcctgcattcccagctactcaggaggctgaggtgggaggatcgtttgagcccgggaggcggaggttgcagggagctgaaatcacaccactgcactccagtctgggcgacagagtgagaccctgtccccaaaaaaattaaaattaaaattaaaagtcatttattatctctgaaatcaggcaacagctcatcatcgatggcatctgacattgatgaaatacagaaagaagggctcaatttatgcttattgaatgaaaaagaaaagcctggtaccaaagtgctcgatgcgagatacctgctgagctgataaaagaatagaaataaggacacctgggtataccaaaggcctggtttcagcagaaatgacttcttcaggagcagcacctctaggcttggctgcagtagcaccgaggcactgagcacgccactgggctccagcctcccaggcacacctgggcaaggcaaggtgttagtggcgaagggaaatggagtgatggggaagaatgctcctagctgtctgttctaacaaggccaaggccagaggtttgatctggctcctgctcacaggcccctcacctgctccagtgccctgctgcaaatagatgctctggccaggtgcagtggctcatgcctgtaatcccagcactttgggagaccgaagcagggggatgacctgaggtcaggagtacgagactaccctggccaacatggtgaaaccccgtctctactaaaaatacaaaaattagctgggcatgatggtggacgcctgtaatcccagctacttgggaggctgaggcgggagaatcacttgaacctgggaggcagagattgcagtgagctgagatcacgccactgcactccagcctgggcaacaagaatgaaactccatctcaaaaaaaaaaatagatgcycatcatcaagagagggagggagcgaggagtgaaaatgcaccctcaacgtgtcccttyctcagcagtgggcattggccaagaggagcctagtgtggagaatgcgttactccccatctggatgtcagactcctggggttcacatcctggcttccctgctggccaactgtgggactccgggtgattcatttcaacccactgaacctcacttctctcatttgtaatatccaaccatcattctgctccagaatgacagctgaaatgcagaaagactagactttctgctgcccacggaagtttctgttagtgaattctgttataaaagccatgtatatttaaaagaatttttttaagtaaaaagaacacaaaacacacgtagaaccccacgtgcttggggacatcctgtgtgaacacatccttcatttcctttcagggggatgcttatgtgagtaaccagtcatgagcgagcatgaatcaagggtgtcgtgagacagtacacctcaaatttattcagaggggagagtccttcctctgcagcttgagaaaaaaaaatcaggcggttcctgacttttctgattaattattattattattattattattattattattattatttgagacggagttttgctcttgttgcccaagctggagtgcagtggcacgatctcagctcactgcaacctcagcctcccgggttcaagcgattcccctgcctcagcctccggagtagctgggattacaggcacctgccaccatgcccggctaatatttttttgtatttttagtagaaacggggtttcaccatgttagccagggtggtctcaaactcctgacctcaggtaatccacccgcctcggcctcccaaagtgctgggattacaggcgtgagccaccgcacccggcctctgattactattagattatgcaaaatccttccgtcacggtgggtcccgaaacagagcattgattctggaattgggatgcccagtctaatacctgataacatgtccattttcattgaattcgaactttcttccccctctctgctcctccccacagctagtgcaagttggagggaagcttcctgctgtttctgaggcttctagggcctcagggactggaaggagacaagataggagagcgagaaaaactctcacccaactgacagtgctataagatggcttcaaggtccatgggcctggcacatgtctaaaactgggtctgaatctttctctcgtgggcactttcatgtgcctttcagaggcctccctaggattattcatttctgtgaaatgggagatgtgggttttttctccactcactcaatccctccttagcccctggttcccgggcagtctactccccaccaaccctgtcctttggagttccactgcccttctgagaggtcctcttgggcagtcttcagacgagctctcaaccaactcatgacctaccttggccattggtggctgtgacttctttggctctgcaggccacccccaatgaagaggtcccagttttccttttctctgccctcagggcattggctgagcccaggatcttgcccataagacatgaagctgggctcctggctgcggggaactgtgctgttctgttgattcctcctgtgcccttcactctgggatggaggcaaaggaaaacagccccagcctgggcccatgggcgaaaactcacctaacattctttccaggcgatcctccttcgaagtccccgctattcctcctcttctttgattcatttgtgtcctatttgtgggtaaagggaactgaacttcatatgacatgtttttaaaatttcctttgaaagtcagcatcttggactggcatctaacttaggaatttatatctttatatctatttgatctcagtgcctcagttaaacttctaatgtaacctatttttacatatagatatgtagatttactattctattacatacataaacacacaacccagcgttatggcatcgtattcaacacactgttttgaatcttttttaaaattatttttaaacttactctattgcgaacttcgttccatgtcaatagaccaatttctgcaacatcagttgttagggcttcaaaattgttattcacagtggccaagaatgtggccaagactatttccaattttgtttttgattatctgatagattaaaattagccccatgttttagtttgcatttatgtattactggtattgactcaccttctgtatcttgatacttcttttgtgagttgcttactcatctccttaaccaatttctttattagcaactttatcttttttctaattgatttgtaagagttcttcacatatcaaattaacccttttctgacatatagattataaacactttttctaaatttgtcttgtcctttacttatgggtgttttttgttttcgtttttgttttgctgtaagattttctgttttgttttgttttgtttttttgagatggagtctcactctgttccccaggctggagtgcagtggcgcaatctcagctcactgcaagctccgcctcctgggttcacgccattcacctgcctcagcctcacaagtagctgggactacaggcacccaccaccatgcctggctaattttttgtagttttagtagagacggggtttcaccgtgttagccaggatgttctcgatctcctgacctcgtgatctgcccgccttggcctaccaaagtgctgggattacaggtgtgagccaccacacccagccaagaaggttttttttaaaagggtaaaatctataaatcatttctattaggattttttttctttcaatggatgctcaggagtcctccccaatgcaagggtatatattcatctctatcttcgtctatttctgttttggttatgtttttatatttcactacttagtatattttggtgtaatgcatccagctttttttccctcccagataggtattcaaataccattttwaaaaaaaaaacaaaaaaacaaaaaaaaaacagagtctcactctgttgcccaggctggagtgcagtggcatgatctcartttactgcagtctccatctcctgagttcaagagattcttcttcctcagccacccaagcagctgggattaaatttttgaatttttagtagagacggggtttcatcatgttggccaggctggtctccaactcctgacctcaagtgatctgctcaccttggcctcccaaagtgctggaattacaggcatgagccaccgcgcccagctcccactttttacgtaatacattcttttcccgttggctcaacatgttaactttatcatacactaaattctcctcaatacctgactctatttattatcaatatttctatctagacttgaactgctaactctttaatttctgtagttttacaatatattttaacaactgtttttcaacatgttctttgctttccttcatattgagtattccaattaaagtgtgcaaaatatgccatataaagtgtaggatctttctgtcatttcccaagacccgttgggatcctgatttactggatcaatttaacttggagacaaattgacatctttattgaattttgtcatccagactcatcacggacagcctctttctcaataaaacacttgcattgagaggaatcttccctctctgcagccgtaacaattcaaggtgacattgttaacccagttacttctggattcgggtttccctctgtcagcagactgagctctcctagagccctcctcccagctctctcaggatgcccagtacacctgttttaaggcctcatggagacctcttatccccacaactctctgcttgggtcctctcttggccttttctgccttcactcctgctcccacctgatttagacttcatagtccagcatctcaattcctccatctctccaataccacagtttccctgtccatgatgcccacttaccaaaccctggccaactgtcctgtgcagcaggtcccttctctccacctgcagcaggcttcttggctctgctggagaaaatcacacaaccctgagttcacttggaggccacaacactcgggatattcagcctccactgggcaccaggctgccaggctgtccttccgtgttcccagccagtctgagtccactacttcatggtgtaaatgagacaatgataggttcttccctgcagtaggtgctgttggtgcctcttccagatccctgtatttggtcagttcatccatttcccaggcactgtaagagttggctgcaaatggcatgcagattgcaaatggcgtgcagatgcctcctttcccaaagacttgtcctctgccagtggacgctgccctacctaggagttacacagcctatgcacgcacccccagagagggcagccccatcagtgactgattgacactggtgtacaaaggccgatcctcttgcctccagctctgcaatggagtttagactccagagtctttcctggatcaaaccaaagctagactttcctgagaccacatcctctcctggcccctattccatgacctcactccccgataggctgtctctgaagagcaagccctcagtaaatcctggccacccgaatccttgtctcagagtctgcttcctaggaacccaacctaaagatactgtctcataaggttattgtgastattaaatgaactagagcgatatgtaagagatatgtacatatctttcaacagttcctacagcaagcaaactctccaaatctgtgagcttctattgcttttaagtatcatcggtattgctacacaagaattctgtatgtctaccaggtaacacttagttgagaaaatgctatattgggtgagtcaggaatcagtccagaggaaaattaattagacagaaagtaggtttactttttaaataaaaagaaccctggctgagktgtctatccccagagaaaatgtggaggaaactggtgacatttgatttgaaaaaacatggtggtttgtctccattatctttagattgagatatctctagggctgcggtcctgggggaccaggtgggcaggttcatccttctgttcagtgtaaggaagaatttccaataatcagaactttctaacaaaggaggagttgtctcactccactatgagctcactttcacggaagcaactaagcagaggctggaaatgacaaaaattccagcccggggagggagttcaatgaagtgacccctaaaggacctcgtggtgctaagacttctgagttttttgaattcatgagttcccaagagagggggttcactgtcagtggctccatccacacagtgtgccctgccctgtttccttcytccccacagagtgtgctcgggtgttccacacaggtggggcaaggctggtgctgtgtggaaaraactgggagaggctagagaacctatatgatgccttgatcagcgtggctgaccccagcaaggtaaggtcttctagcagtaggcgtgggtaactcctgggaactcccagcctccattgattgttcaggaccagctcttggaccaagtggaggaaacttggtgattgctctggggaatgtgaggcaatgaacccaatgaccttgacataggcatgtttgccattcataaagggttgacttgttttgaccacccaccatgacaaaatcatgttctgtagccacagctccttgccctgaccctatgtaactcaaactcaacaaggatccagaagacagaggatgttacaggtatggactgtgattacaaacacagtcatttttttttaaatacctgaactgatatctccatcaaagaaaccagataaatgagatcccttcccaagaactctcccaggaagtgaacacttatttcaaaaaggctgcagtttccaaaggtttttctggagcactggtcaggggactgtctttggagctcccttcaggatatatttttctaatctttatctttgaggttgcatttgctggctcaaagtaattcggaggtaagtctaatatttgaggagatgaatcaaacaggacaacacagaatgccccaaagtgtgtttctagggatgtgattaggcactgggtaaaagcaagggtttgcggtcaattgtgtgagaaacactgagttaagctaagcttgtccagtttcttcactgcaggacttttcagagcctttaatatgccagtgtgcactgtgtatctccaagaagaacttggagaacagcctatgtttcccaaacaaatttgactacggaaccctctcttcaagggcatatctcaggactagtctttgtcaaacactgggattgcatttaccccttggtgtcaacaattttcccatctgtccaccctcctacacatccctagatcaatagagtcttgatgcagcaagtatctggctaaacacagtgcctggcacatagtaggtgcttcaaaaatattgtgttgagtgtatgattttagttttttaaaatatggctattaagtactgtgatagatttttttttttcaacttgcaagccaggttgaaaagcaatttccacaaaggggctcagaaatgttaaaagtaatgatgtcaccactggagtcagtgcaaccctgcaaagggactgccgtgaagggcaatattcatttatcagttctggaaccctggccaagagtttagatttatcgctgcatattcgtgtcaagatttgttgttgtttttgccctggtccccaagtatgaattatctggcaatatcctccatcccagaatcatctctgcttcttcgtctttttttttttttcagtcatttcattatctttgaatttcaaaatgggtggcttttaratcgagggctcccaaggtctgcaagagggaggagatctcacacataccctgactctctcattggttcagcagacattcaccccaaagctggtcctgttggacctctcagacatcagctgtgtcccagatgtggcaaaagaagtcctggattgctatggctgtgtggacatcctcatcaacaatgccagtgtgaaggtgaaggggcctgcccataagatttctctggagctcgacaaaaagatcatggatgccaattactttggccccatcacattgacgaaaggtctcgtgagtttgactttcccatgggtatctgggccaccagattctacagaggsctctgttaattagccagacagtcatcctattctatatggaattccccagtcccctcagaaaattccctacctattgggtgaaagctttcaccattcccattgtaagtgtttatgaaggaaaaggaactcaggaagtatctgattggtatatttcaaccaccatctctgtgaaacccctctccccacccaagctttgcccttttacttctctctcyttacatccatggcttccctccaattcgacgtctctgaaaaattgtctcatcctccaacaattgtctcaacaatcatgtacattctgctatatcaaccttgtggttgacctgcttctaaccattacagttggtcaaaggtaaagattctgtcctcagaaatgaagaagaaaaagggcttatcaccagactacaagagacccagtattctgtcaaccccttcacagaaacagggaaaggcaggaggctgtctccctttaatgagtaagatggtgattcctacgtgaacctgtctgaggggcctaggagatacccaggtgcagatttctcaccatcaagttcaaacgcaggtctgaagcctgggaagtggggctggaaatgaccatagagtagaatagaaagttgacagatcatgaagtcaggaattcgagaccagcctggccaacatggtgaaaccccgtctctactaaaaatacgaaacttagccaggcatagtggtgggtgcctgtaatcccagctactcaggaggctgaggcaggaggatcttctgaacctgggaggctgatgttgcagtgagccaagatcacaccattgcactccatctttagacagggtgagactgtctaaaaaaaagaaaagttaaagcccctgctctccaaaaaaataaaagtttatcaaagcagaagctcagggggaatgtaatgtggagaacgcctccatttagggagtggggtgtcctggcaaggtctgagatctagcctgatcttgcaaataccttctctacaaccagctcccatgctgggtacctctaacaataggattctgagtactaagacagatgaagagaaagacgcatttggggcagaaagatgactttccagagcttctagaatggtgtcccagagataacagcttcctccagtccagtccctgtggacacagcaaacaggccagcaccggtgtgtcagctaccaacctttaacggagacttcactggcatcaaagcaacgaaccaagaaagtggagtggaaaagggccagaactggtttctcctcctggttagccctctaactcactaaggaccctgggtctagtccctagcgccggacttccgtttgtccatcttggtttttttcctttctttcttttttttttttttttttgagacggagtctcgcctctattgcccaggttggaatgcagtggcgctatctcagctcactgcaacctccacctcccaggttcaagcaattctcctgcctcagcctcctgagtagctgggactacaggcgcccgccaccacgcctgggtaattttttgtattttttttagtagagacagggtttcaccgtgttagccaggatggtctcgatctcctgacctcgttatccacccgcctcggcctcccaaagtgctgggattacaggcgtgagccactgcacccggctcagtttgtccattttaacatggaggtgctgggtttcccagatcattctgaaagttgaccctttgagtattgtcttttcattttttgccatatccccattccgcctatactattattaatttaatacctttctctgaattttctcatttttaaattaaattcactttaggaggaaatctgtataaaaccaacatgaatttaaaaactctttcattctcagtaaataaaggacaacctgaaaattaaacaaattaagttctcccaaggtagcctgagaacgccacaatcttccctctctttgttaaaagattagcatgtgcaagagaggcgttaaagacacactagaaccactgtgagacctccttcttccttcttccttccatactaggagaattgaaacgggaatgatgttcttactaccgagatgagcgtctgttctgttctactgggtaccgtactcactacttgagtgcaatatgcccatgtgacaaatctgcacgtgttccccctgcatctaaacaaaatttgagaggaaaataaaataaatataaatatgcatttaaaaaaaaaaaaagaaatcagtgtcactaaatgcacattggtgggaaagcaccaatttaaaatcacccagcaactcgccagcccacgctttggaaacactggataaatgattgcaggactcattccacctctgccctgctgcaatctagttaccgcrgaggtagcggagccctgtgatgagggtaccrggggcaggggtctgcctgctgctgcctaactcagtctcaaagttttaaccatgatgcatcgtcctgtgttttccagccctgcttcccaacatgatctcccggagaacaggccaaatcgtgttagtgaataatatccaagggaagtttggaatcccgttccgtacgacttgtaagttgctaagataaaaatatgatatcttctgttgtatgtcttatggtataaggcargagctgttatgtctaagactaggcagatggtcacaggggaaagggtccaaggatgacaccatctgctggattttctttcatccctatggttcctatttttttgagcacctacagcatgcaagtggctatgggagatgctgagatattaaagatacgctccttctgtccgcgaagctcacagtctcccatgggggcaggacatgcactaggtgaacctgacaatgccaggtgaaggtcacgctcctgagaaagatgcacagtcgtagctccaatgccccttcctccacaaagatgcccttgaaagtcaaggaagattaccattgggaaagagaagggtgggtgcacatcacaaaatgggagggcagtggagaccttctgaggaagaaaccaggaaaaacagaaaggggcagaattcagggtgggggcagctccaaatatgagcgtcctttcaaaagttcaagggggagaaggactcctaggtgtatgttcctgggatctagctggaaaaattctggagccatttccacatctgatgagctagttctaagaggtggggaacgtgccatatacatttattcgtggcccacactaccatgtgcaaattaggggctcagtaaatgtttgatgggtacaagggtggaagggaagaagggagggaaaaaaatagtaggttcctatatgaatttgctcaggctgccgtaacaaaataccaagtctggggcttacacaacagaaatttgtttttttattctggaggctggaagtccatgatcaaagtgtcggcagggctggtttcctctgggacccttctccctggcttgcagacagctgccttcttgctgtgtccccacacagtctttcctctgtgcacgtgcatgtctgttgcctccctatgtgtccaaatttcctcttcttttctttttctttttttgagacagaatctcactctgttgcccaggctggagtgcaatggcaaggtcttggctcactgcaacctccacctcccaggatcaagagattcttctgcctcagcctcctgagtagctgggactacaggcacacgccaccacacccagctaatttttgtattttttagtagggacggggtttcmccatattggccaggctgatctcgaactcctgacctctggtgattcacccgccttgacctcccaaagtgctgggattacaggcgtgagccaccatgcccggccccaaatttcctcttcttacaatagcaccagtcagattagagtaggacgcagcctaatgccctcattttatattaatcacctctttaaatatctctaaataccgtcacattctgagtactgggtattgggtttcagcatataaattttcggaggctgataacagaattcaacccataacacccgctctagtagtgttttaccttcctttttccatatgccttagttagtttaggcctgtggtgctgtgagcctgtgatgtgggaaaacttgattactcctccatgtagtaacctcaatgggaatggctcaggcaagcagatgccaccatgccacagggtcactgaggggcccagggtcatgctaagtcattccatcaacaacatcttccgtgtggtcaccactgggtccctgctggcaagaagaggaaagagactgtggaggagccgtgctcaatgtccaaagccccaggctggcattggacatcccattgtccccaggctggcatcaccgctgctcacatcctattgggagaactcagtcgcacctaagtgcaagggacgctgggaagtgcagtccacctgggggcccaggaagaagggcagagtgawtgggccacatacagcagtctttgccacatcctgccttttcctctcttccccagtccacttaggaatctccccactgctccttgtatttttaaactttctgtctgttattttcagcagctgggtgacttttcatcttccttgcttcatgccttcattcattcaacaaagtgtttgaatgcctaaagccaagtgatgggaacacagaggtgacataatataatgagacatgggcatgacaatgggcgctttggccactgacccgtataggacaaatgcacgagtttcctgggaacatttgcaaaacacagtattggggactcagaattctctcaagsctgtctccacccccatcagtcatggtctggcttctctgaagctgaggaattgaggggcacagagtttcccatgtaaatgtcagaactgaagccatgccaccctggactggccccaaattctcttcttcctctgaatccggctttggaaagacacaaggagctggcgtgggagtgacctggggtctgccgactcagaggtttcttttgaccacccaaaaggaattcagtgtccctgagcaccccagcacagttcccttaccatccacccaggcaaggagatgggggctctgaggctcagaacctggcacacagacttgaaagggaaggcagcctgccatgtgtccctcctgctgcaggcacacatctctttcctgcattaaccatgccacatggggccgggcacagtggctcatacctgcaatcccagcactttggaaggccaaggcgggtagatcacttgaggtcaggagtttgagaccagcctggccaacatggtgaaacccatctctactaaaaatacaaaaattagccaggcatgatggtgtgtacccataatctcagttactcgggaggctaaggctggagaattgcttgagcccgggaggcagagattgcagtgagctgagattgagccactgtactccagcccggacaacagagcaagactccctctcaaaacaaaacaaaacaaaaaacaccacatggaaagttacctgtccacgtgtctgccccactgatgaaatgaggactccatgaggccagagctacttctattcacctctgggtccccagcttctcacccaccagagcagggacttcactgttgaatgactgaaggaatcaaggagatggtggatgaatgaaaaacaagctggtagacctttttttggtaacacttgtattggctgtgtaattcacataccgcacaatgtatccgtttaaagtgcatggttttgctgggcgtggtggctcacgcctgtaatcccagcactttgggaggccaagacaggcagatcacctgaggtcaggagttcaagaccagcctggccaacatggcgaagccccatttctactaaaaatacaaaaactggctgggcatggtggcgtgcctgtaaacccagctactcaggaggctgaggcaggagaactgcttgaaactgggaggtggagcttgcagtgagccgagatcgcaccactgcactccagcctgggcaacagagtgagacgccgtctcaaaaaaaaaaaaaaaaaaaaaaaggcctcattgcagagaactagaagcttgctagtcatgatgtcaggggaaccaggaaagggttctggttgaaggcatctgggcacagtggcaggaaccacagtacatccaccttctgccccttctgcctctgactgacacccctaaaatgtgaagttggggtgcatcacaccccagatgtggctctaacttcccaaagctctaagcaatgtccactctattctttttggaactcctggaatgatccttttttccccaacccatggcttctacgatttgaactggatttggtgagtggattacctggacgggctctccgaggaaaagggaaacaggaagggagaggggatatctgtgattcaggctcactgcagccaccagctggccccggaccttggacaagtttcttaggcatcagccttcccaggaaggaaggggaattcatgtttgtgccggcattctgtatgttttctcatttgatcttcacagtaatttgccaagggaaatagcgcccccattttaaagataagaaaactgagcctcagagaggcaaagtgatttgcccacaatcacatcacaccaccagcaagtggctaagctgcattcagttccagctctatgtccaccactcccgagggctctctgtcctcatttgtaaagtgaggggcagattcttgaggatcttcccagctctgcgcctgtaggaaatgtgtctgtcggccctcctgcctccaatgcgcccaccaggaagcagggccgggagtgtcctgcgcccacctccggatggtttgtctcgcagacgctgcctccaagcacgcagccctgggcttctttgactgcctccgagccgaagtggaggaatacgatgttgtcatcagcaccgtgagcccractttcatccggtygtaccacgtgtatccagagcaaggaaactgggaagcttccatttggaaatgtgagacttcagagggaagctggggcccctgggggcctcgggaacagtccggtgtcactggggggatgaatgaccttcagatgggtactcctgaaacatgagtctggggatgggggtggaggaggctcagcaacccccaacagcagggcggggcccccaaacctttaggcctgaggcacccggtagacagaatcctcactgcagcctacagcccatgcgcccgctaagctcagccactcagcttcctctgccacctcggcaagcaactgcctatctctgggcctttttcccagatgtcatggcctggattcggggttaaagaactttcccgctccccctttcccttgcacagagtggaggccgagagtctaaagccaggccacctgcactggaagccggcctctgccatgtattagagggttggatatgagcaaatcccttaatcatttcgtgcctccctaasagataggtattgctattattattattttcattttagaaaacgagggataatagcaatacctatctcttagggttgttggaaggactgaaggttctggaatagcaaccagcccctctatcaatcagtgcaccttattatggccactgctctaggatgctctaagcgtagaggcgctacaccttgcccaaggctctaggcccaccttgaggaaccgagatgatccaagatggggggcagaccaggggttccaggatgctcctgacaagcacagcttcacgacagttacaaacaacagtcccttaatccacctggcaccttcttagatcctaacctcttttgcatcccttcccccacacgtaaccgccctccgaaattatcagggcaggaaaccaggtccatcctatagacgaagacgcagaaggaagcgcagasagtggagtgtctcccgctggtcgccgcggtccgcgggtggcggagggggcctggaacctgtgactccggggacagcccacgcttcccgcccctcagcctttgtgcatgtgcagggctctgaccagccgggtccccacggaggtcataacccccgcccccaactggggcctttcagtctttttcaggaagctgacctacggcgtgcacccagtrgaggtggcggaggaggtgatgcgcaccgtgcggaggaagaagcaagaggtgttyatggccaaccccatccccaaggccgccgtgtacgtccgcaccttcttcccggagttctttttcgccgtggtggcctgtggggtgaaggagaagctcaatgtcccggaggaggggtaactgcaggaggccaaatgggccaccccttggaaataaaggtttttctggcaggtgctggcgcttctgtcctatgctccacactggggcgccctgcagccacacccctcacctgtctgaggtcttcccgtgacagtgaggatagcctggagccagcccagaagctacggagcctggggttctccacattcccaggacacacttccagaagcttccctgctctgtagggtgactactcagcaggaaacaggagctgcaatgcctstaacccccacatacacacactcacactgtatgcgtatgtgctcaggcactcagtctgaaaaccacctccactgtatacaagggtgacctggccacgtcacctccacccacgagagcaggacttgacgaccctttagagcagtgctgcaaggatggaaatattctataatatgcattgtccaacatggcagcactggccacatgtggctgccgggcacttgaaacacggagccctgtgtctgagacactgaatttttaatgctatttawttataattaatttaaacttaaacagccatgtgtggctagcagctctagagttgggggtgtatgagaatcagcccatcttccagactgatttcattggcctcagtcccctcccaaccccacccccagctctcccctgcacctccacccccaccatccccacccacacagccaagctggaattttagcttccacgttgcttctaacaaatgctgagaacctctgcccaagtatccacctcatttcagcctttccttcaattctcaaagcaaaaagcatttaaaacgccatcctctccttggaggtgggcacttcgtgtagtctcctttttcttatacaaaacagtaaatgaggccgggtgcggtggctcacgcctgtaatcccagcgctttgggaggccaagactagcagatcacctgaggtcaggggttcgagaccagcctggccaacatagggaaaccccgtctctactaaaaatacaaaaattcactgagtgtggtggcgtgcacctataatcccagttactcgggaggctgaggcaggagaatctcttgaacccagaaggtggaggttgcagtgagccaggatcacaccactgccactgcactgcagcctgggcgacggagcgagactctgtctcaaaaaaagaaaaaacaaacaacaaacaaaaaacagtaaatgaatcttgggcactcagaaagcatagggtacctttttgcactaatattgtaacaactcaagcttgtctaatatttatagatgaaagagggcaaaaatttcttccctgaatctaaatcatttacaaaatgacatatatagggtacacatatgcacatctataaatcttttttttttagacggagtctccctctgtcccccaggctggagtgcagtggcgcggtctcggctcactgcaacctccgcctcctgggttcacgccattcttctgcctcagactcccaagtagctaggactacaggtgcccgccaccacgcctggctaatttttgtatttttagtagagacagggtttcaccatgttggccaggatgatctcgatctcttgacctcacgatccgcccgcctcagcctcccaaactgctgggattacaggcatgatccaccgcgcctggcctgcacatctataaatcttaatttaaaaagaaaaatgtccagggtcactgatcacctggagctcagcctactccaggacaaggctggtggtcccgtcctgctaccgtggaggcaggatgtcgggtcagaactcaggggctcaccgaagcagcaggcaaggcaggcctggagcctgcaagggaactgtcttgtgagaggttgttgttagtggggggagggcatactggggtgctcaggccgaagccaacagagggtgggtaggagccgcaattgcgaagggagagggctgaaacttgattggtgaccagagagtagggatggcagctttgggacagragcagctggagccagggtcacagcagccaatcctgggacccaccaagggtgggctgccagcagaatgtggccacgacccagatccacgctgtagggtccttacctgttccctttagggctctgcctggtcacaggtgagttccaggccaagaaccccccaaggggatggggggcaggaagggattgtgtctggaatcgtccacactggcgctgaaagccacattctgggagagtgaggactctgaggcagggtgacagcagacacctgagattccccaaaagaagccacgtggagcaacggcccacgaaggactctccggtttaagtggctctgctccactgttcccctgccaactggcggagcataccccagagcagagggaggtcagagacttgcgggtggacctggccagtctacctggtgggcagcctaagcgccctgcagtgaaatttcctgtctatgggccttggcctccctctgactaaatgctccctagtgatttcagatgtccctgtgcccactcaggccctgacgtgctctcaggatggggtgtctcattggcctatgaatgaaaaaccacaatctttatcttgaaacatagtgggggtaaaaataaataaataaataaataaataaataagtgtcatgcaatataaaaaatagccacaagggagcactgtatctccaaaccaattttatagctcatctctccaggaaacccttcggcacagcagtagtaactcacctaattatattcacaatttccaatgggcctcccgttgcgagattccattagatcttcgcatcagccttaattcattggaagggctgacagacccatttcacagatgagaaaactgaaggtgattatgttctatgagccacagctgctctgggcagaacaaaggcagttagctcctgggacccaggaggagtggcatctaggccccagtaactgccccagaccttaaagggactgccccaagacactgcaaggcgtgaagcagtcctcacactccacatagagagaaatacaggtggttttctcctcccacccccaaccacacatatctacaaaatgtttaaaatgaaaaaatgtgggtaacctaaagaagcagagagacaaagcaatcagatgccctgacaaccactgttaacatctgggctcttctctgaggagaccacaacttttatttatttttttttttttgagacagtttcactcttgttgcccaggctggagtgcagtggcacgatctcggctcactgcaacctctgcctcctgggtgcwagtgattgtcctgcctcagcctcccaagtagctgggactacaggtgcccaccaccacacccagctaattttttttatttagttgagtcggggtttctccatgttggccaggctggtctcaatctcctggcctcaggtgatccacccgcctcggcctcccaaagtgctgggattacaggcatgagccactgcccccggccggataccagaatctttacagagagaacacttcttggagcctcaggggccatcctaggtgtggttgcaagaagaccacacagataaagacacacagctgggcatagccacagccagcgcctgggacagtctctgcccctccagatgctgtgagcgctccatctcagtgctggcacttgtggctgctgcaacaggtgcccttgtctgttggctgctgactgggctcagccactggggactggctggcagggagagactgaagttacagtgtttagcaccccagctgtctcctgccgggctgcagtgtcttgattgcaacctgccactgaaccactggttaccctcgggagccaatcctgccctttgccccttggagcctaggtgcattcatggctcctggctgctgctggccctgggagcttcttcgtcctttgttggaattctttaatcctgaccacacctctgtgatgccccttcattaaatgatccctaatcacccsgtgttataggttgaattctgtctctcctataaaaagtatgattttctaacccccagtaccttagaacgtgaccttatctggaaataggggctttgcagacgtaactagttaacatggggcgatactggagtaaggtgcatccctataagaaggtggctgtgtggagacagagtcacccagggaatgtgtcctgtgatgatggaggcagagataggagtgatgcagctgtgagctcaggaacaccaaagcctgccgggaaaacaccaggcactgggaaggaaggggtcaggaagtgatcttcctacaggttccagagggagcagggccctgctgacatctggatttcagacttccagcctccagggctgtgaggcaataggtttctgttatttcaagcaacccaatttgtggcaatttgttacagtagccctagaacactaatagacrccatcaaattctagcctgggccttgaccgacgcagctaatccccagaagaaatttgcgagactcccttggggaaattcaggaaccacgggaaatgacccattccttcaaggagacataagcatcattcagcgtgctcttagcccagagaaatgactggctctgtaagttatcagggaactgagcagctctaatcgaaggaccttactgttctcaaattgctagtaggaatttcaggcacccaaatggaacccccccaccagggttaaactattatctccagaatattccaagcacctctgtgcagggacgtgtgtctgacaacacatgagcagaagatttggctctcagggcagggctcacgggacagaaacgttttctgcagtaaaagggtcagacactccaagagcctggtatactgagggagaatagtctaatcagtgtggtggaccaracccgtgcaggaagatggaccctgaaccctggggcccagcaccaactgcccagctaagaaagatcccaccaacgcatgcctgtaatcccagctactagggaggctgaggcaggagaatcacttgaacccaggaggcagagtttgcagtgagctgagattgtcccactgcactccagcctggatgacagagtgagactctgtcaaaagaaagaaagaaagaragagagagagrgagagagagaggaaggaaggaagggaggaaggaaggaaggaaagaagaaaggaaggaaagaaggaaggaaggcaggccccatcaactgtcagccctacctccccaccccttcctggaagtggctggtcttccctgacttgggatcccttccaagagggaatcaataggttggtggaaacacaccaagacccaatagaagtggactgtgggccacctgcttgtccctggcctcacacttgctacctccccagctcctgcagctgagcatatagtcctcaggaagtcaaatgctrtatcagctatgactttggaggttataggcaacaggaacccaactcaagcatttattcacccaagtaaccagaaattcttattttggtcagagtcaggcctccaagaggtgccacgaggattcggtcattttttaccatctttcagcaatatattccaccacgtgggcttcacgctcagcagatatttccatcatcatgatgagatggactgcacrgctccaggtgcatgttccagctacttagaagctacgtagaaagagatttctctttcccaatagtttatactaaagtcctgacacctttgggtatgtggcccttttgaaacaaccaccacgtgtctgattgcccaggtgctccactcctagggaaggaggggtggggcagccatgtctgaacaagaacagagtggagaagtggtggtttcccaagagaaaatgaagatgctcttccaagaagaaaaggagagcatatattttgcaggcaaagcaatctttcttccaaaatgcatatccctggagaagggaagagctaacacacactgatacaacccatctgctcccttactagagtctctcactcattgccttatgcaatgctcccagcaagcctccaagataaatatgagctccatttctacctatcaggaaaacagaggctaagaaagctgagtaggtcattcagtcaaactgcatagctggtcaagcgcagagctgagacttgtgggtggtaatggctggaccacttgcagacagagaagatcaataacctgccagtgttttccatgttagaactgggtggggyttccaagggtagggtcagatcaggcatccccttcctggtgtgccctggttgacagtggtaactggggaagccttaggttgcttaaagttaacattagttgcaaaaataagtcaaggagcttccatcaggaaggctgagctggggcaggcgagtttggtctggactagagagtgttctgttggcatcaaggggaatgcctaggtatataaacaatagaggagtctgtaagactttgcagatgcttttggtgcctggtgatacaatcccctctccatccmcaatttcagctgcagtgatggtggaaggaaggctcccatgcatgctgacagcattctacctcatctctccacttttctgtcttggggctttctctaaagcaggagaatgcctgcagtccttacaggtaccgtccaacgttgcagaagagttcacatccccagggactaccttcaaccaacaagggacagaagttggtagacaatgcccaactctcccaccctttaaaaggacaagtctgaggcacattcaatatggcacctcaagggtctgcagcagctttgagcccagctgggtgaccagcccactaaagcacacttgattggcttttttccttccctgtctcattcttccagctcccttgcttctctttcctggacgccaccttccccataactacctcctcccagtccttgtctcaggttctgctttcagggaacccccaactaagattgaagactttttggaggtggcctcatttgagatggacgagcagcatgttagggatccatagtttgcaagaaacagaaatttgttcaaactcattaatgtaaaaaggtagtttgttaaaagaatgaaggaaagtatctcaaaaaataaagcactggggttcctggaaattggaatattttgggggagcacttctccatcctcctcgcttctctctcaccttctacagggtccgttgtctgattctgtacatatctgcttcatttttctcytccctttgcaggctgtcattcttgatttactcagggtttctgtccaaacagctatggcttgcacatggccttgacttgctgagatgtcaagtctaaccctaagtctatggaatctcagagcttgattcccagagcaagcttgctcagtctctcaaatggccctcctcaatccccacccattccaaatttctgcggggtggggggaactggcccaatttgaattaaagtttctctccccccaccagttcaatcacctctcaggctgcccccttttgagtcatgtgggtgaggctggacccctaagggctgaaaggagagaaaacaatgaatagccaaggaagtggacagagccaagcttcggagactcacatgtgtgagagcaatcagaagggcaagagctgagctgggagtggtgtcaggaggctgttgcaaaataattcaggcgactgacagagcgtcaagtggagcaaaagggagagacagatggaagtgacgcagggagagtgtaactgacaagatttggcaactgataggagtgaggagtcagaaagaaaggtcagagatgactggaaggttttactgggaagatgagagggtcagccatggaggagaagatgcagaagtttgtgatacactgagtttgaggcaggctatcaaaacagtctgtgttcacctgaatcaaatccatctgcatcgctaggtgaaagatgtttgggtcattcttttgttctgcataatgaggtatggttgtttatctgggattaaattcggatcaaattgaattgaatttcacatccaaatttacctaggcatctaaggctttgtagaagcgaagtgaaatgtaacaatagactgcagtgatgacaaaagacaatttaattaaatagaaaattatctccagcttagctgtagccattcataaaggaaaggaggatagattaataactcttggacacaaataaatggccccaaattaaaacttgcaaaattaaagatacagacagaacagagcaaatttaaagtatgtgaggttcaaaaataagcacatttaatcaatatactattttgggataaacagatatgcgatgaaactctaaagaaaaacaagggagggattaacagaaaccgggaaaacggttacctctatgatggacgggagcggggaggtgaccgaggagagccactggctctgggtcttgttaagtgggtaaaattggtgtttgcctttgggaggccaacgggggcggatcacgaggtcaagagattgagaccaccctggccaacatggtgaaaccccgtctctattaaaaatacaaaaattagctgggtgtggtggcatgcccctgtagtcccagcttcccaggaggctgaggcaggagaattgtttgaacccgggaggcagaggttgcagtgagctgagatcgcgccactgcactccagcctggtgacagagcaagactctgtctcaaaaaacaacagcaacaacaacaaaaacctggtattccttaagtttagtagtgggttcacaagtgatcttttattattctttaagccatttgcacacatgatgtacactttcatatttatgacatatttataatttcctaggggctccatcaggtctgcctcatcctatgtatcttcagtaaggacatgctcattttagatattgatatatttcaaggggttacctacgaaataacctgaggtgtgcataaatatcctccacctttgatctgtctacaatgtagaccatttagtcgtgccaggccaactacgtgttcttgctccactgagaatgtttcaaatgctttgaaagaaagctgttaaaaaacttgatttggctaaaaatttacactaatctctagcaactaaaaggccatgcctccctacaggttctagaaccttctttcagatcagccacaaaatttcacccttcctcccttcagagtcagctcttcacccaccagttctgtctactaagtccttcctgcttctctgaactccccagagactcaacacgttcctggaaatttaaactgaaggccagtaaggcaaaatctagccactcgtgtcacatcctgagtgcacacggactgttttaagggcttgatctgtattttcagcattttctggaggaaatggaaaatgaagggcagggtrgtctgtgccgacatcctcactggcctctcctcggtcagaactcctgctgccatgcttctgcgacaccccagaatgacatgctcaactctccttgactccttccatgaaaatataaaaactgtccacctaggaaaattatgcctttccatttctctgctgtatataataggacactctctctctctctctctacattatatatatatgtgtgtgtgtaggtgtatatatacttacttaataaagaatatattatatataaaatatataaatataatatataagcatatctatatattatttaattaatattatttttatattaagtaaataaatataaatatattatatgaaaatatatgttatatataatataaataaatgcatattatttaaaatatatactattatataatatacaaatatattgatatattatatatttatgtataatatataaatatattgatatatatttatgtataatatacaaatatattgatatatttatgtataatatataaatatattgatatatatgtatgtataatatataaatatattgatatatatgtatgtataatatacaaatatattgatatatatgtatgtataatatacaaatatattgatatatatgtatgtataatatacaaatatattgatatatatgtatgtataatatacaaatatattgatatatatgtatgtataatatacaaatatattgatatatatgtatgtataatatacaaatatattgatatatatgtatgtataatatacaaatatattgatatatatgtatgtataatatacaaatatattgatatatatgtatgtataatatacaaatatattgatatatatgtatgtataatatacaaatatattgatatatatgtatgtataatatataaatatattgatatatatgtatgtataatatataaatatattgatatatattatatatttatgtaaaatatatttaattaatattaaatatataaatgtgtatataaataaataaataaataaatatagatatagatatttgatgacttcagaacttttagatcacatcttgccaaagtcttccagggtccctaggctctgcttccacatctcagcgcttctgcagaggtgtgctcacccaccagaaagccagggtcccagctgtcttcctccagaccccagggtaggtgctccccaaaggagacctgactcctctcatgtccagctctgcaactcatggtatgtactctgcagcttcctgagagcattcaggttccttccctgttgacaaactttccagcatccatagaggcaactgaggacacttaggggccttccttccagctcgggaaaaaggaggatgagtaaataacagacatcacatcggggggaaaaatgccatcgttggtatttttttaaattgagctatttcttgtatacagtaaagcacacaaactgtacatatagagctcagtggaattgtacatgtgtatgcacccatgtaaccaccatgcagatcaagtgatggaactttctgtcacctcagaatgtttcctcatacctagtcaacctctaccctcagaagtaaccaccagtttgacatcaatcacccataggtcatttttagctgttcttggattttgtgtaagtggaatcatagagtacatgcttttttagtgcttggctttcgtcacttacacaatttctacatgagtcattcaggttgtaccagtggtttgtatttttttgttttttgtttttctgagaggtgttccatggtatgaatatttcacaacttgtttacttctagggatattttctattgacctgtagttgtatttattcgtcgtgtcttctgccgtgtccattctactgttaaaaactatctcctcagttccttaatgctttttttttttttgagatggggtctcgctctgtcgcccaggctggagtgcaatggagcaatctcggctcactgcaacctctgcctcctgggttcaagccaccacacccagctaatttgtttgtatttttagtagagacagggtttcaccgtgttagccaggatggtctcgatctcctgaccttgtgatctgcccgcctcagcctcccaaagtcctgggattacaggcgtgagccaccgcgcccggyccatcttcatagaaatttctaatagtcagtgctggtctagactgaaggaaaaataatcagaactaaaatgatcattgttacaccaacctaagggtagactaggttggtttgctaccttaatctgacaaatgttagcccctttgatagatgcagcaatcacttatttttaaaacacaaacttttttattatataagtaatatgtggctcaatatagaatcatatgaaaaagcgggaaagcataaagaagaaaaaaaattcccttagcctacctacccattcttaacattttttagtcaatccttccaatctggtctttcaaaaaatttatatttcaataataatagaaatcatattctacctactattttgtaacctgcttttgtttacctgaaattatatcataaacatttttccaattattagctcatcactctcctagatgaattcctagatgtatcaattctgggccatgaatatattaaagccttttgccacataatacaaatttattgtatagcaaaattcatttattttcactcccactagtaaattattaaaacgctggtcatgccctgcactttcccagcgttagataatttcattacttttaagcttagccagtttgaaatgttatcactcattccaaacttttttgtgggctaggcgcggtggctcacgcctataatcccaacagtttgggaggctgaggcgggcagatgacttgaaatcagaagttcgagaccagcctgggcaacatggtgaaaccccgtctccactaaaaatacaaaaattagccgggcgtggtggcgcatgcttgtaatcccagctacttgagaggctgaggtgggagaatcgcttgaacccaggaggcagaggttgcagtgagccaagatcgcaccactgcactccagtctgggcaacggagagaaactctgtctaaaaaaaaaagaaaacttttttgtgtttcgtgctgtttatgtttcttctatgaattttctgttcatgctcttttctattttactatttaccttttatctgtaaactacagttcatacgttaactgcttattagctatatatgtcataaatgtcttccttagcttgcttctgatgtagagaaaatttaaaatttgtatgcaatccaaacttggctcttcttattatagttcttcctttgctttttttttttttttttttttttgagacagagtctcgctttgtcgaccaggctggactgcagtggcgagatcttggctcactgcaagctctgcctcctgggttcataccattctcttgcctcagcctcccgagtagctgggactacaggcgtccaccaccacgcccggctaatttttttgtatttttagtggagacgaggtttcaccgtgttagccaggatggtctccatctcctgacctcgtgatccgcccacctcggcctcccaaagtgctgggattacaggcgtgagccactgcgcccggctgctttttctgttaaaaagacttccccagttatttaagtcactatattttttccagttcttttatgattcaatttttagaaacaattattttgacataagttatttggtctccaatctatcttagcatgtttttgaagatgaattaatttgagaaaatctcattaaaacattatttgtccatgtagagtcttcttaacacctaattagcgctcctttgatgggcaattcatgtgcaaataaaagcatgtctgtaatttcgggctgtaggctagcaaggcagctactgaggattagaagagattaaataaagaaattataagaggcagaccacaatggctgggtgcagtggctcatgcatgtaacctcagcactttgggagacctgacctgaggtcaggagtttgagaccagcctggccaacatggtgaaaccccatctctactaaaaatacaagttagacgggtgtggtggcacccgcctgtcaacccagctgctcgggaggctgaaacaggagaatcactagaaagcaggaggcggagattgcagtgagctgagatcgcgccactgcaatccagcctgggcgacagagcaagactccatctcaaaaaaaaaaaaaaaatgcagatcacgaaagcagtaagaattactgcaagtgtttcattagccctttcttctggtatatgttgtatatatgatatatgctggatgctaaaattttacataccccttctctctgctgaagctcctaccttccttctgtagggcaacacaaaaagtaagaccccaatacgcctcaggcactctccaaagatgagtgagaagtggaggcagctagctggccaatgagattctgatgggaggcgctgttaataatcagccctttgaccgggccgtggtggcttacgcctgtaatctcagcactttgggaggccgaggtgggcgaatcacgagatcaggagtttgagatcagcctgaccaacatggtgaaaacccatctctactaaaaataccaaaaaattagcctgtaatcccagctacctgggaggctgaggcaggagaatctcttgaacctcggaggcagaggttgtagtgagctgagatcgcgccactgcactccagcccaggcgacagtgcgagactccgtctcaaaaataaaacaaaataaaataaaataaataatcggccctttgattctggaacaagaaaagatgcaaagctatgactcagttaaagaaaataacatacaccacatggcatccttatctctgagcaccttcagagaaagcaaagaccacatagtctcccaaatggtcatggtcctatagaggtggggactcagctgggcgcagtggctcatgcctgtaattccagcactttgggaggccaaggcgggcagatcacctgaggtcaggagtttgagacttgcctggccaacatgacgaaactctatctctactaaaaatacaaaaaaattagccggacgtggtgggtgcctgtaattccagctagtagggaggctgaggcaggagaattgcttgaacctacaaggtggaggttgcagtgagtcgagatcacgccactgcaccccagcctgggtgacagagtgagacactccgtcaaaaaaataaaaaataaaaaaataaggggttggggactcaagctcagccctgacatagatcttttcatccaagttccagccaacttcctatggctagaattgtatgtcacatcatttgtttgtattacaaatataattgagagattatttcagtatgaaatattcatcatctcttatgttgataaagaacctcattattttggaaaaattttatacacactgtgagaagaccactgaactagataaatgtccaaaagtctgaagctggggctatcgagctattgctggaggagactctaggagatcatttaattcctatttcctagtcccttttatgccacgacaggctccctgaacattagtcactccgtgctctgggccgcagtctacccatctatctgtgttatagtgctatgcccccttttattctcccttcacttctcccatgcccatcattattaccacttggtttgaagaggatcgcatctgctgagagcacaaaggtggaaactcaaaccacccaatatgacaattgcggtactggaagtatggatcccccaacgcaggggcactgctgactctatgtcaaggtctagggaggcaaacacagaggatgaagcagtgaaggatgagcaaatacacttcaaagagtaccagatatcaaaataacagagtacttggttccatgtagaataaggaagtggtggccgggtgcggtggctcatgcctgtaatcccagcactttggaaggctgaggcgggaggatcacaaggtcaggagttcgagaccggcctgaccaacatggtgaaaccccatctctactaaaa

SEQ ID NO: 94354 - DNA, 49461 bp, Homo sapiens
  misc_feature (1)...(49461): n = A,T,C or G
caggctggagtgcagcagcacaatgatagttcactgcagccttgaactcctggactaatgtgatcctcccacctaagcctccagaatagctgggactacagacatgcatgcaccaccaggcctggataattttttcaattttttttttgagacggagtcttgctctgttgcccaggctggagtgcagtggcacgatctcggctcactgcaagctccacctcccaggttcacaccattctcctgcctcagcctcccgagctgggaccacaggggcctgccaccacacccggctaattttttgtattttttagtagagacagggtttcaccgtgttagccacgatggtctcgatctcctgacctcatgatccgcccgccttggcctcccaaagtgctgggattacagtcatgagccactgtgcccggccaagtttttcaattttttgtagagacaaggtcttgccatgttgcccaggctggtctcaaagtcctggcctcaagtgatcctcgaatctcagcctcccaaagcactgggattacaggtatgcgtcaccacgccaggccctcacccctttatagacataaccctgctccacaccatccctaattcctgacaatgagtaatttgttctccatttctgtaattatgtcatttcaagaatgttatataaatggaatcaaatcatagtctgtaaccttttgagattgccttttttttttttttattcgagatggagtcttactctgttgtccagactggagtgcagtggtgtgatcttagctcactgcaacgtccacctcccgggttccagcgattctcctgtctcagcctcccgagtagctgggattacaggtgccggccaccacacctggctaatttttatatttttagtagaggtggggtttcaccatgttggccaggctggtctcaaacttctggcctcaggtgatccgtccgcctcagcctcccaaaatgctgggattacaggtgtgagccaccacgcctagcctgacttgcctttttttttcatgcagcataattcccttaagatccatccaattaggatataccaagaaatcacacacacacacacacacacacatataaaaagatcctcctagccaggcgtggtagctcatgcctgtaatcccagcactttgggaggccgaggtgggtggattgcctgagctcaggagttcgcgaccagcctgggcaacctggtgaaaccccgtctccaccaaaatacaaaagattagccaggcatggcgacatgctcctgtagtcccagctactcaggaggctgaggcaggagannnnnnnnnnnnnnnnnnnnnnnnnnnnnnnnnnnnnnnnnnnnnnnnnnnnnnnnnnnnnnnnnnnnnnnnnnnnnnnnnnnnntgccactgcactccagcctgggtgacacagcgagactccatctcaaaaaaaaaaaaaaaaaagatccatccaagttgtatgtatcaatagctcatttccttttattgttaactagtattccatgtctggatataccatagtttaaccatttatttgctgaaggacatttctaatatttctagtttttggttattacaaataacattattgtgaacattcatgtacagattgtgtggacataacttttctattctctgggataagtgcccagcagtgcaattgctgggtcctatggaaagtgcttagtttgttgtcactgacaaactattttccagagtggctctacgttttacgtctccaccagcaatgtatgttatgttatatccagtcttgttacaaatctgccagcatttggtgttgacagtatttttttttttttgagatggagtttcactcttgctccccaggctggagtgcaatggcgtgatctcggcccatggcgacctccgcctcccgggttcaagcgattctcccgcctcagcctcccatgtatctgggattacaggcttgagccgccacacttggctaatttttgtatttttagtggagaggattccgccgtgttagccaggctggtcactaacctgacctcacgtgatccacccacctcagcctcccaaagtgctgggattacaggcgtgagccactgagcccgacctaattttgtatttttagtagagatcaggtttcaccatgttggtcaggctggtctcaaactcctgacctcaggtgatcagcctgccttggcctcccaaagtgctgggattacaggcatcagccactgcacctggccagaaaannnnnnnnnnnnnnnnnnnntgttgcccaggctgaaatgcaggggtgcaatcttggctcactgcagcctcaacttcccagattcaagaggtcctcccacctcagcctcccaagtagctgaaaatgtaggcatgctccatcatgcctggctgatttttgtattttttgtagagacagggtctcaccatgttgcccaggctggtctcaaagtcctgagcacaaaggatacacatgcctcagcctcctgggattacaggcgtgcgccatcacacccggccgcattccatttctttatgtttgtttgtctgtttgagacagggtctcactctgttgcccaggctggagtgcagtggcacgatctcagcttactgcaacctctgcctcctgggttcaagcaattctcctgcctcagcctcctgagtagctaggactgcagccacccaccaccaggcctgggtattttttctttctttctttctttctttttttttgagacggagtctcgctctgtcacccaggctggagtctagtggcgcgatcttggctcactgcaacctccgcctcccaggttcaagcaattgtcctgcctcagcctcccaagtagctgggattacaggcatgtgccaccatgcccagctaatttttttgtatttttagtagagatggggttttaccatattggccaggctggtctcgatctcctgacctcgtgatccacccgccttgatctcccaaagtgctgggattacaggcgtgagccaccgcgcccggccccaggctggagtgcagtggtgtgatctcggctcactgcaacctctgcctctcaggttcaagtgattctcctgcctcagcctcccgagtagctgggattacaggcgcacgccacaatgcccggctaattttgtatttttagcagagacggggtttctctgtgttggtcaggctggtttcaaactcccgacctcaggtgatccacccacctcggtctcccaaagtgctgggattacaggcatgagccaccatgcccggccgaaaaatataatttaaaacaaaattttctcccaatccagaagtgttcttcacaaagctagtgaaaaagaaaacactttagtattgtataaaacattaagccagaaagtgaaacacatcacaggcaatctgctaagaaattgcagacagaaagaaatctcacccccttatatagccaagcagatagaactcagtacatacatattttccaaaataaaccataattagtcctcaaataagaggacttgacagcacactttctcccatatagttcatcctatttggctttatctagaggaaaagcaaacttttcatatctttatgacaggaagtggttttgcaatttggggcaggaagcccaccaaaattaggcttcttttttttttgagacggagtttcgctcttgttgcccaggctggagtgcaatggcgccatcttggctcaccgcaacctccgcctcccaggttcaggcaattctcctgcctcagcctcccgagtagctggaattacaggcatgcaccaccacacctggctaattttgtatttttagtagagacggggtttctccatgttgaggctggtcaccaactcctgacctcaggtgatccgcccgcctcagcctcccaaagtggtgggattacaggcatgagccaccgcgcccggccccaaaattaggcttctaccctcccacagaaactgggagatatgggtgctgtctaccttgctgtttacatttcagttccttgaggaagatattcctaggtcataaagctgacaaaaggcctatctagtgttgaaaagatttacgcagatttcaaatagagaagaaaacagttacaatggcaagttttcaaaagtaaatgctcaaagaaaaaggaggggaggaaaatctcttattttcaactgggagactaaaacctagtatctttaatttgtatttgtccttagaatctacttcctgcttgatgttctaaattccaaaaatccatggcggggacgggggggcgggtggcatgtcactaggccaaaaagctatttgacaaaatcattcagagtataggtactgtagtgtgtatgactcttgtagaaagaactgcttcctctccaacttctaatagatccctacactcttactatctctccctggacttttctgaatctcttttgaatccatgcattaactgtcacactagccacatttgttacaacattttggaaatcgatgagaggggaacaaagttctgaggactgaaaaattagtctatcctctaagtggggatgataagactcagagaaggcaatttaccaaagatcaggtacctgggctctttccccagttgcagccccttggtttttatcactttaaaaaaaatattgcggccgggcgctgtggctcaagcctgtaatcccagcactttgggagaccgaggcgggcggatcacgaggtcaggagatcgagaccatcctggctaacatggtgaaaccccgtctctacaaaaataaaaaaaaattagccaggcgtggtggcggaggcctgtagtcccagctactcaggaggctgaagcaggagaatgacgtgaacccgggaggtggagcttgcagtgagccgagatcgcgccactgcactccagcctgggcgacagagcaagactctgtctcaaaaaaaaaaaaaagttttttttgtattttttgtttgtttgtttttcgagatgatgagggtctcactctgttgcccaggctggagtacagaggcaagatcattgcttactgcaacctctgcctcccaggctcaagtgatcctcccattcagccccccaagtagctgggactacaggcgactgccaccacacccagctaattttaaaattatttgtagagacaaggtttcaccattttgcccaggctggtcttgaactcctaggctcaagccatctgcctcggcctcccaaagtgctggaattacaggggtgagccactgcgcccggtttttatcattcttataataattattgttatcatttgacaaataaaaaaatttatgacgcagcctcaggtggtcctgacatgtggccccggtttttatcattcttaacaataggtaatgttcattgagtccttattgtgtgtcagtattttatttatcttattttattcttcttgagacgttgtctcgctccgtcccccaggctggagtgcagtggcgcgatctcgactcactgcaacctccgcctcctgggaggcaacatagttagacccccatctctacttcaacctgggggacagagtgagaccctgtctcaaaaaaataaaaataaaaaataacaaaaataataataataaagtgtctgctcttggattatacacctacagagtaataatgttgcagtttggacgcacatttgtcctactttaaatgaccaccctgcaaactaaaagtagtaccatgaacaaaattcactcataatcccacggcccaagcgacaggcttaagtgaggaaggccctgtgtagtcttcctggaaatcttggtccacacaccagccctgcagccaaagcgggtcagttctgcaggtccctgccccaggtgcgcagctgcactacgcggcctccggcccgcccgggagaaacaggccctgcccgccgctgcgccgcagccaatagcgcgggtgcgtttggtggcggcccatgcttggctgcgctctctgattgggcgcctccgggggcggggccaagcccaagcctggcgcgcagagtgcaccttcctgagctcgagcggtccagcgccaagttcggggtttggggttggagcggctggtcacgtggctggcccgcggcggtgcgcggggcgttgggtcagcgggtctgggactggtggcaccggcggcggcgtaggacggaggcgtcgctaggtacgtgcgcgggccgtgttccggtaggtgggcggcttcgggtccgagggccgcggcgtcccagagcccggggggtgcttcggcgtcctcgctgtcccccgccgtaccccaccctctgyagccgcaatgacgggaggggagcgcttgggtcgcgcctgggctggggatcgggcggcggccagccgcagcgccccagttccaggcacattcggtatgatggggtggcggcccgtggcctttggcaagaatgcgaaggcttatcggggatgtgagtagtagctctccactgaacacttttctcgttgagcattttcgatttaaacaatcctagctccttcacaacaaagctgcaagtcaagtgctactgtttcccccattttacaggtgaggaaggtggtggggccctgagaaaggaggcaacttaaatggcagagcccggaatagaacccgggttctcaaagcctgcgcccctaaaggctgcgcgcagggtcgctccacttttggcccgtgccaccagatccctgtggggaatgagctcttcctgttgcccgcaatctgccaccccctgttctaggagacaaatgttgcactgtgaagttcttggcccggtgccttggcttcgagattccgggagttaagtgacccttggtccagctgaggtcagcacagatgcgggccttcaatcgggcagttacccagagaatagactggaaacaccagtttaggttcttgcagaaataacattgtaggccgggcgcggtggctcatgcctgtaatcccagcattttgggaggccgaggtgggcggatcacttgaggttagtagttggagaccagcctggccaacatggtgaaaccccgtctgtactaaaaatacaaaaaaacctggctgcccatggtggcacacacctataatcccagctactcggaaggctgaggcaggagaatcgcttgaacccgggaggtggaggttgcagtgagcggagatcacgccactgcactccagcctgagtgacagagtgagactctatctcaaaagaaagaaagagagagaaagaaaagaaaaaaaagaaaagaaataacgtaaatttattacttgggggaacttggaacggaagtgggtaattgtgtttttatttagtgcaatgtcctgggacaaggccttggaactgaagagaaaccattgttcagattctggctcttatatggctttagacaarttagctccctgggcctcaatttcctcttctgtaaagaagagaacacaaaatgtgtgtgagatagaagatgtgcaacaagttagttccctgagcagatccttggctggatcctcttatgtgacagaggcccaggtaagatttggaggcatggggaggctggtgaccttgcaggtgacttcacttactaggtctttttccctgaygttgaggatcatgccacacatgagcaacagtgcctctacagaaatatccaatgttgtaatgactgatgttgcagtgagctgtgttggctgggggacttaccaggtattactgaatgttaatgaagatgtccctaagattcccaattttctttttttttttttttgagacggagtctcactctgttgcccaggccggagagcagtggcgcgatctcggctcactgcaagctccgcctcccgggttcacgccattctcctgcctcagcctcctgagtagctgggactacaggcgccgccaccacgcccagctaatttttttttatttttgtagagacggggtttcaccatgttagccaggatggtctcgatctcctgacctcgtgatctgcccgcctcggcctcccaaagtgctgggattacagatgtgagccactgcacccagcccccttttttcttttttgtttttttttttgaaacggagtctagctctgtcacccaggctggagtgcagtggcatgatctcggtccactgcaatctctacctcactggttcaagctattctcctggtctcagcctgctgagtagctgggattacaggcatatgccaccatgcctggctaatttttgtttttktttttttttttttttttgagacagagtcttgctctgttgtccaggctggagtgcggtggcacgatctcagctcactgcaacctcctgggttcaagcgattatcttgcctcagcctcctgagtagctggggttacaggtgcgcaccacacacccagctcatttttgtatttttagtagagayggagttttaccgtgttggtcaggctggtctcgaactcctgacctggggtgatgcacccgccttggcctcccaaagtgcttggattacaggaattgagccactgcgcccagctaatttttgtatttttagtagagatggggtttcaccatattggccaggctggtctcaaactcctgacctcaagtgatccacccacctcggcctcccaaagtgctgggattacaggcgtcagccaccgcgcctgacsgcttttttttctttctttagagagacggggtctccctatgttgcccagggtggtcttgactcttgtggtcctgtgactccccagacttcaggtgtgcaagcctgatttctgacccttggccagtcacactttctcctttgtctggcctttgaacttggggtgctctgcacttgtttactctgcgtagattgctctcatcccagatttcatggttggctcctttccacagctcagatttcagctcsgggacgttccctgacccagtctaaagtagccttgcacccatttattgcatctttctttcttttcttttcttttttttttttttgagacagggtcttgttctcttggccaggctggagtgctgtgggaaaatctgggctcactgcagcctcaacctccgggactcaagtgatcatcctgcctcagccacccagagtagctgagaatacaggcgtgcgccaccaggctcgggtaattttttgtatttttttttagagacagggttttgccatgttgcctaggctggtcttgaacgcctgggctcaagtgatcttctcgtctcagcctctcagagttctgggattacaagtgtaagcaaccatgcctggccttgtgtatttctttttgkttttttttgtgatggagtcttgctctgtcacccaggctggagtgcaatggtatgatctcggctcactgcaacctccacctcctgggttcaagcgattttcctacctcagcctcccgcatagctggtattacaggggcccaccactatgcccatctaatttttgtattttttagtagagacggggtttcgctgtgttggccaggctggtctcgaactcctgacctcaggtgatccgcccgccttggcctcccaaagtgctggggttacaggtgtgagccactgtgcctggccaaataatttttttttttttttaagatagagtcttgctttgttgccaggctgcggtgcagtggtgtgatctctgctcactacagtctccgcctcctgggttcaagccattcttctgcctcagcctcctgagtagctggaattacaggcgggcgccaccacacccagctaattttagtatttttagtggagatggggtttcaccatgttggccaggacagtcttgatttcctgacctygtggtctgcccgccttggcctcccaaagtgctgggattacaggcgtgaaccactgcacctggcctttttttttttattgagacacagtctcactctgtcacccagactggagtgcagtggcacaatctcggctcactgcagcctccacctctgaggctcaagtaagtctcatgcctcaggtgtgtgccaccacacccaattaattttttatatttttgctatagacagggtttcaccatgttagccaggctggtctcaaactcctggcctcaagttgatctgcccacctcagccttccaaagtgctgggattasagatgtgagccaccttgcccagcctaatttctaaatttttgtagagacgtggtttcactgtgttgcctaggctgtggttgaactcctaggctcaaaggatcctcctgccttgactcccctaagtgctgggattacaggcatragcmaccataccaggcccttttttttttttcccctggagacrgagtcttgctttgtcacccaggctagagtgcagtggtgtgatctcggctcactacaacttccgcctcccgggttcaagcgattctcctgcctcagcctcccaagtagctggggttacaggtgcctgccaccacacctgggtaatttttgtatttttagtcatgttggccaggctggtctcgaacttatgacctcatgatccgcacgccttggcctcccaaagtgctgggattacaggcatgagccactgggcccagcccaacctgtaattctttaggaagatttatattcaaacaagtcctttttttatttaaaagaaaaaaacacacacacacagggtcttactctgtcacccaggctggaatgcactgccacaatcacggctcattgcaacctctagcttccaggctcaggtgatcctcccacctcagcctcctgaatagctgggactacagatgcatgccaccacgaccagctaataatttgtattttttgtagaaatggggctttgccatgttgcccaggccagtcttgaactcctgggctcaagtgatcctcctgcctcagcctcccaaagtgctggaattacaggcatgaaccaccacacccagcccaagtacatattttaactaacagcttcacaggaactctgtggattacttagagcatgtgctttggggtttcgagtcctgcctctgtggctaactttctgtgcagccctgggctaagatattttacttttctttgagacagagtctcgctctgttgccagcctggagtgcagtggtgatcttggctcactgcaacctctgactcccaggttcaagtgattctcctgcctcagcctcccgagtagctgggattacaggcgtgagccactacgcccggctaatttttgtatttttagtagagatggggtttcaccgtgtaggccaggatggtctcgatctcctgacctcctgatccgcccacctcggcctcccaaagtactgggattacaggcatgagccactgcgcccagccacaatatttcacttttctaacgtcgtttttctttctttagttcttttttttttttttttaagagtcctagcccaggctgggcgcggtggctcacacctgtaatcccagcactttgggaggccgagaccatcctggctaaccggtgaaaccccatctctactgaaaaaataaaaaaaaaattagccaggcatggtggtgggtgcctgtgttcctggctacttgggaggctgaggcaggagaatggcatgaacccgggaggtggagcttgcagtgagccgagatcgcgccactgtactccagcctgggcgacagagtgagactctgtctcaaaaaaaaaaaaaaaaagagtcctagctcagtaggtaggactataggcccatcccaccatgcccagctaacttttttttttgtagcaatgcccaggctggtcttgaactcctggcctcccaaagtgctggggttacaggtgtgagttgccatgcctggccctgagcctcaatttcattacttgaagtatgaaataaattaacacattaaagtgttgctaggattaaaatgaggtccttatgtattcaaaaatcgtacagagatttttgaggcccttcttatagcaaaactcccatttacatttttctggagcctggagaaatgtgtccagactgagtgaataggtgctatttgctgtacttacattatcatttataaaatactactggtggtcatcctggaaagatgatcccaactgcctatatcctgttcatcattaacttgtgtgtcccaaaaaatcttttgaaaagttgctaaatagtgaatatttactattttatgagggcctgccagttccctgccagtggaattgtttcaagtcaatgattcatctgttcagtcatttggaaaatactctttttttttttttgaggtggagtcttgctctatggccaggctggagtgcagtggtgtgatctcggctcactgcaagctctgcctcccagattcaagagattctcctgcctcagcctcccgagtagctgggactacaggcatgtgccacaacgtccagctcattttttgtatttttagtagagatggggtttcaccaggttggccaggatggtctccaactccagatcttgtgatctgcccacctcggcctcccaaagtgctgggattgcaggcgtgagccaccgtgcccggccggaaaatattcttcatgtatagcagtgttgggtaccgcaggagattttttaaaaagtagcactcagtccttaccttcaaggaacttagtttagttgtgggagataagctatatccatgagaagtttggctgagaggaggcggagttgggctccctgcaggtggggaggagggtcagttctcatttctgagggagatgagctgacgtctgcagtttggaaaggaaccagaagttccacatggtggttttgcaatagaacatgctcgtgtttaccaagcaattctgagggaaaggctaaaaaaagtgttagtttatcaacttgatagaactaacaggtttcgatgagctttgattcaatataatgctgcggccaggcatggtggctcacgcctgtaatcccagcactttgggaggccgaggcaggcggatcacttgagaggagttcaagaccagcctgaccaacgtgataaaactccatctctacgaaaaatacacaaattagccaggcgtagtggcgcacgcctgtagtcccagctactcaggaggctgaggcaggagaatcacttgaacccaggaggcggaggttgcagtgagccaagatcacgccattgcctgggtgacagagtgagagtcttgtctcaaaaaaataaaaataaataggtggggcgcggtggctgacacctgtaatcccagcactttgggaagccaacgtgggcggatgacaaggtcaggagattgagaccatcctggctaacacagtgaaacctcgtctctactaaaaatacaaaaaattagccgggcatggtggcatgcgcctgtagtcagaagattgaggcaggagaatctcttgaacctgggagacggaggttgcagtgagccgagatcatgccactgcactctagcctgggcaacaaagactacatctcaaaaataaataaaaaataaataaaataaataaatttaattctggaagctacacatgtttttcccatttttttaggcagcttcgaaccagtgcaatgacgatgccagtcaacggggcccacaaggatgctgacctgtggtcctcacatgacaagatgctggcacaacccctcaaagacagtgatgttgaggtgagatttttggggtcttcacagatttttttatgttggaggccttcatttaatctttagttctaattacaaattaattagggacagccttgaaatgagtattatcctgctggatttagaggtggtggcagacaaaatggctacaaatcctttgagggtaaatttaaagattgctgggtttcttcaaagtgtggagcactgtgcagggtgctctggagaaaagcgagaaggggagagatcactgacagttgaccctttcctgacagttcacagggaatatagatctatctagacatctgaaagcacctttattttattttattttacttgtttatttatttttttgagacagagtttcactcttgttgcccaggctggagtgcaatggcgtgatcttggctcactgcaacctccacctcctgggttcaagggattctccagcctcagcctcctgactagctgggattgcaggcacccaccaccatgcccggctaatttttttttttttttttttttgagacagagtcttgctctgtcgcccaggctggagtgcagtggcgtgatctcagctcactgcaagttccacctcctgggttcatgccattctcctgcctcagcctcctgagtagctgggactacaggtgcctgccaccacacccggctaattttttgtattttttagtagaggtggggtttcaccatgttagccaggatggtctcgatctcctgacctcgtgatccgcccacctcagcctcccaaagtgctgggattacaggcgtgagccaccgcacccggcctttttttttttttttttttttgagatatagtcttgctctgttgctcaggctggagtgcagtgacgcgatctcagctcactgcaagctccatctcccgggttcacgccattctcctgccttagcctcccgagtagctgggactacaggtgccagccaccacgccctggctaattttttgtattttttttttttttttagtagagacgggatttcactgtgttagccaggatgatcttgatctcctgacctcgtgatccacctgtctcggcctcccaaagtgctgggattacaggcgtgagccaccacgcccggcctaaagcatcttttcttttaaggaagaagaacaaggaataaggttcagggagggagaaacttggtgaaatgtaggaataaaaataacaggatggtggtgttaaaaattaggtgggacacttaaagataactttctcttcaatcattttgtttttctttttctgagatgaagtctcgctcttgtttcccaggctggagtgcgatggcgcgatctcggctcactgaatcctccacctcccaggttcaagcgattctcctgcctyggccccccgagtagctgagattataggcgcctgccaccacacccatctaagttttgtttttttgtttgtttgtttttgagacagagttttgttcttgtcgcccaggctggagtgcaatggcgtgatctcggctcactgcaacctccgcctcccgggttcaagygattctcctgcctcagcctcccgagtagctgggattacaggcatgtgccaccaygcccggctaattttgtattttttagtagagacgagggtttctccatgttagtcaggctggtctcgaacccccgacctcaggtgatctgcccatctcggcctcccaaagtgctgggattacaggcgtgagccaccacgcccagccaagttttgtatttttagtagagatggagtttcaccatattggccaggctggtctagaactcctgacctcaggtgatccaccagcctcggcctcccaaagtgctgggattacagtcgtgagccaccgcacctggctatcattttgtttttgttaattcattgattagtgctttctcagatactaaaacctttgaggaggattcattctattccataatgtgaaagagtgtcttttctctttaggaggttgtaatttggatcagagcaaaattttaaactaaaatttccaaatatcaagcatctgttttcttctcataaggtttacaacatcattaagaaggagagtaaccggcagagggttggattggagctgattgcctcggagaatttcgccagccgagcagttttggaggccctaggctcttgcttaaataacaaatactctgaggggtacccgggccagaggtatgtraatatcttcaaaggcctggttctgacacagtcatagggagtactcagtcagcctaggacctaaacaatttggaaatttcagaaaacaataagcttcccagctgtaggatttctgttccacgcctgctctctgacagaactcttttattcccagcatgtgataacactgaagagctcagcgcaggtgtactcaggggcacatttcacagttctttgggggctttctagaaaaacaggccagtttgtaaggagtattgagccactggactggtgtgtggcctctgtctagaaaaggtcagtgtcatctgagggatgctgcagaaggtggccgttgccatgtgagtcatcgagtctgtattgggaatggtgtggaagtggaggctgaatctggattactgaaaaccgtttctgcattataaatgttggatttacacatgcagtggctttcagttgactctttcaccctcagaattacagtgttatattcgtttttgttttttacagtcatcatcaggcaaagaaaataaattacagaattagacatggcttttgcaaatgtgtgcatttttgtcccaaaggaaacagaaaggtcacccttggagaaggaattgccattctgtcctgagatgcccctgaagctctatgtagaagactgagaatcaagttgaaggcattgtctttctcctattgtgaataactaacttttgcattgtgccttaaagaattcaccaggtgttttctttatttctctctctcctttctttttctttttccttcctttctttcttctttcaggctaaggtattttgttaacaccaggtgttttctttttttttttcttcttttttgagacatggtctttctctcacccaggctgaagtgcagtggtgtgatcaaggttcactgcagccttggtctcctggacccaagccatcctcccacctcagcctactgagtcgctgggactacaggcacacaccaccacacccagctaattttttgtagagacagagtttcacccaggctgttgttgcccaggctgatctccatctcctgagctcaagcaatccacctgccttggcctcccagagtgcttaggattagagctgtgagccactgcacccggtccacaccaggtgttttcaaaactaatatttcattcgattctcacagcaatgtatcgagcaaggggtgatgttttctacatttttaagaagggggaccgggcgcggtggctcacgcctgtaatcccagcactttgggaggcccaggcgggcggatcacgaggtcaggagatcgagaccatcctggctaacacggtgaaaccccgtctctactaaaaatacaaaaaattagcctggcaaggtggcgggcgcctgtagtcccagctacgtgggaggctgatgcaggagaatggcgtgaaccccagggggcagagcttgcagtgagccgagatcgcgccactgcactctagcctgggcgatagcgagcctccgtctcaaaaaaaaaaaaaaagaaggggactgagtgtagtggctcacccctgtaatcccagtgctttaagaggccagggcagaggatcatttgaggctaggaatttgagaccagcctgggcaatatagtgagacgctgtctccaaaacaaaatttaaaaattagccggacatggtggcatgcgcctgtagtctcagctactcaagaaactgaggtggagtatcgcttgagcccaggagatcaaaggctgcagtgagctatgattttgccaatgcactccagctggggtgacagaatgagaccctgtttctaaatttaaaaaaaaccccgaaaaaccacaacttaaatagaagtgtaattacatcgtttattcatgttaaagggcttgttgttttttttttacacggagtatcgctctgtcacgaggctggagtgcagtggcacaatctcggctcactgcagcctccacctcccaggttcaagcgattctcttgcctcagcctcccaagtagctgggactataggcacgtgccaccacacccgactaacttatttatttatttattttttgtatttttagtagagacggggtttcaccgtgttagccaggctggtctcgatctcctgacctcatgatccgcctgcctctgtctcccaaagtgttgggattacaggcgtgagccactgtgcccagccaattaaagggctcttttaaaaggtaattattggctgggcgtggtggctcatgcctgtaattccagcactttaggaggccgagctgggtggatcatgaggtcaggagatcgagaccatcctggctaatacggtgtaaaccccatctctactaaaaaaaaatacaaaaaaattagccaggtgtggtggctggcgcctgtagtcccagctactcgggaggctaaggcaggagaatggtgtgaacctgggaggtggagtttgcagtgagccgagatcgcgccactgcactccagcctgggtgacagtgagattccgtctcaaaaaaataataaaaataaaaataaaaggtaattattacatgttttcattatattttgttaatataatttaatattaatctacctttggaacattatttaaaatcaaaggcaatatttgaaaacaataggcaaggcgtggtggttcacacctgtaatcccagcacttcgggaggctgaggcaggtggatcacctgaggtcaggagtttgagaccagcctggccaacatgtcgaaaccctgtctctactaaaaatacaaaaattagctgggtgtggaggtgcgtgcctgtaatcccagctactctggaggctgaggtaggagaatcgcttgaacttgggaggcggaggttgcagtgagccgagatcgcaccactgcactccagcctgggagacagagcaagactccatctcagaaaaaaaaaaaagaaaacagtgttgacctaacgttaatgactttgcttgatacaaacctaaaaacaaagttctgggtttaaaacaaaatgttatgtatgtgtgaataaatgaatgacaaggtctcgttgtcttgcccaggctggagtgcagtggtgcaatctcgtctcattgcagcctcaaactcttgggctcaagcaatcctcctgcctcagcctctctgtagctaggaccacaggtgcgtgccaccacaccaggctaatttttaatagacatgaggtcttgctgtgttgcccaggctggtttcaaactcctggcctcaagcagtcttcccacctgagccttccatattactaggattacaggtgtgaacaaccacatctggcctatttattttttatttatttatttatttattttgagacggagtctcactctgtcgcccaggctggagcgcagtggcacgatctcggctcactacaagctccacctcccgggttcacgccattctcctgcctcagcctcccgagtagctgggactacaggcgcccgccaccacacccggctaattttttatatattttttagtagagacggggtttcaccatgttagccaggatggtctccatctcctgacctcgtgatccgcccgcctcggcctccgaaagtgctgggattacaggcgtgagccaccgtgcccggcctattttttatctatttttatttttttgagacagagttttgctcttgttgcccagggtggagtgcaatggtacaatctcggctcaccgcaacctccgcctcccaggttcaagcaattctcctacctcagcctcctcaatagctgggaatacaggcgtgcaccaccacgcctggctaattttgtatttttaggagagatggggtttctccatgttggtcaggctggtctcgaactcctgacgtcaggtgatccgcccacttcggcctcccaaagtgctgagattacaaatgtgagccactacgccgggcccggcctatttattttttttagagttagggtctcactgtgttgctccagctgtagtgcagtggtacaatcaaagctcactgcaatctccaactcctgggttcaagtgatcctcccacctcagccttccaagtaactaggactataggtgcaagccactatacttagctcatttgtaaaattttttgtagagctgagatctcactatgttgcctagctggtcttgaactcctggcctcaagcagttctcccacctcagccttccaaatctctgagattacagacatgagccactgcatgtagttactttaaatttttttttgagactgagtcttgctgggatgcccaggctggagtgcagtggggcgatctcggctcactgcaacctccacctcctgggttcaagagattctcctgcctcagcctcccgagcagctgggattacagtcacccgccaccactcccggctaatttttgtatttttagtagagacggggtttcaccatattggccaggctggtctggaactcctgacctcaggtgatctgcccacctcggcctcccaaagtgctgggattacaggcgtgagccaccatgcccagcctaagcttgactactttagggacctcataaaagttgaatcatacagtgcttgtcttgtggtgactggtttgtttcacttagcataatgttctcaggctcatccctgttgtattaatagcatgtgataggatttctttccttttttttttctttttcttttcttttttttttttgagacagggtccaggctggagtccagtggcgtgatcacagctcactgcagcctttacctcctgggccaaagtgaatcttcccttctcagcctcccaagtagctgggactatgggcacacaccacaacacctggctaattttttgaaattttttgtagagatggggatattgctgtattgcccaggctggtctcgaactcctgggctcaagcaatcctcctgccttggctcctcaaagtgctgggattataggtataagccacctctcccagccaaaaccccctctttttatagatgagatatttgctccaagttgcacagctggtttggtctcttgactgtagattccagaggcattggtggaacacttgatcatgctggcttcagcatctgcatgttaacaagctcttctcattacttctctccactttagtttcactgtcccacccctaagcttctttggcctctgtgaagcacagactttctgggtctgagtggatctaagtctcctgctcttctcccacagatactatggcgggactgagtttattgatgaactggagaccctctgtcagaagcgagccctgcaggcctataagctggacccacagtgctggggggtcaacgtccagccctactcaggtgcttgtctcatccatatggcctggtgcagcctcttcatgtgcatcccccagggccgacatgcaccaagaagagtcctaagatggactgccatggactgccataggccgggcccagtggctcacgcctgtaatcccagcactttgggaggcggaggcaggcagaccacctgaggccggcagttcaagaccagcctgaccaacatggagaaacccggtctccactaaaaatacaaaaattagctgggtgtagtggcacatgcctgtaatcccagctactcggagcctgaggcaggagaattgcttgaacctgggaggcggaggttgcagtgagctgccgagatggcgccattgcattccagcctgggcaacaagagcgaaactcsatctcaaaaaaaaaaaaaaaaaaaactgccataaataaaagataagtcacgcatccctctgcattacccttgggctcccagctctataccccctcccaggcagtgccctctctctgaacttcacctctcaaggctggtggtgaaggggcacctcctggagctcagggaaggtacaaggcctgttctcgccactcctgggtgaaggcttagtggccaaggtcccggatgccacttggtacctcagttagaaataatcatgtctcctctggtccactcgtttcaggctcccctgcaaactttgctgtgtacactgccctggtggaaccccatgggcgcatcatgggcctggaccttccggatgggggccacctgacccatgggttcatgacagacaagaagaaaatctctgccacgtccatcttctttgaatctatgccctacaaggtaagcatgtgtttctctcctagcttttatttccttgggaaacctctgatgcttggctgtgcctgcaggggtaagtttggtttatgtgtcactacaggaagtccccacctcgcaccgtttttaatttccttgcagcggggactcctcaggttttcaggacccgctggggcagctgggatggagagacgagggtctgagctgaggccacagggaaaccagtgagggaggcaactactgaggagagttcagatgtggcaggggcagtggcaactgcttggaatarcaaccctggggaatagcaaccaggtcactacagttggaccccagcaacagccaccacctctgcagctctgccctcgcctggtgacatctctgctcggagcccctgtgggccagcagcagcacaaggatgcagtagctacaggcatggcaacgtccccagctccagcaccaaaaccagcagcccggcaccatccacagccacagtcctccatggccacgttagggctagcccctgcctgtgtatagtggctacagaggaacagacagtggtttgacttagggcgttcaactttaggatagtgcaaaagtgacatgcgttattagctgtacttcaagccccccatacgaccattctgcttttcagtttcagtacagtattcagtagattacatgagatagtcaacaccgtattataaaataaggtttgtgtttgactatcttgcccagtggagggtaccacagtgtcctcagcatgtttaaggtaggccagactaggttgtgatgtttggtaggttaggtatattacatgcatttttgactttatgatattttcagcttaatgatgagcttattggaatgtaaccccataagttgaggagcacctgtatggctcaggtgtacaccccattgccattgccaccccactgcacatacctgataacgcagccagcccagcagtggaaccaacaccatcagaaccagtgccaagtgctgcctctagggtgtgcagggccccaggcaaatacttgtttttcgtgggacccgtctgtataaacagttgggtcaaaaaatgcctgtaagatgtgtgggcttattcaggcatggtgatttatctataaaaacgaaggataatgggaagaagaggtaacttgctttttcttttagtgtccagtgttggtgattctttctagtgtcccggaaccatcttttcatgttctttattaataaatgtgccattcctgcttagtttcatgtttgttaccatgaaaaaaggtagcactgcatccttctgcttggctggcattgcatggtcttgggtgcatgctgtccatggttctgtgtgtactcagcctttgtctcagtgctggtgattgcacgtgtgctcttttttgcagtcatttcttttcacagaacacctaggtgtttgcagtcacagatctcctcattggccaaggccagccttgaagctagattttgaaacatgtcacaatagtaacaaaatagtttgtcttggctgggctcggtggctcacacctgtaatcacagcactttgggaagctgaggtgggcagatcacctgaggtcaggagttcgagaccagcctggccaacatgttcaaaccctgtctctactaaaaatacaaaaaattcctcaggtgtggtggtgcacacccgtagttccagctactcaggaggctgaggagggataattgcttgaacctgggaggcggaggttgcagtgagccaagattgctccattgcactccagagtgggcgacaagagtgaaactccatctcaaaaaaaataaataaataagaaaggcagggtgcagttgctcacgcttgtaatcccagcactttgggaggctgaggcaggcggatcatgaggtcaggagttcaagaccagcctggccaacacagtgaaaccccgtctctactaaaaatacatggtggtgcactcctgtaatcccagcactttgggaggtcgaagtgggcggatcatccgaggtcaggagttcgagaccagcctggccaacatggtgaaagccttctctactaaaaatacagaaattaactggacgtggtggcgggcacctgtaatcccagctactcaggaggctgaggcaggagaaccacttgaacctgggaggcggaggttgcagtgagccaagattgcaccagtgcactccagcctaggtgacagagcaagactccatctccagaaaaaaaaagaaagaatctgcgtcccgcacccagttccctccagccacccccgtctttgatgtacattgtgcaggctgcagtcctgtgggtgcagtgaggggacccacctcaggatgggcatggagaggtggggcctgggaccctggccagcttgggcagcaggaggtgcagctcacccgctgtgggggtgatttgagtcctgcccttggcggacaggaggaggagacagaccttattggcattcatcagcagccagaggcagctcacctccaccccaccgggctgcagagttggaggttagggggtgtcccagggccactgccctgcccagccttcaccagaccgcctgcctccaccttcagcccctgccccactccactgcaagagccccacgcagggccaggctagagcaacagcaacattaaccttctattttgtgtttttggcccatccccactgtgactcgagaattcctccctgtccctggtcctaagtgactgctggggtctccttccttatcctctgtgcactgtggaccccatctgcagtttattataaatgcctatgaattcttctaggagttgttctcttgtctcattttcaagattaaaaaaagaaaagaaaaacctttgaaaaacccattaaattaaaaagggagaaagcagcacaggcttttttttttttttttttttttccggtaattgtggctacacaaaaaattttagaattatgtccattttttttaaatctttttttttttcctttttgtggagaacaagatctcactatgttgcccaggcgggtctcaaactcctggactcaagctatcctactgcctctgtctccctaagagctgggattacaggcgtgagccaccatgcccggtgaattacgtccatttttactggaggtcagctgttgatatttcatttcataaaacggtttctttgccaaattcaggtgactgagaaagaaccacacccctgaagcaaaacacagcaaacaaaaccacaaatcatctttcagcttgactttctagatgaggtcttggttcccgaaaccttgtggcaagcttctatagttgggttggattataactgcctttttttatttggaaagagtgaccaccaatcctgaaacctttcactccagatgtgctggtagtttctgagggggacaccaaggtaagaggaaggaaggttgggtcagggccttcagaacagrgagcctctctgcacatctcctcttccctgaggcttctcagatcccagagcccagtttttcctgtggtgcgctctatgctctgctggttatgtgtgcttacccatgactttttttttttttttttttttaagacagtatctggctctgcctcccaggctggagtgcagtggctctgtctcggctcactgcaacctctgcctcctgggctcaagcgatctttcctcttcagcctcccaagtagctgggactagaggcgcatgccaccatgcctggctaatttttgtattttttgtggagacaaggttttgccatgttgcccaggctggtcttgaactcctgggctcaagtgatctgtccaactcagcctcccaaagtgctggtattacaggcatgagccaccgcatccggctgacccytttttttttttttttttttttttgagacaaagtttccctcttgtcgcccaggctggagtgcagtggcacgatctcagcttactgcaacctctgcctcccgggtttaagcgattctcctccctcagcttcctgaatcgctaggactgcaggtgtgtaccaccatgcctggctaattttgtgtttttagtagaggtggggtttcaccatgttggctaggctggtctcaaactcctgacctcaggtgatctgaccccctcggcctcccaaagtgctgagattacagatgtgagccaccacgcctggctgacccatatgtttatagaagtttaataaaatgaacttcctaagagatgtgttgccagaaaagaaaaattattttaaattttacatcgagatctacaatctgtttggaattgacttttttttttaaacaaattatatataattatgggatgcacagtgatgttatgatttgtatatacagtgtggaactattgaatcaagttaactaacatatcccactccttaaatatttattatttttcttcctgtctaactgcaactttgtaccctttgctcagtatctctccattgtctgccaccctccagtgactggtaaccacattctaccctgcttctgtgagtttgattgttttatttatttatttatttattcaattttaattttttttttttgagacagagtctcactttgtcgcccaggctggagtgcagtggcaccatcttgactcactgcaacctccgcctcctgggttcaagtgattctcctgcctcagcctcccgaatagctgggattacaggcatacgccaccacgcctggctaatttgtgaatgtttagtagagacggggtttcaccatgttggccaggctggtctcaaactcctgtcctcaggtggtccacctgcctcggcctcccaaagtgctggaactgcaggcataagccaccacgcccagcagttcgattgttttagatttcacatagaagtaagatcacatggccaggtgcggtggctcacacctataatctcagcactttgggaggtcgaggtaggaggctcacttgagtccaggagttcgagaccagcctgggcaacatggtgaaaccccatctctacaaaaatataagaattagccgggtgtggtggcactgcctgtggtcccagctattcagcaggctgagtgggagaatcgcttgagcctgggaggtagaggttgcaatgagccgagatggcaccaccgcactccagcctgggtgacagagtgagactctgtctcaaaaaagaagtgagatcatgcagtatttgtctgtctgagcctggcgtatttcacttagcataaggtcctccaagttcatcggtgttgttgcaaatgacagaatttcttttttcagactgattattattacattgtttatatatatatgtgtcacatttcctttgtccattcatctgttgatggacatggctttattccataacttggctattgtgaatagtgctgcagtgaacatgggagtgcacatgtctctttgacatactgatttcaagttcttaagatatagattcacaagtgggattgctgaatatggaattgatttgtgtgggtgaggcgggcatccagataacatttttgtccaaatggatgcccagttgacctagtgccattgattgaaaaggtcatcctctccccactgcactgcagcgtcaccactggcatggatccaatgacctgtgttgtgtgtggttctgcttctggttaagccagatgctctgcccttccatgaatgcgtgctgccttaattactataatttgtcaagcattttgtgacacaaaatacacaacgcaatgatgttttgtgtaaaggtttggtatgattttccttttatggtttttgttatttacatttcattttctatctttcttgcttttatatactttttggctttttttttttttttttttcagatggagtctcgctctgttgcccaggctggagtgctggagtgcagtggcacaatctcggctcactgcaagctccacctcccgggttcacgccattctcctgcctcagcctcccaagtagctgggattacaggcgcccgccaccatrtctggctaattttttgcatttttagtagagacggggtttcaccrtgttagccrggatggtctcgatctcctgacctcatgatctgcccgtctcagcctcccaaagtgctgggattacaggtgtgagccaccgcgcccagcccctacttcttgtttttcaatgttgtatccagtgaccttgctaaatttgcttattctaacrgttggcccctagcatcttgattttctaggtatattgtgttgtctgtgtgtaatgtcagtttttaaatttcttctttcctaatcgttatgccttttgtttctttttcttgcctcattatacttggaatagaagtagtattagcaggcattttggtcttgttcctgaaggtaaccattttggtttccattgtgtggtcccgtcacatttgtttcattctgcaggtgctttttggttccttctcagcaggtagtgccccagcagcagggctcactacaaccctgggactcctcagggactcctgggtctgtgagccatacttggttgagcaggctgaacacaccagtatccatcctgtctcaccctcaagtcctcatctaggacatcattcctcttgtcatggtgggtggagccagttcaagtgggaggacaggaggcaggtgtggttggaggaagcagcctgaacctgcctccctgacattccacaggtgaacccagatactggctacatcaactatgaccagctggaggagaacgcacgcctcttccacccgaagctgatcatcgcaggtgatgcgcggggcggaaagtcaccttgttcaccagtagcctggtgcctcttacagaatgaggatggaaagatgttcgcaccctgttgagcccactgctagtttctgccctggataactgagtttctggggtctacatatattagtttctttcaggatacagatgtgtgtttrytgctttttgtgctatgtagattaagatgtgagactgttctcagagaagcatctagaaatgtcaggccctgactgcgctggcaatagtagttggggccatctcaaccaccaagacgttgaagagttagagtggttgcctttagcacagaggtgctttttgagggcattctccatttttgctctgagactttaagggaagaaatctctgggctttcagatctgcacatctagaggccactgtgaagccaactcagctggccggtggacatctctgatgcagctgtgtcacctttcctgtctcaggaaccagctgctactcccgaaacctggaatatgcccggctacggaagattgcagatgagaacggggcgtatctcatggcggacatggctcacatcagcgggctggtggcggctggcgtggtgccctccccatttgaacactgccatgtggtgaccaccaccactcacaagaccctgcgaggctgccgagctggcatgatcttctacaggaaaggtgagctcccgaatgttgggtacagatgggtaccatggtttacatttctcctgtgggggttcagattcagttgagggagctgggaaaaactctgacctgggatccttggaaaatattaagatcccagtcccttaaagagctgcttaggaaggagcagtgacaggctttacagaaaggattcccggccaggtgaggtggctcgcgcctgtaatcccagcactttgggaggccgaagcgggcagatcacgaggtcaggagatcaagaccatcctggctaacacggtgaaaccccgtytctactaaaaacacgaaaaattagccgagtgtggtggtgggcacctgtagtcccagctactcaggaggcgaaggcaggagaatggcgtgagcctgggaggtggagcttgcagtgagctgagattgtgccactgtactccagcctgggcgacagagcgagatgccrtctcaaaaaaaaaaaaagaaagaaagaaaggaatccccagaaggagactgtcagccacagctcctgcttcacttttgtgcatccaggtcctaggaacataggagggggatcagcaaccactatgtgttaggatggcgccggttgctgaactcgagaggcaggtgtttgaatgaaaggagggtgcatggctggctgggggccactgggaggcctcacaaggctgcattattctggtgaacttacagtgatccatcatgtttctcaaagagaaagactcatagtagtcaaactagaagacatggatgtataaacattaatatcattttagtgaaggtttttctttccattacctcataacctacccctaggcactccccttattttcgaattcccatacctgggaaagcctgttagtggtcaggtcatcatttagcctgtggtgagacctgatgcgccaactttgcatcagcagagacaccagccctctggtgactacattactcttttttttttttttttttttttttttttttagtatttattgatcattcttgggtgtttctcgtggagggggatttggcagggtcataggacaatagtggagggaaggtcagcagataaacaagtgaacaagggtctctggttttcctaggcagaggaccctgcggctttccgcagtgtttgtgtccctgggtacttgagattagggagtggtgatgactcttaatgagcatgccgccttcaagcatctgtttaacaaagcacatcttgcaccacccttaatccatttaaccctgagtggacacagcacatgtktcagagagcacggggttgggggtaaggttatagattaacagaagaatttttcttagtacagaacaaaatggaatctcctatgtctacttctttctacacagacacagcaacaatctgatttctctatcttttccccacatttcccccttttctattcgacaaaaccgccatcgtcatcatggcctgttctcaatgagctgttgggtacacctcccagacggggtggcggctgggcagaggggctcctcacttcccagaaggggcggccgggcagaggggctcctcacttcccagaaggggcggccgggcagaggcgcccccccacctcctggaaggggtgacggccaggcgggggctgccccccacctccctcccggacggggcggctggctgggcgggggctgcccccaacctgccggacagggcagctgccgggcagagaygctcctcacttcccagacggggcgactgccaggcggaggggctcctcacttctcagatggggcagccgggcagagaccctcctcacctcccagacggggttgcagcygggcagaggtgctcctcacatcccagacggggcggcggggcagaggcgctccccacatctcagatgatgggcggccgggcagagacgctcctcacttcctagacgggatggcggccgggaagaggcgctcctcacttcccagactgggcagccaggcagaggggctcctcacatccsagatgatgrgcggccaggcagagacgctcctcacttcccagacggggtggcggccaggcagaggctgcaatctcggcactttgggaggccaaggcaggcggctgggaggtggaggttgtagcgagccgagatcacaccactgcactccagcctgggcaacattgagcactgagtgaacgagactccgtctgcaatcccggcacctcgggaggccgaggctggcagatgactcgcggttaggagctggagaccagcccggccaacacagcaaaaccccgtctccaccaaaaaaatacgaaaaccagtcaggcgtggcggcacgtgcctgcaatcccaggcactcggcaggctgaggcaggagaatcaggcagggaggttgcagtgagccgagatggcggcagtacagtccagcttcggctcggcatcagagggagaccgtggaaagggagagggagaccgtggggagagggagggggagggggagggagagggagagggctgttcgactacattactcttacccgaggcagggtcttcttgcccagcccctggctgggactagacacagccacatgccccctcagcttctcagcaccccgttgcctctstgctcctccaaggaccgtttttagctgtgctgatgtttctgaggcaggtagccattcccacccgcccaggagacatttggttttttcccccactgtgtgttgatgtgatttatttcacccagtgctgagggactccggagccagcctatcagagcaagtactagctctgccgcacacccgctgtatgactttagggctagctgtgcagcctctctgttcctcatttcctcacctctagagtggggactataataatagtacctgtccctttggactgctgttttgaggattaaatgaatttatgtaaagtgattagagcagttcttggctcactagaagctcdagatgttaccgattatgactgaatagtagctattattgatggttaactttttctcagaaaggaaccttattcttcatattagccacatgagcgttgtctctttcaatgcatcttggagactctttaaattttatttttggggacagggtctcactctgtcactcaggctgcagtgcagtggtgcaatcaaagctcactgcaacttcaacttcccgggcccaagcaatcctcctacctcaccctcccacgtagctgggaccacaggtatgcgccaccatgcctggctaatttttaaatttttctgtggacatgggttctctctttgttgctcatgctggtcttgaactcctgggttcaagtgatcctcccacctctgcctcccaaagtgctgggattacatggactttttttttccccggagatggagttttgctcttgtcgcccaggctggagtgcagtggtgcaatctcggctcgctacaacctccacctcccgggttcaaygcattctcctgcttcagcctcctgagtagctggaattacagatgcccgccaccatgcccagctaatttttgtattattagtagagacagggtttcactatgttgacccagctggtcttgaactcctgaccttaattgatccacctgcctcagcctcccaaagtgctgggattacacgcatgaaccaccacgcccagccacatggacatttctttaaggaaagatgtccagggcaaattcttgaattcttggttacaatgttagtggagggaaatttctgtcctttttttttctttttttctttttgagacagaatgtcactctgtcacccaggctggagtgcactggcgcgatcttggctcactgcaacctctgcctcccgggttcaagcgattcttctgcctcagcctcccaagtagctgggactacaggtgcacaccaccacgcccggctaatttttgtatttttagtagagacggggtttcaccatgttggccagactagtcccaaactcctgacctcgtgatccgcccgccttggcctcccaaagtgctgggattacaggtgtgagccaccgcgtccagcctgtcctttcatttttaaggccttgttctagttgtgttaagaagagatgccatcagaggaggcaggtggacaggtgaggtgctgaaaccagtattccagccagagtcatccatgatgtgttggtttccaaaaaataaagatactggtctgccctcaggaggcaagggtcccctctgctccgctgtgttacaaatcagttctccatgccaggataaaggccaggcttgtgcttgattcttccctggccagtctgggtttgagcctaaaaagaaaaagaggggacagcccctatgatcccaytgtgatgtttttcttcctccaggagtgaaaagtgtggatcccaagactggcaaagagattctgtacaacctggagtctcttatcaattctgctgtgttccctggcctgcagggaggtccccacaaccacgccattgctggtaaaacatcatctgcctctgctcatcctgtagcccctaattcccatcccacctgtcctccaaaatcgtgtgccaggacttccacgctggggaaaaagctggagggctgtctctgtgcaggagatgctaacacagagtagggcatggttgagactggcctaaggtagggacagtagggaatggcatccactccacgtgtacggccacccagaggcaaacctgtgggtcaggccgagttttgtaaagtacatggcaccctcttagggaaggaatctgacagttaggagagggcaaagcacaggtgagagagattggggtccagaccctgcaggatgagtccccttgcccttgatgggcctggcctgtggcagtggaggaccctgtgtctgatcctcacaccctgcaccagtgccacgccagtgactcctgagtcagattccatgcctgcccagcaggttctcattgacttgctctttgtctctttgtacaagtagcttaggacatttgtgatgactcaagagttatcccgctgccttcatggaacaaggacattggtagcactcattcccgctaaggggctcaggatgaaggtgtagcttctcaggagacgcacaagcacttctagagaggaacctggggacagcagcgattgggagatattaggcataaggggtggaaggagctggggtcccgggtgtgttctcatgttctcccatcacacctacacacttggcacccacagctgctttaactctgggatgcagggatcaccccatccccagctgctctggacgccctttccagttgttttcacaagtattgattggaggctctgtgcgggatgcaggcccgtgggttctccttatcctccattctctgtgtcccttgaagcagccctcaggattgaatgtgagataccagataagtctgaatggtgcagggtaggacgaaggctgcacctcctacctgcgctctgaccttagagagctgcataatctggcatcagagcatcggctcttaggcctgctaagtaatcgttttcacacatcaagattaaaaaggatgtaaaatccatcttgcttaacagctttggtatggtaatgttagcacagaacttccatgcttagggaaaggttacctcaacagcagttcctcagagagaagcatatcagctgggcgcggtggctcatgcctataatcccagcacttygggaggctgaggtgggtgggtcacttgagcccaggagtttgagaccagcctggccaacatgaagaaagcccgtctcttaccaaaaacataaaaaattagccaggcgtggccaggcgcagtggctcacgcctgtagtcccagcactttgggaggccgagatggacagatcacttgaggtcaggagttccagaacagcctggccaacatacagtgaaaccctgtctctactaaaaaatacaaaaattagctggatgtggtggcacgtgcctgtagtcccagctacttgggaagctgaggcaggagaattgcttgaacccgggaggcggaggttgcagtgagccgagattgcaccactgcactccagcctcagcgacagagcgagactccatctctcaaaaaaaattagccaggtgtggtaggatgcacctgtagtcccacctactcgggagactgagatgggaggatcatctgagccctgaacatcaaggctgcagtgaactgtgatcacgccactgtactccagcctgggcaatgggagtgagacccygtctcaaaaaatataaaaataaaaaatttttttagctgggcatggtgctcatgcctgtaatcccagcacttggggaggccaaggcaggcggatcacttgaggtcaggagttcaagaccagcctggccaatatagtgaaaccctgtctctactaaaaataccaacaaaaattagctggacatggtggcatgtgcctgtagtcccagctgttcgggatgccgaagcagaagaatcacttgaacctgggaggcagaggttgcagtgaaccgagatcacaccactgcactccagcctgggcaacaagagtgaaactccatctcaaaaaaaataaaaataataaataataaaaaatttttaaaaatatatcattttggaggaaaagataatccaacgcaaaagcaaggggtgacattgaaaagcaaggaagcttgagtaaaaacaggaatgttgtttgactcatcatctgtgtatgattctatcctagcctcctgacccattgtctcttcttgtccaggggttgctgtggcactgaagcaagctatgactctggaatttaaagtttatcaacaccaggtggtggccaactgcagggctctgtctgaggccctgacggagctgggctacaaaatagtcacaggtagagacacagatggtgttcagcaggcctgttcttgtggttgtattaaggcttgcttctcagtttgtgcaaccaggatgtggcccaggctctgctgctgcagctgcaatgatgggcccaccttgggaggaggtcagcctygcctccaactggaaagcctccccctgcctcagaccagccagccgcccccttgggtgagccacagatgatgggaatagtggttgccattggtcaccagcataaggactgcttgtcctcagaacagctttgcaggaggatgacctgaggctcaactgagaggttgggctgtagtggtcacacacctggtaggtggcaccaggactgtgtggtgatgccttgcactgtgccaggggagtgtcttctctcaccccgctgagctgggggtgcaggggctctcccctcccagtttcctgcatattcctggggagttggcttgctttaggcatgtttgcttggatctgtacattctggagctgatgggctgtgaatgagatggacttcccaggtcagggccccactctggggtgccatccacctcacagtcactgcagctttccacggagaacgcatttttttggcaggcagcatactcagtcctccggaggaagggcgactttatacctagtcccacaagactgccgattgtgctagcagtggtgtggtccaggaatatgggtcctgctgtgtgtagacctgagtgcccactctctgcaccgtgtcctttgccctttacagggattacaggccctctgatctaaggattggggagggattacaggcctcctggtctaaggagtggggctcccacccaatcctgcatgtgcggcagtgcctgggaaggccgggccagtgctgtctcctcagcagtaccagccgtaccctcttttatgttctacttcacttactttctgttctcccttcatcctccatgtcttcaaataataaagctcaagaagtcctcgtgcagactgtgaacttcagggtgctttagctcaggagtccccaacctccgggccacggactagtactggtttgtggtctgttaggaacctggccgcacagcaggaagtgagctgggccgagagcattgccacctgagctccgcctcctgtcagatcagtggcagcattagattctcagaggagctgaacgctggtttgaactgcacatgtgagggatctaggttgggcctagacactttcaagaaactatcttttttttccttctgattatacctgcatccttatgagaatctaatgcccgatgatctgaggtggaagtttcatcccaaaaccatcccccgatgccatccgtgaaaaaactgtcttccacataaccagttcctggtgccaaaaaggttggggaccactgctttaggtccctgtttcttaaacttcaatgtgcacaccacccctggggctgttggtgcaatgcagattctgaccaggccttgggtgatgctggtctgggagccacccttggagttgtgagggtttaggccatagtccctgtcaccatgggcatctcatggcatgggcctgccctctccctggtgactgtgtcattgtcactctgccatctgaggacccgatgcacatggctgagacagataatgcttgcaaatgccctctttggtgcctggtgctatgagaagcactatgtccagtatcttacttaaacttcatgacagccctgtgaattattggtctttttgttacaaatgggcatctgaggtttcacaatgttgagctgcctgcctaaagccacacggcaagtgggtgggcacagctggggggctgcaaagccaagctggagccctagctcacccgcatcttgaaagggatccccgcaacacagctcagaagcagaggccccagtgctgtcagcacccaaggcactaccccagcttaatgaaggttcaaagtggaaggatcctcctgtatgacctcgggccaggtccagaaaactctgttagccttgctgttgtcaccytaccactttgataataccatcagcctcacaggatccgggaaaaacctaccacaggctacagtgtctggcacctaatgtgctctgtgaacatgccccttaccccccaaagtaaattgaactgctgcccaatattcatgctgccttcaggggagcctttaccatcaatgttagggaattgcccaagcaacttgtcagagaaaacaagccaggagcagcctgaggaagctgtcccttccccatgggagtgtcaggccctctgctgtatgatcagttacccctttcaaaagtgctctgtccttcctttcacattcttaggcacgggcatctctcgtggggattagaatcccaggccatgtggtgggggtgctcaccttcctgacctcatctgctttgactgccttcatcctcgccttcgtttctcagagattccttcacggcmtagaattcgcctgcatttctacatgtccaactttgtttccaggtggttctgacaaccatttgatccttgtggatctccgttccaaaggcacagatggtggaagggctgagaaggtgctagaagcctgttctattgcctgcaacaagaacacctgtccaggtgagaatcatccttgccttctccttcactcctctcccatctgcatttcttctggccaragttgtagctgatgaatatattggctccggggacagacctcacataaaaactgtagtgggggctgggcacggtggctcacgcctgtaatcccggcactttgggaggccgaggcaggcggatcacttgaggtcaggaattcgagaccagcctggccaaaatggtgaaatcctgtctctaytaaaaatagaagaattagctgggcatggtggtgcatgcccgtaatcccagctacttggaaggctgaggcagaagagtcgcttgaacccgggaggcagaggttgcagtgagtggagattgtaccactgcactccagccttagcaacagaatgagactctgtctaaaaaaaaaaaaactgggccaggtgcagtggttcacacctgtaatcccagcactttgggaggccgaggtgggtggatcacgaggtcaggagattgagaaggctaacgcggtgaaaccctgtctctactaaaaatgctgtggtggcacacaccacggtcccagctactcaggaggctgaggcagaagaattgcttgamcccaggaggcagaggctgcattgagccgagactgcgccactgcactccagcttaggcgacagtgagactccgtctcaaaaaaacaaaaacaaaaacaaaaaatggagcgggggcagggaccataccttggctgtctcttggctgtgcctttgtacttggccctgaccctgccagggagcaaaaagactgatgtagagctgttggaggtggtacattcatcagatgagggaggtcagggcctccggaatccagaggctgcatttctctgtgggttgttaacaaaatattgatgacgcatctcagacccagacagmtgttaccctcatttttaggagcaaggggcacatcagaccactttgtgtactagtaattaagtcagagtggccaaacgtggttgtgcctccttgtgccttgggttctactttagtttctgaatcagttgtactccttgctagggacagccagtatcctcaggccagttctcttttgcccacatgtccctttttaaatgcaccaccatcacagtggtgacaatgtgacttagggacagagccccgtttatcttgtaggtgacagaagcgctctgcggcccagtggactgcggctggggaccccagcactgacgtcccgtggacttttggaaaaagacttccaaaaagtagcccactttattcacagaggtaaggataaaagtttggaagttgccacatcttattgtgtgtatttagtttctgattgtgatgagtagctgagaccctgccactgaaagacaattctgcaccaaggctgagtgttggggtgggagacagcaaaaaacacatgtaaatcaccttgtctgagagggttataaatttgggctgcccaggacatctgtccaagggtgggtgcatctcagagtaattgaggtaagcatggagaccttgtgccctgccacactccccagctgggggacattctgacatttgtgcctcggcccccagccattgtaccccctttggtgtgtagtgtggggtgactcatttgtgtcttgtggcacagggatagagctgaccctgcagatccagagcgacactggtgtcagagccaccctgaaagagttcaaggagagactggcaggggataagtaccaggcggccgtgcaggctctccgggaggaggttgagagcttcgcctctytcttccctctgcctggcctgcctgacttctaaaggagcgggcccactctggacccacctggcgccacagaggaagctgsctgccggaggacccccacytgagagatggatgagctgctccaaaggggaactgttgacactcgggccctttgagggggtttcttttggacttttttcatgttttcttcacaaatcaaaatttgtttaagtctcattgttagtaattctgggacaggttattaaaggatttaaatttgaacctggctttctcacagctggacataattctaggaaaataaratactatgtcgccacttggtcataatcatttagatggtggtgtagggcaaagctgttagaaagattgtagcgttttactctccctgggctttcctccgccttgctgcaacagagaggaaatgcccatgtccacagcttgtacacactgccccctcwctatcttgttatccagtggcatgccaaaggagaactgaattagcttctgaggcttctgctgtaaatcagaagtgtatgttagtcaagagtaaacaagatgcacccagtatggtgggagggttttgctgtcagtagctyaaagtatggtgtagaaatggcctcctccctccatcctgggaagtcccagtcccatcctggtgtgagaatcaaccaggctttcctgctccacctgagataaccaactccctcccgtaatcaggaagccaaatgtcaccttcccaaagaaattttattttcacgtagctgaagtgcaaaacatagatgaccatttttaataagcacaatcaaatttttaaccacagaatgtctacaagaattatagctttaaaaaatacaaccaatttttatatttcaaaaatatttgaactcaaataaattaatttcttaaaaagtacacttctcatactatgtgtttggcattgactctggttaactcttgtgcagcaacacctacgagatgctatcacacacgcgccagctgcactcctgcaccagccgctgcaacgactgcacctcacgtggtggcggggactcacattcacaagacgggacgggaacatgcagtaataaaatagctttttaaaaaataacacatataaattcatcacataggattatgcttttcactgcaaccttgaaggtggcatttatctcaatctgtgactccagctatttagtggcagacaatcccggtgaggcagcctgtggtcccaccttgtaggtggcagcccctgcaatctggggtctagcctgtcggcgtttgctttattgtgggtggagcagctgctgcagaatctgtgagttgactcaccagtccctacagttctgctaccaaagtggtcttcaatttaggggcctgacccctccccagctggagacaagctgccatctccagggctcgctgtaaacagcctccactcytgggctgaataagcactcccaagaagctgggcccctaccaacagattaatcggctgcagagtgctcatcccctccccacacccccatccacccctgcctcctcctcctttccactgctttaaccaaaccttaatgaggtaaggccaggctaggtcagggctcaaaggaaaatgggctcaggaaaacttagtttgcccagccttgtcagctgagattggttttgctttccagccagaagtagaaacttgatgctttttcctttttgcagtgttaaaaaccvtatctccagttttattatgttccatcacagttttggggcaaagccagaaagctgacttgtttgcttcaaaacacaaaccaaggcactgtcttctgtgcttttcagggaggtgggaaggtaaaggagactgcccactataggggctcagttcccccaaaggccttgcacaccttctgataaaccccctggctgaggcaatcctactggctgtgcagacaaagatgtgacagcagcactagatgctgacccaacaagcagtgctgggcctgggcggtggggcatgttcagcactgcgggcagcagtcagcacatgcaagacattcagtgagcagagggctgccctcggcctccaactgcagccgccctggcgcgtgaaatgaaattggtgggccttcctaggattgtaaaatgggacttgtcatttgtgtgaggttgaaatctactatactttgaatatggcaactgttttcaaccactgaagcaaagaaggtaaaggccagatggggaatgaaaggtaaggtactgtggtctatttccaaatttgggagcaatgtgtgtaacttcaactgttggagtaaatgagttatggaaaagccacaatttctaaaatcccaaggttctaccaaaggagtgaggttcctggggaaacaggcatgaggcagcagctcaggctgatgtgtcctgtgcgatataaaaagctgtggcctgatctctaaagtggggcttttgaaaatcaccagtccacaactacctgcctggctagtttaacctagactgcttcagaagcaagggagggggataatggactggagaaaaagctgacacaaaactcaagacaaccagtttcagtacctgggccctcaaagcaatagtgaggactgagaaagtagcaaggggcactgatgtcatctattttctgggaagtgttatttttaatggtttcattaaaaacttactaaccttctactggaagaatacctcaaatgaaaaattttttttttttgagacagttttcgctcttgttgcccagggtggagtgcagtggcgcgatctcggctcactgtaacctctgcctcctgggttcaagtgattctcctgcctcagcctcccgagtaagtgggattacaggcacgcaccaccagacctggctaactttctttgtatttttagtagagatggggtttcaccatgttggccaggctggtctccaactcctgacctcaggtgatccgcccacctcggcctcccaaagtgttgggattacaggcgtgagccactgcgcccggcctcaactgaaaattcttgatgagattagtcccactgcataggtctcagcactgaggtttagagatgtgagactcagagtaggtttcagttccccggagtgaagggggcatagggaggggcagggcttcccagtgttaactgcctctgcccaaatcatgactcagtcctggtaccacgtcaagatccctttgaaaggaaacatactttgcatcaagtaatcctttgaaactgccacattgaaaagttagtttttaacccaaatataaatctgggagctaaacactagtcacgaagccatctttacttaatgaagaaccaccttgagggagaccagccctgcttgccacttacatggctgcccctgagacggtctgttctgttcatgccccagcagccttttgccttaggtttcaggaccttctgaaccacccttgagggtgtgtgccagcaaatacctcaagtggacttctacttaggaccacttgagkgcacaacttcagcttctagaaggccaagtgtggctgcaattcaggatctgccccaaactcatcagcccttcccaagtttcccaggtgagaacagtatgagctgtgaatttctgtgttggtgtgacaggaatgccacagtggtggtgccagtgatcactttctgaccttccttccttctcagataaaatgttgcacagttatggccttggaggcctaagtagacagcaattaaccagccagtgagaaaacgaatcagcatctagaacaggaggggagggaaccgtaacagataagggagcccacgattagaagcaggctccctgcacagcctctgcctccagcgcaagtaacagacgtttcacatttaaaggctgccaaggtattgctggcgactctcctgtctgtgaacatgcgcaacgggcacaggtacagagaaccaatgagatgtaggcagcaccatctgccacaaaaggttctccatcgcagccccaggagcaaaatcaaacacctctgatgggagcaaggaccctgaacagaagccaacggctggagccaacgggccatgcccttaaaacgaggacttggacaaggagggaaccactggagtgacgtgatgcaagccctcttcggtcactcttggcttccaccaggggtctctgcctccttgatgagaagagaagctggctggctccatgatgacctcgatggcgtactacaggccgatgggcaggccgggcctcagcagcaggcgccaacagaagcacacccagggctgattcaggtccatttcagcataatttttgtggaacaaattaaagaagcagtaataccagagctgtccccacttagggaataaaattttcaaggctgcaagaaactctctgtctacaaaccagtggccattgcctaaggaggctcggggaggccaggggatcactatcagtgggataggtgctggcggaaccagggggtgtctccttcccagtttcaaacttgtcctcagaagggggactcaactggggacggccgtgagctgtggtgactgaggtgcacacagcctcccagaggcagaacctgaagagcgccacgtggtagctcatccaggaaatccgtgctatttgagttctcatcggctgggccaaccacctgcaccagctgactaaacagaaccgttgctgtcccaagcccacgagacccagtgagaggtagtgaagtggttgcaaaggtttatgtgggtgggagctggagtgtggcctctgccatgttcacacgggtctgcagaccttccccacgaggaaggtcagtgctcatgcgctctggccggcaggagccggtgggccacccaggagagctgctggctgctcctcccttgcatggtggtgatggcctcatggcgcctcagccctgctctgcctgctgtgctctccagcccccaaggtggtcctcaccattggctttggtcacttgtgcccgcttcacactaggactagtgaacactctgctcgttcctggtgaaagagtatrgggagtgagtcccaaggcccgctcacaggcacttctctcccaggtaaaggtggcgaggacagcggacagggtgctgctcacgctctgtggccctgaggccaaggtcgcatgtttcccacgacccagagggtggcagcctttctcacccccactggctggtccagggcctcccctaggacagtgggctccaggaagcaaataaagggctgcatctgggtctgaaggaggcgatgggtgttctgccctcctgttttccaccaaaccacaacagttacctggctgtcaccctcgttcattttgccactcaagtgtccggcaatgctgaatacagccagtgtgctcctcccatcaggctttggccttcctgccctcaccctgccccaccaagggactggtggcttcccttctgccctggctgccagtcctcagaaaaccaaggccccctccatatccaggggccactcttcaccagggagccaaatgtagctgtcaccatccctccagacgcctttagagggagccaggctccacttctgcccatgtccaacttaaaaactactaggagccacgtgggaaccatgctgccagacaccagaaacttaaacagtccagctcaggcaactgtttggtcatgccaacccctcccctccccataccctgagtcacaggtcttggtcacagtgtctgggaccgacctcagattttatacaaaaagctggggacatagtcaaacctgagcatggggtggctggtccctggagattcctgcatgtagtgcagcttcagcagctcagccaggtactggaccaccctaacatcctcattcaccagacccagggtcagctttaggaagctcatctggcggctggctaccagctcctctgtctccttgtcgtgggtaggmaggtgcaggtggtggcagaaggtgtagaggaaggccttggagcagagctgggtgagcatgctctggacatgcaggtagtaggtgctgccccgcttgatctgtgtgcggtggtctgccaggcggggcaccagggtgcctctgtaaagggggcagcgcagggttttgttgtcaaggtccaggatgctcgtgtagcggctgtagcggctcagggcatggagggtaccggcaccggcaggggaggccactctgaaacagacaggccaaggtcaggaggaagggcaagggccgggaaagtggaggcagaagcttgggaggtgaggcctcctgtccccaggccagcatccacctagccagcatgcactggctcttcctggaagacaaatctgatcattgtaatcttcaaagggctcctcaccactcttatgaccaaggtcaaaaacacgctgggtggcccacaaagccctttgtggtccgattcctgctgaatggactcttttttggagccatggcaagctttcagtggggccttagaattacaaacctctttgttcaggccaggtgcaatggctcacacctgtaatcccagcactttgggaggccgaggcaggcgcatcgtgaggtcaggagatcgagaccatcctggctaacacggtgaaaccctgtctctactaaaaatacaaaaaattagccgggtgtggtggcaggtgcctgtagtcccagctacttgggcggctgaggcaggagaatgctgtgaacccaggaggcagagcttgcagtgagccaaaatcgtgccactgcactctagcctgggcaacagagcgagactctgtcttaaaaaacaaaacaaacaaaaaaacctcttctttctgcctgaaataacctctctctcttgtacttagcttaatttaaagcatattcagccttccctgatcctctcctgctttcctgctgtgaccttggccaaattcattaacctctctgagcctcacctataagatggagataacattcctactgtttttatttatttagagacagggtcttgctctgttgcgcaggctggagtgcagtagcacgatcatgactcactgcagccttcatctcctgggctcaaggaatcctcccaccttggcctcccaagtatttggtactataggcgtatgccaccacacccagataattttttgtagagatggaagcttgctatgtttcccaggctggtcttgaactgctgagctcaagtgatcctcctgccttggcctcccaaagatttgggattacaggcatgagccactgtacaggccagttactactattacatccctcatggggtcgctgtggagacaaaatgagttgtgcttaggacaatgctggccctcggtaggcgctgctgtcatcaccatcactacttttagcctagcactgaccagtggggtgactgctgtttgttcattggcttctccccactggacaagcagctccaagattctagggtcccagaactgcacctgatctggtctcatgcccccaatgcctggcacatcagagccaggaaaagccagtgttcactcagtgaggggagcggttccttaaacaccctcctgaagcagcttccccagagcagcagggactgccctgtagggcccagacatttagggtttacgtcagacaggtatggtgtaagaaggactgacagtgacttgggaccaaggtactctcacagtactttttccttcctgggttttatcttcttgtatatttaacaatcatttacagagcatctataacatcccaacattgacctgggagctaacactgtaatgaagaatgacctagaactcttgtcctgcatgagctcagtctgattgagaaaaaaagaaatgtgcacaagtacagtgaagtgaagggagacaaggtctcattctccctgggagaggctgtagttgggaagacctgggggattcgtggagttgcctcagagttggccctcagaagcagcgtgggctctagggactgaggagggtgtggcagaccacggcaaaagcaaggtcacagagatgggacagctgagacaggccatgcatactgcatgcatcctgaccatagggacagcactgggctatggaccacatgcatcccacaggcatggaggaactggggcctgcaggtggctgacagctaagaaagctcatgagggcagtgagacgctctcctcaacccatgctgcatggcccctgtgttccgggaccttctcagctctctaacgccttcaccctcacctccctaaagtggggctggccagagtcaaacacctcccaagctccgcacatccagctccacaggtgctgccgccacagggcacccaggcctcacctcccacctttttgcccctccgtctctgctgggatacctgttcccaggcccagcatcccctgatgcagctgacacctgccccaatggtggcacttcttttggaagaagctggctattctaactgttcctccacttctgtttccataaagctcctcctcaggaggccagatgacacgggaagggacaagcctcagctctccagcccccaagcgcacggcaccccaactgcagcctcacattgcacttaccatgcccgccgcaggaggacacctctccaccaatgaggacacagaggactgggtaaagcggcagcttgtgcaaggtcacctagctagcaagtggtcaagccaggactcaacccagggcctctgacacacgctaggctagcactttctccaggcagaactgtgctctgctttt

SEQ ID NO: 94355 - DNA, 96293 bp, Homo sapiens
agagattagcatttgcattcatagactaaataaagcagattgccttcactaatgtgggtgggcatgatacaatccatggaaagtttgagtagaacaaaaaagcagaggaagggtacatttcattctgtgtaagctgggacatccatgttctcctgcccctggactttggtcctcctggttcttaaacctttgggcgaggactgaattacaccactgatgttcctggttcttcaatttgcagatggcagattgtgtgacttctcaacttccataatcatgtgagcctttttttttttttttgagacaaagtctcgctcttgtcccccagtctggggtgcagtggcataatctcggtgcactgcaacttccgcctcccgggttcaagcgattctgctgccttagcctcccaagtagctgggattacaggtgcgtaccaccatgcccagctaattttttgtattttaagtagagacggggtttcactatgttggctaggctggtctcgaactcctgacctcaggtgatacacccgcctcagcctcccaaagtgctgggattacaggcatgagccactgcgcctggccaagccaatcattataataaatctcctcttatgtagagatctatatatgttttatttatcctgtttccctggagagccctattataccccagagcatgtcaatgtgaccttatttggtggaagggtcctaacagatgtaatgaaggatctcaagatgagatcatcctgaattatccaggtgggccctaaatctaatgagaagtgactttataagagacacagaggagagacacatacaggaagagatggccatgaaaagattaaggtagaaattacagtgatgctgccacaagccaagaattcctggagccaccaggacctggaaggggaaagaatgattctctcctagagccttcagaaagagagtggctctgtcaataccatgatgttggacttctgatctccagactttggagaaaaaaattttgtctgttttaagccacatagtttgtggcaatttgttatgggagccctagaaaactaatacagattttggtaccaggaagtgggtgctactttaataaatacctcaaattgtggaagtgactttggaactgagtaataaatagaggttggatggtttttgaggtacttgagagaaaagtcatagaatttcttgaagagactgttagtggagttatggattttaaaggcaattctggtgagggaacagaaggaagtgaagagcatggtagagaattcttccatcatcttagaaatgtatatctcatcatgagcagagtgttagtagaaatacagatgttaaaagtggtttatgttgaaggctaagaaggaaatgaggaacatgttactggaaactgaaggcaaagtgatccttgtgacacagtggcaaataacttggatgaattgtgtccttaggtggacagcagaatttgtaggcaatgaacttggatatttagctgaggagatttctaagcaaagtgttgaagatgcagcctggtttcttcatgctgtttgtaatgaaacagaaaaggaaataagcaaattgaggaaggagctgttaagcaaaaagaaacaacacttgatgattgggagcttctcggcctattcagattgcaaaagatgctaaaattgggaaactcactgttgggaaagtgtactctggatacagggccgagggtgtgcctagacaatattgtgctgaagagatctgctatacaactgatggatccctcaattatctcacggatccaaggatagatccagcgttatccaggaaagatctgtgggggttcttttatctaatggcatggatccctgtgacatacatgggagcctcaaaagttcttgagaaggttgtaccagaagaaacactgtcagcttggcctgaaggggctgagacaggacaaagtgaaagagaggctgtcagatatgcacaattcttcaggcaagaagaggactgatagaactactcaggtatcagcatgtgctgcccttcaagaaaaaggaagaatcactatgaggacagggtcatgggcacaggggtagaggctgaatgttcaagagcagagacctaccaagttgccatgagcaaagaggcctatgaagccatgagcccaaaagacacagcttcaagccacagaggattattcccagaccttgaaaccaaatgactttgccttgttggatttctaacttgcttgggattgatgacccttttattccttctaatttctctgctttgcagtgagattgtctatcatatacgtggcccacctttgtgttttcgaagcaggtaacttcttttctagtctcactagtcaatagatgcagaggaattttgcccttgcatagctcatacccatagactcacctacacctgattatttatatgtgaatatttgagactctttgaattaatttttatgatatttaggtgagagttaagacttttggagatgttgagacggaatgaatgtattttgcacatgaggcagatgtgaatttggaaggccagaggttggactatagtaggttaaatggtagagcccaaaaagacatgttaacattcgaatcagggaatagaacctgggaacatggcctatttggaaaaaggttctttacagatgtaactaagttaaggctctcgctggaagaggcaaaaaaagtcttctccccccagagcctttggagggagtatagccctgtcaacaccttaattttgtacatctggcctccagaaatgtgacagaataaatttctgctgtttcaaggcacccagtttgtgatcgtgtgttacagcagccctaggaaactgatacagaggccaagcaaaagttccaaatcaagcaaagtcccacggtgtattccttccagttatcccaaaatataacaatcccaaaacagtggcttagaacaataacaatcgtttatttttgcccacacatttgggtgtcatctgggcttagctaggcatacctcactcagggtctctcagtggtggtaaccagatggtggctggaactggagccacctcgaaggtgtcgtccctcacacgtctggtacctggactagtaagactcaaacagccagggactggggcagctggggccccttagtcatctctttccccttctatgtggttctcacatgatctttctacatggcagctgtattctcttatagaagctgccacaaagatatgccttttgatgagtgtgtaaaagaatttgcagatagtaccattgactcagaattgcagagagtatggtgaagttcacccctcagagttgtcttgctaagtagggcaaggaagctgcaatatttatatcccagctaccatcagtaatccacactggtaagtactgcccaggagaagatacattctcagatacttccaactctccaggagagcaggaaacgtgggaatggcagccttcaagggggtcctctgagaaatgcaggcgtggctgctggaaggaaagcacccgggggaggaaatgcacgcaagcacaggactgtgagcagagcactgacacggactccatatcgccagcttatgtggaaatgtagcacatagtgtagcggcatcattatctggggtaatacctgaggttcattgtcccacagccatggaaaactaggacgcgacacaccacagtgaggttaagagcagaagtttaataggcaaacgaaagagaagagctatctgtgcagagaaaggggtcccagagaaaatgggttgccagttctgcggtgaaacgcacagggttttatagatgagcttgaggaagtggcgtttgatttacgtagggaatgaaagactggttggaccaggtgtgccatttgcatagtgcatgaagaagctggccttcccaccctaatattttattctgcagatggcttctctacctgactgatgccatgttgcctgttccttcactgtacacgtggtgacaaagaaaatggaagatggagtctccatattgaacatacctggcttccaggtagtctttttctatcggcacaactgccagcattctcccgtgcactgccagcttgcttatctatgtttgtagctcaatttttcaggctgctctttgcaaaaaagaaataattttggggttgctttttgttcagaaagaagctctgctgaggactctcttaccttcactatctgcctaaataatttctttttggctcctgtatcaatagcactggtaccatttcagaattctggggaaagtcagggttactcaaataaatggcactcaaaaaattgttattcctttagaaaaaaacataattaagtcccttaactctcattatccaaaaatatagtttccagagtaaagagctaattgcaaataacaacaaactgctgcaagaatggttggaaaccatagatgtggtgaagaaggcctttctaagcaatatgcagatccagaggcaaaaaacagactgaagcactacataaaatttaaaattaaagtatgatgaaagagcagaaacaactaggcggcaactgagcaaaaatatttttcacatatgaaacagaaaaatataagatattcagaatgtatagagttcctacaaatccataagaaggcaaaaataaccaatagaaaaatggattaagaatatgaattggcgattcatacagtctataaatgccaataaacatataagaagctgcacaacctcatgagtaaccagaagcatcaataataaaggatagtgaggtatcattttatctccattaaactggcaaatttttttaaaagattgataatatccatcatggactagagcatagaaaaacttccaaattattttaattggttgagccattttggcagtacttatcaaaattaataacgtgcatagtcttcagatatatcccatgttgaaaaaactggtcagaaaaactccaacatgcacagaaagatatacacacaaggaacatcgacagttatggcagcattatttgtaataggggaaaggtgggaacaacataagtattcaccaatagggaaacgtttacataaaatggaacgatgaatatacataaattattccatggaagtcttcagccattaaatatgagatatattaggaaaaaaatgctagaaaaaaaatttaaaaaaagttgtagaaaagtcttgtccctatgatctcaattatatttaagaaatccaatccaattaagtatgtgcgcgtgcatactgtttgcatatgcattggaaggctctaaaaggttctttaccaaactgctatatgatttaatacctgcaaagccttggcctatgtctgacaaaacaggaagtgctatatgggttggctatttttgtgtataattatgcatttcttaatgataatgcattgctggattacttatgctactaaacgtaaacgtattggccaggcgcggtggctcacgcctctaatcccagcactttgggaggccgaggcaggcggatcacctgaggtcaggagtttgagaccagcctgaccaacatggagaaaccccgtctctactaaaaatacaaaattagccaggcgtggtagcccacgcctgtaatcccggctactcgggaggctggggcaggagaatcgcttgaacccgggaggcggaggttgcggtgaaccgagatcacgccattgcactacagcctgggcaacaaaagcgaaactccgtctcaaaaaaaaaaaaataaagtaaacgtattgcaatcattttaactctctgcgcccagctgatgaccaagtgtaaggcccgttcattactactttctccatcctgaatccagcagggagggtaataggacacaaggtaaacaattcttggaaaaactgcggcatcccacctgaccccgtccagcctcctgtcaaccagtgcgcaagtgcgagtaggcggtgcccagcgctccgccgccccgccctctgcggaggtgataacgacacygagcagcgacgcgcacttttgggacgcgcttgtgacccgccttccggaaggaagcggctaactatggcgaccgccacggagcagtgggttctggtggagatggtacaggcgctttacgaggtgggctccgcgccattagcggtccgcgaccacacccgggcccggggagggtgggaggacgcgtgtggatttgtggcctgagacctcggcgggactggctcggtcacgcccagactcggtgcctcttgctggaaggactgccgggagcttctagtcccagcggttgagtgtagggaggaacgggcgggggcgggggctgggactgagggtctcggtttgaattcttatgctccgggtcccctggaagctccggaaaggaacacgtgtaaggggacgcaggagacaggtctgcaaaaaccagagtttagacggacgataaaacggagtggtgaaaatgagtggaacaccttcgtctgggaaggtcctaaggaagtcagctctttggaactacggtacagttcgttggggaataaaattgtaataaattggagtttgtttttgtcgaaaagaaatcaagtgacttaggatttgtgaataaaaaatagtttgtcattcttctgcgtacatcagttttctgtcttataaagatacaactagtttagtcgatttttatttatttatttttgttttttttttttgagacggtgtttcgcacttgttgctcaagctggagtgcaagggcgtgatctcggctcactacaacctccgcctcccgggtttaagcgattctcctgcctcagcttcccaggtagctgagattacaggcatgtgccaccatgcccggccaattttktatttttattagagacggggtttctgcatgttggtcaggctggtctcgaactcccgacctcaggtgatccgcccgccttggcctcccaaagtgctgggattataggcttgagccactgcacctggccgtagacttttaaaggaagaatagttaagagttttttgaagcctagttatttcagatacataagataataagaaaccagaatgtcaatcttagtgttcattcatttaataactgagagtccccgtgctgtcttgcagagctattcattgggcactgaagaacttattttattttattttattttttaaagacagggtttcactctgtcgcccaggctagagtgcagtggtgcgatcagctcactgctgcgttgacctcccagactcaagcgatcytcccacctcagactcccgagtagctgggaccacataccaccatgcccaactaatctttttttttttttaatagagacgggggcttgctgtgttgcccagcctggcctcgaactcctggcctcaagtaatcctcctgctttggcctcccaaagtgctgggattacaggcatgagctaccacacccagctgcaactgaatttttaatttaacttaaatagccacgtgtaacttagtgactgtccacattggaccacacagatctagatgctagggatagtgcggtgaacaaataggcagaagtccctgtgcttaaagagcttacattcatttcaagtgaatttcactttacttttgatgatttaatatcaccaaacttaatatcaccgtctactggtaggggtaatgacagtgtcttccattgcaggacatactgggaattttatcttgaaacagcagagacagcagatgtggctctgtcttatgctcatgtattaagtgatgcccagtattaggttaactgtagtgacctaaaatgagccactaaaattgaatgatcttttttataaatgattttttaaagaaatggattattttctgttaaatgttgtttgctccctttttgaagactgacagtagtgtaacttctcattccccgaaactgtccaacagtgagacttgggagaactcctgtatgtaacatttcctgggaaggaaaagaagtggtgtttgtgatttttattaattcactagagagagagtttctcagcttttcttagggtgatttctttttggagtgggctcttaactagtggctggggcagatgtttgcttgctagaatccaactattgagaaaactaaaagggtatttagacttattcataaatgaattgtatttagggggatgagcaaattttaaaattcatcataaacttcttactcccaaatcctatgcgtgttgaatgtagaatttgagtagtcttgtatagtgtacccaaaaaagaaccactgaaattaaataatccgatggttaatattgggattctgtgttagattttatttatttatttattwgagacggagttttgctcctgttgcccaggctggagtgcagtggtgtgatctcggctcaccacaacctccacctcctgggttcaagcgattctcctgcctcagcctcccaagtagctgggattacaggtatgcgccaccagacccagctaattttgtatttttaatagagacagggtttctccatgttggtcaggctggtctcaaactcccgccctcaggtgatctgcccaccttggcctcccaaagtgctgggattacaagtatgagccaccacgcctggcctagattttatttttttaattttaatttttattcccaaagaagttttaaaagctaaaaatattaggggtttttcatgtgagggagaaattgcctgctattagaaatggggaaaggaatgaatagaaattaagggagcttcgaaagtaaattgttaagaataggctaaaagtcacaggaggcagtatatgcaggtgtagtaaattttatrtgcaggtgttagaagtgtatgtttcatatcttacttgtttttgactcactcttaggctcctgcttaccatcttattttggaagggattctgatcctctggataatcagacttcttttctctaagacttacaaattacaagaacgatctgatcttacagtcaaggtacgaaattaaatctctgttttaattattgggtatgtgattatagttgctatgtctttccagaaaggatwtgtggtggctcaacyawgtgtgttaaagcattttctgtaatgtaaggaaatcaaggggaatgaattattagggtaggcaaaatatggggaaatctagaaataaagtcagtacccaaatgaagaccatattatggtcttggatactttgctaggagtaaacagcagtcttgcaaatagatggttagagggaagcatgggcaactactggagtttgaatattcataagtgttgtgtgagttgctgcagaatagcacaactatttctgaagtatgggataaagattcccctgtggtcttcttaaaggagagtcagagtagaaaagaatcctactcatacccatctcaaattgaatttttatgtgtatggtaaatcaaaaaagaattctgagcatagaagttaaattttcataaattgtcaagtcacccacaaaactacatggaaaagaacctctagctctagtgataaggaaagaggcgagggtggttagtgcacaaaactcacaagtgattgtttttattctagccacaacgagacatggtatttctagcagtgtattcactgtgacttttgcattgcagcagacaattttgatattgccgaagttgaagtaaagtgactgcgcctgaaaagcttcagggggtttgaataaggatagctataataacaagtgctatgtggcttacggaggaatgagtgataagtgattttaaatcagtttgtcttagacaaatagagcttgttataactattcctcataaggatagtatgaggaaggggtaggatatatattctattagggggctgaggatgagggtaagtcatatgataccgtagcctcctaactactgagctggcaatagagacttctatgtgggctttagggagtcataggtgaagtycgtataggggtatttttactataaaagccataatacatgctagtcatataaggttgttagatcagaagtttaatagttcttgattagtaaacattattattaggatatttagtgaacctgagctatttcaggtgtggatgagtgtaataagtaagggaagggatcctactagtgtgtaaaataagtatgagcttgcattaggcattctggttggttacctcagcaggtaataatgattagggtagggatgagtgtagcttcgaaaagaatgtaaagtatgactagttctgtggctgtaaatgctgtaatttaaaaaagttgtaggaaaattaatttggaaatacggagtttttttccataagggtgattcattagataggtgatgttggcctgctaggattataagaggtagtagtcaggctgtttggattagaagaggtgaygttaatgcgtcagaagaaaaagttaatgagaagttagatgaattattgtttggttgattaaaaaataatagggtaatgaggctgatgaataggctatgagtagctatattcagactatagagtttttggagagttatattgtaacagtataattgttggaataataatttttggcattggagtaaatttagattttgtacatagtctaggccttatgcgttggagattgagactaggaaagcaaggcctactgcggctttgcaggcagcaaatactaagaggataatgggtattatgaatcctagagtgaaatgcatgtttaaaattatgagtgtatttatgataaatattgatagtatgatgccttctaggcataatagagatggtattaggtgggatcgatagattagtactcccagcagtgctatggtatatgctaatataatgttaatataaataaatggcatttggtaaatatggtctatcataatctaatgagtcgaaatcatttaatttaaactatttaccagttcaactcaatctaatcctttttgggttcattcataaattaggcctaggattagaatggtaattagtagaagggttgtactgattattagtataaggttatttgtttgaagggctcatggcaggggtaggaataggacgatttctaatcgaataggagaaatgtgatggctactagaaagaattttatggagaagaggaggtgggtagaggttaatggatcaaatctacattcataaaggctggatttttctatgtaagtattaagttatgcaagtcaaaatgtaattactactaataatagagttaataaagtgtcagttattagggctagtgctaggttaattactctttttcagactttgtcgaaactagttgattggaagtcagtggtactgcttatactaaaagagtagtaggaccctcaccagtagatagagacacatgggaatagtcatacgacatctacaaagtgtcaatatcaagtggcgtctttaaagccaaaatggtggttggatgtaaaatgaattttttttttttgagacagagtttcgctcttgttgcccaggctggagtgcaatggcgcaatcttgcctcaccgcagcctccgcctcccaggttcaagcgattctcctgcctcagccttcccgagtagctgggattataggcatgtgccaccacgcccagcaaattttgtatttgtattagagacggggtttctccatgttggtcaggctggtctcgaactcccgacctcaggtgatgtgcccacctcggcctcccaaagtgctgggattacagggatgagccaccatgcccggcctaaaatgaaattttaattggcagagaaggcagatggtgagaattgttgatccaatagtaacatgaagtccatgaaagcctgtgactataaagaatgttgagctgtagattccatcagagataataaagggggcctcgaaatattctgagatttgtggaagggtgaaatagactcctaagaggattgtggtaagtagtgcttgaattgtttgtttttggttaccttctgttaggctgtgatgggctcaagtcaytgaaactcctgatgcaagtaatatagacgtatttaggagaggtgcttctgaagggttcaggggaagaatagctgttgggggtcaatgtcctcctaattctggggttggtgctaaactggagtgatagcatgcccagaaaaaaccggcgaagaaggatacttctgagataataggagcatcctgtatcggaggcctttttggacaattgctgtgtggtggccttggaatgtactttctcrgacaatatcacgtcatcattgatatatagtcagtgtgttggttagtaggcctaaagttaaaagagtggtagaattaaagtgaaatcctatggttaggccagatgttattaggagagccgagagagctcctgttagtggtcaagggctaggtacaactctatggtaggcatgtgtctggtgggtcattatgtattatgcgaacaaagacgtactaatagtgtgaagacataagcttgaataagagtgacagcgaacttgagaatagttagtagaattagaataataagaaatactgaagttgcagagacactaataattgataatattagcactgcactgtattttaattctttttctcctgtaggaaaaagaagaactgattgaagagtggcaaccagaacctcttgttcctcctgtcccaaaagaccatcctgctctcaactacaacatcgtttcagggtaaattgattttgctacctgaagtacttgtatttggcttcttgtagtaacctgcagtctatagtgctttatatgtagtagtcctttttttatctgaaacaaaacattttgaagttcccagggagtaacagctttagctcctgattttaaaaaatttattctagggatgatacaggcattttttaaaatctccaatttaagcattaatgtttgcccttttttccaagaatgcacacatgttaatatttccaatggtcgaacacttaaaatgaaaagcaacagacttctgctttttacccatctggttattttctgattttaaatttgtcgcacgttaccctcataattctagatactgtatagtatgcttaactaccatttgttgattcatcaactacagacaacacctgttgatccccacaatatgaattatggagcttccgctcacttatgcctctttcctccttgcttccagtgtctcatctattttttacttttcattctcttggctatctttgctatattgtatgtattttcattaattaagaaatacagtaagaatatagaaagttatcagatatagatatagatatcagacacctatatacctaccacccagaattaattggtgttaacattttgctatttttaattcaaacttacttttacaggtaaatacaatattacaaatgcatcttaagaaattccttcacatccatcacttactcttgcctctcatacggataactactgtcttgaagttggtgattgtgttttctttgcctatatttataattttaccatatatgcctgttgccataaaaatacttggtttattttaaaatgtgatacaagatattttcctgagtaktattgttctgattctgatctgatcaaacaggagcttctattctttacttctgtagatctcttcagtcttataaaacttttatatattctgaaatcaaacctaccaatcttttttttttgagacagagtctcgctctgtcgcccagtctggagtgtagtggcgcaatctcggctcactgcaagcttcgcctcccgggttcacgccattatcctgcctcagcctcccgaggagctgggactacaggcgcatgctgccatgcccggctaattttttgtatttttagtagagatggagtttcactgtgttagccaggatggtctcgatttcctgactttgtgatccgccggcctcggcctcccaaagtgctgggattacaggcgtgagccgccgcacctggcccaaatttaccaatcttttatagtttggtcttttgaagtcttagggaatcgtttcctaccctaaagatctaatttgattgttttccatatgatggtcagttgtctcagcattattagttgaataatccagtatttacctactgcttggaaatttcccttctttggtaagccagattcccttctaaagggtctatttctggcttttatttttattcattggatatattcgtatctccttataccagagactcattcatgtataccacagctttataataaacgttgattagaatgtttttctatctccgtgttcttcaaaattgtctagactattcttgacccttcttcactgtgagtttaggtttaggtgatcatatttaaccaaaaaaatgcatttgggttttttattagaagtgtgttgaatttatggattaatttaggaggcttggtatcttgctgatacttaatctcactacccatttacatggtatatattgcttgcatacttgggtcttttgttttctatagtaaagttgctggaagaggaggaggggaggaaagaggaggagaggaatgcacacatatgggtgtaggaggctcccttctgaagggaggctggaaggagaaagatgtggggctaggatgtgtggggcatgggtcagaggtcagaggcactgaaactgcagctgaatgagagcagcctcctttctcattaggtggaacccccaaaatgggggcaaggtcagtgggaagagccagggaagagttaggaattatggatatcaaattttactcaattcttggtgtgagagaaggtggagggacaggcaaaatgaggggcccaacagcacgtgggccgagtcagagtaagacgaggagctgggatccgtgaagtgtaggtggccaggggcagggagtctcagcaggtgtggagacagcaggggcaggctgggtgccactgcagtttgccatgtcttacttttttttttttttttttttgagacggagtcttgctttgtcaccaggctggagtgcagtggtgcgatctcggctcactgcaacctccacttcctgggttcaagccattctcctgcctcagcctctcgagtagctgagactacaggcacaagccaccatgcctgcctaatttttgtattttcagtagagacggagtttcaccatgttggccagaatgatctcaatctccttttttttaattaaaaagtaaactttaatgtcgaaaatgcagacttggggagggcagaaagatcacacacaaggctgtcacttcacacttggaaggttgcacagcagcgggcagagacgctcctcacttcccagatggtgagggggccgggcagaggcgctcctcacttcccagacggtgcaggggctgggcagaggcgctcctcccttacaaacggtgagggggccgggcagaggtgctcctcacttkccagacagggtggcggctgggcagaagtgctcctcacttcccagatgggacggcggccaggcagaggtgcttctcatttcccagatggtgaggaggccgggcagaggcactcctcacttcgcagacaggacggcggcaaggcagaggcgctcctcatttcccagacggtgaggaggccgggcagaggcactcctcacttcgcagacaggacggcggcaaggcagaggcgctccttacttcccagacagggcggcggctgggcagaggcactcctcacttcccgggctgtgaggcggccaggcagaggcactcgtcacttcccagagagggtgggggcctggcagaggcgctcctcactgcccagacggtgcggtggccaggcagaggcgctcctcacttcccagatggtggggcggctgggcagaggcgctcctcacttcccagatggtggagcagccgggcagaggcgctcctcacttcccagatggtrcaggcagagatgctcctcaggtctcaatctcttgacctcctgatccacccgcctgggcctcccaaagtgctggattacaggcgtgggccaccacgcctgccctgctgtctcttctttctcctcctaagcagctctcttagtctcctgaattttgatgttctacttaacaacctcatgttcttacgcatgttgccctgctggaggcgtccttctctttgggaagcctgacccaccaacagtgcctcaggagatagacatggaagcttagccggtgggggcccctcatctctctcccacctcagttgcaggggaggggtcggttgcagctgcagcggtggccycgacagttttcttttgcgggacctgtggccggcagctctgggtggagaagacctacttgatccaagagctgcaggatccttgggctgcatgtcctcccccaccatcagcaagcctggagagctgggcaggtggtctttacccagcaccttcaaggccgccttctctggccacagggagcagcccggaactggggcagggagcactgttggaagtgggtcaggcttcccaaagggaaggatgcctccaacagggctgtgtgaactggcgactccatggcccttggagtagaaactcactgcatgcacctgggccttgtcagtctggttgttttctgtcaagctcttgaggtggacatttccctccaagggcctgggattgtaccaggaggaagtgaggtttccctgagtctccaggggcctagaggtggaagctgcttccccattgctacaggggccccttttattgtcctcctgcccctgggtctctacctggtctttcacctccgttgcttctttgggctcttctgccctcacctccatcttcgggagcctggctgggatcacctgctcatctaatgaaggaagttgaaggttaaacttgcctctgagacaagagatcctcacggggctgaggtgtccaaacatcctggagttgcgagcagacagcacgggtttcttccttgaggggggggctccagaccacaggaggcaggaccctctgtggggtgccygtgttccgagggataagacacagcctcacaggggcgccatcccacctgactggaaaagaaggcccaagatgtcgctgacggttgaagaggagtgggaaacggccccagattcccggggcaggcacaggtgcaggagccgcggggtgagcccggccagctgggaaggcctcacggacaagacgagcaggttgccggtggcgtggccaggacctgcggtggaaccaggaacaaaatatgcttagtgagttgcccattttgagcgagttgtgcacagacgaaactaagggtcagaagcggagaggatactccgaagtcacccacttctctgtggccgggtgcacactgggcatctgggagtttatgacatcactatggggctggtgacagagccagggtgtgaaggagtgcttaggagcccagcgagggtgcctacaagaggagtcaaagggcaaagggtgagacccttccaccagtccccctggactctagcctcagggacgtcctgctcctgggggcaggtgtgtggccctggatgggcccccctgtggggctgttgggggtgcggggctgatccgccagagccatggcgcctggcccaggtgctggctggcacccagtggccctgtcttggacggccctgtcccccgggttacagggccagaacctggaagcagagcacaggaccagccagatccygccaggctcccccggggcctttccagtgcctctgtgccgcctggagcaaggcccgccttctccatggctgccgtggcctcaagggccaccagccttgcttcgcaggtttccaaagagaggacgcggtgccctgacctgactggatgcgcctcttaccacatgcctccctggcaggcagggtctccgctttttacaaatttgcctgagaccattcctcaggtcattcaggtggtcatggcccagccaggctttgaacctgggctgtgcgattccacagctggcgttctggcctgtgtgcctcatgatcatggatacagcatctattcttattttttcctgtagttctggggtacttagcaccrtggcatatctgtaataagcacgtgcacacctcgaaggaggtcttcacttcagcatagaagttgaccatggcatgctctgggctccagtcytctacaaagatgtagggcaggaactaccagttgtcagcacagcaccatcccacattgctcttctaatggagcctttcaccccagatgttctttctcgtctgatgggaaggatccacgtatgtaaagattatgttctagatcagctttggtctgtcctaaaagaaatttgccagtggattattccatatggataaaagtcagtttctctggtcttcctggaatgtgtctagaaagcaaatacattatttacgagttcatagtagatcaatatattggattaaaatatgacaaacataatttggtcattgtgagcatgccagctcggtcaactattcaccacacatgatgccctaaatataactctaggttttcttatgcccaagagagggacatactcttgggtgtctggactagggaaacatgtatgaaaaaccatttggccactctacatcttgttattggagaatcaaaactatctatattcaaagatattattaaaaggtaagaagttaacttctgtcattttgttaattgttttctggttgttttgtagatcttttgtttctttttttattgtttgctttatggtttggtgagtttctgtactgataagctttgattcctttatttcattgacatatctggtgtaatttttttctctggttactctggagcttacatttaaaaatgtatagttatgatagactatttaaagctgataaaaattttgatcacacacgaacctgctatactacccccacatcccttgtcagtgcacaaaatttgtacttttttgccttaatttatattgttctgtattgggtgtttattaataactcattgtagatataaatatttttgactattttgatgttcagctttctcaagggtgatttgaaagattctaaagcattaatttcagtaatgtagaattctcagtttgaatatgaatttacttttaacagttaggtggatagtgtcctgtttttgcattagtattctttcacttgcgattgaagcacttgttaagcatttcttgtcaggctggtcttatggtgatgaattccataagcatttgcttgtctgggaaagactttatttctttaatttctgatgggtagctgtgctcagtacagtactctttgctgactgatttctcattagcactttgaatatatcatcctcatctttcctagccttcaaggtttctgctgtgaaaactgatagtctaatggagacttgcttatttgtgatctgatgcttctytcttgctaattttagaagtttttctttgtgtttgacttttgacaaattgattataatgtgccttagaaaaggcctttttgggttgaatatgtccctttaagcttcacggaactggatgtccgtatctctcccaagaattgggagattttcagctattgttttgttaaataagttttctgtgtctttgtctcttttctctgtttctcttctatattttcaaaatctgttatcttagtatcatggcacaagtctcatagactttctttgattctttttactctttttttctccttttttccctcagtctgggttatttcagaagtcctgtctgcaagttcagaaattcttttgtttgatctagtgtgccattgaagctgtcagtggtactttttaatttaattcattcaattcttcattcctaaggtttctgttggtttgttttcttttttcttttctctttttttttttttttttttttgagacggagtcttgctctgtcgcccaggctggagtgcagtggcacgatctcggctcactgcaagctccgcctcccaggttcacgccattctcctgcctcagcctccggagtagctgggactacaggcacccgccaccacgcccggctaattgtttgtatttttagtagagacagggtttcatcctgttagccaggatggtctagatctcctgacctcgtgatccgcccacctcggccttccaaagtgctgggattacaggtgtgagccaccacgcctggcctgtttgttttctttaatggtatctatgtctttgttgaatttctcattcaggctatggcttgtttttttttattattcgattaagttttctctctgtattcttttgtatctcattgaattttcttaagatcaatatttcaaattccttttaaggcaatttgaaaatttccatttatttagggtaactttgtgaagaattattgtgcaactttggtggtgtcaagtttcattgcattttcatgctttttatctcctatgtttatatttatgagactgttgacacggtcacctgttctaattgtatagagtggcttatgtagagaaagattttcacctggagatgtgtcttagggtgtcagttggatgggctgcatctgctttagttctaggaggacacagtagtgtaatatctgtgcttttctcttgcctgttttttttttttttcttttgctagtatccattttggtgatacctgtgagtgtcttggtgacctaggctgtaggagcatgtgcagtttgtttttctgctcaggactgggggctgggggagaaggcggcggtgtcaggaagctgcatgcctatctagtgactgtgttactgagtcacaggggttggtacaccagtttgagatgggactcccctggaaacactcgcctagctgtggattactggggctggtctgcaggtttgagatggggatcacctagaaacaccagggccagttggtgagcgcactgatggcacaataaatcagtaatcggtccacagttagagtgttgcagtcactaggatgtggaaggcaaacctctttgagagtttgtttctaggatatagacagcagtagctgctttcctggagaaggctgttgtaatgacagggtagcccctgggatggaaggaggcagtgaccactagttcatggaacagaatatactcagctatggcttggctttctagatggtgctatatgtgggctccttctctggggcagtatagccctgtgggcatcaagcagcttcctaaactaggctgctagagatggggtttcaccatgttggtcaggctggtctcaaactcctgacctctggtgatctgcccgcctcggcctcccaaagtgctgggatcacaggcgtgagcccccatacctgacctaccttttttttttttttgttaagaaacttgcttatgttgttctttattttcttcttgacttttttttccccaggtttccttacagtcatgcgtcacttaatgacgtagatacgttctgagaaatgtgttaggcaattccattgtcatgcaaacatcatagagtggacttacacagacctagatgtgtagtgtgtacctataacctggtacgcacctagactatatggtatagcctattgctcctaggtcacaaactatacagcatgttactctactgaatactctaggcagttgtagtaaaatggtatttgtgtatctaaatatatttaagtatagagaaggtacaatagggccaggcatgatggctcatgcctgcaatctcagcactttgggaggctgaggtgggcaggtcacttgagcccaggaatttgagaccagcctgggcaacatgacaaaaccccttctctaccaaagaatccaaaaaattaggtgggtgtggtaatataggcctatagtcccagctacttgggaggatgaggtgggaagatggcttgagcctgggaggtggaggttgcagtgaaacaagattgtgccactgtgctccatcctgggcaacagagccagaccctgtcttaaaaaaaaaaaaaaaaagtacagtaaaaatacagtattttactcttataggaccactgttgtatatgtggtccattttgtcaattgagatgttaaatggcacgcgactgtatatccattaattgtaggcgatttgagactggctctctgaaaacacatctacactcactgtgcccaggcctggaatagctcctgtcatgcctttgtgtggattaggggaaggtactcttcctccagcaagtgcagcagcctggtgcagaccttgggctgtggtgccgatccctgggtgcccctaacaggaccccagctcatgcagcaaccttgctctgccctttcttctggcagagttcagatataggataatgtgtccttagataatttagtggttatatttttatgacttcattagtattattcattagttgggccaatgttatgaggctatattttctttattggatacttttgttttccccagagttaatcatttttgtttggttacttgattggttctacagtggtctttatgttgtttgcctctaggagcataaaactccattcagaatgttcacacgttagttatctattagattcactttctttgttctttctcctgctccactcctgactggttgttatatgcagctgctacacagggtggccctggagtgtcccatcaccattagcttgagaatttcctttctctgttctgcattggctatttcctgtctcttggtttacagtagattatagatagatttcagagaagggtcatggaaggtgaatttttttttttgaaacctacacatcttaaaattttttatttttacccttttgcactgtactgattgttttatcagttttattgatctgttagacacttcctcaatatctggtgattgttaacatcccttcttttttttcaatatgcacaatatttttattgtcatcaagaacattatgtaaattgtttgcagaaactacaagaaaattgaaggttgttttgttgatagtgaaaggcaatggaagggcactgtggatcaataaggctgaggggcgagacaaagagggcaaaaatctttactgagctctcgggcgaggttcactggtccgcagggggagggccagggaagtcgcgctgtgccaaaggtgcagmgcgcttttatggatgctgggtgaggagtgggcggggtaggggcgggrtaggttgagtttcgtgcttctgagtgtgacacgccctagtgggcatgcgcgttggtccgggtggcgggaacaggaaaggtgaacccggaaatgctgagtcagggtacccgatgtggctgtcaggatggcgggaataagcgaaaatgccaagtcagggtagccaagatggctgccgagatggcgggaaccggtgaatccgggaatgctgagtcagggtagccaagatggttaccgatcgccatcttggagtcttcaccggagtccaatcagattacattcagtgttacttttcttcaatttatgcaatacctatttacattcaatactgagttgacacaagagtaagcgaattaacttagatttttttcctttagacagaagccttattgatatataatctatttaccataaaatttaccattttgaagtgtaaggtttttttcctttaaacagcagctgtattgatacgtaatctatataccataaaatctgtcattttgaagtgtataattaagtggtttttagcatattcccagagttatacaactatcaccaccatctaattccaaaatatttttatcaccccaaaagaaatcccaaagccattagcagttacttcccactccttcctctgcccaggccttagcaaccatttatctactttatggacttgcctattctggacatttcacattaaaaggaataaacaatacttagcctttgtttctgggttctttcacttaacataatgttttcaggactcatccacattgtagcatgtatccgtacttcattttatcaccaaataatatttcagtgtatggatacacacattttgtttatacattaatcagttgatgcacaattgggttttttccctcgtaagagtatatgaaaaaataaaaaataataaaactgctatgaaataatgtgtacacatttttgcatgggcataatgttttaatttttcttggatatatacctaggagtaggattgctgtgtcatgtgataactctgtgtttaacattttgaggaacccccaaactgttttccaaagtggttgcatcattttatattcccactagctacatatgaggtttacaatttcttcacatccttagcaatgcttattattttctattttattgtagccatcctagtaggtgggaagtgggatcttatggttttaatttgcatttcccagataactaatgatgttgagcaccttttcatcggcttattggccatttgtatattttctttggagaaatgtctactttaatcacttagctgttttcaattgggggttctttctatcattaaaactgtaaaagttctttatatattttgaatcctagtcccttgtcagatatatgatttgcagattttttttttcattctgtgggattttattttacttctttgatagtgatctttgaaattcaaaagtttattttaatgatgtctgacttccctgtttttccttttgttgcttgtacttttttgtcatctgtaaaaactttggcttaatctaaggttatgaagatttactctttcctgtcttctaacagtttatagtttttgcccttacatttagtgtgtaattcaagttaatttttgtatatggtgtgaggtagaggcctatctttatctttttccaggtggatgtcaagttgtcctagcaccgtttgttgaaaagactatttcccttctgagttgtcttgttgaaaatcagttgaccataaatgtaaggatggtctattttcaagaatgacacatgaaaatggtcattgagagccctgttaaaatgggcttggctttttcttcagttttactgaggtataattgctaaataaaaattgtatatattcaagatgtataataagatgattttatatttatatatatatacacacacacacattgtgaaataatgaccacaatcaaattaacatatccatcaccacatttagttaccatttgtgttttagaggggtgaggatggggtgggctttttgactgaggggcttgcactaggataatcagacagggacctgttcgtttatttgaggggacccccaaacttagtatttatagtttttattctcttggctttgtgtttcccaggagaggagtcctctagtctattactttgcaggtaaaaagctgctttccaccatttgggagctgagttgaaggcaagaggcccagggtcttaccattcattatgtaactcacacctaatttttgtcttcagaacggcacccctgccttcactcattcttaggacttccagtttatacacagcctctccagagagcacttcttcagggtggaggaggggagtgactgcctgttgtctaggcacccagccagtcctcctgttgtcggcctttcccgttttccagtgtttaatggaagctggtgccccagtttgggagcatgtttcaggcgttgctgcttggcttttcactgctggcctaggcttgcctttctctttgatctctttgacttatcaaatacaacttatccatttgctttccagtttcccacattttgtcacctttctccttgttctggtctgggtgggtttagacctttaaactttgtaggcattttgcatttgctttctgagtgtgctttcagaagagatcaagggttgaggtgttttttaatgttagctgatattaagtggtatgaagaaatatcaaagcagggtcagtaaagagaggtagagttgctgcatatatttcttgttcatttcttttgactgctacatattcttctgtgtatacagccaccaaattttacttctccattttcctcatgatagacacctaaaccgcccccatttcccactgctgcaaagaatcctctgattaatattccctcatgaacctaatattcccttgaatttctctgggggtatagaaccaggaataggatactgatatatgcctgcctaattttcctgtaggacttttctgtgtcatctatggtcccctgagatagtatataggaattcaagttttccctacatctctgtttagcaatactgtttgctttggatttctcttaatgtttgagcctttgagcatcacttcatctactttttagctactggagtcttctgcttctttgaatgcctcttcatatcttttacctgtttttttactggattcccagtctttcttttgattagcgaaggttctgtataccttgtagattttaatccttagtcaatttttgagttagtactctgttacattgattctaagacacatactgtttttccctagtttaaaatctttgaagtggggatgaatcttaaagctgctgagagtcactgatgagtcattgtcagccaggaaggtagtttgtgacatggttgtcattgcttatgtaccagtgaacttcgtggtggcgggcttactgtcagcactccagttgaagtgtatgccctgctggtcaatgaggcaactgatagccggagaaatggccagacctgcagagcagaggcagaggatgacaaaaggctttgaagatctctttgtcagacttcctgttgcctttgggtagtatcagcttactttctagaaacatgtgatttaattggaaggacgataaaactatgaggttagttcaataggaaagttgcagcatcagaacttgagaatgggtgacagttaacatgtcagataatctcagaaatcatagtggagcatgctggtaagaaatgccaagacactgccaagagcaaggagaacatggtatgaaaacttgtggtatcagtgacttagaggagagggacagaactcagttaaagaggttttaggaatgtcttgacttacattttccttttcataagtacaaatgtagtgtaacaaaaatctgggtctaagaatgtataatagacctttgcattaagcataaactaaaaagctgcacatgacaagaaaacatcattgtattttaattgacactgtttctcttccttagtgatggataaaatacaattgatgacatcttagattcagtgaaatacaataaacctcttctctatcacccgtctgttaactttrtctttggtatctttcgttgaaccaaatttcttaattttgacttggtcagatgcatccatcttggccttacggtttgtattcttaaagacttggttaagaaatcatttcctaccctgaggtcccaaagacattcttccacattttgttatcttttctaaaataccttttagatttttaatatggctggaattcactttatacctggctgttcaactttatccgtagagaaaaatttgtgtgaaacctagtggtttgtggggtaactgctgtcattttccaggtatttgtatgtacacagttctcatgaattctagattctttcattggtctctgcctacctgcaaatattacagtatttgcttccttctggtaaagcacctcccggtttctaaattcagttagccattcctgaacttgtatccttctgtgtaattattgaagtttatagagctccattagaaatcctggtggaattttagttgtgattgcattgagtttgtagtttatcttggcaaaatgtaatatctttaaaatgttgagccatcccttcagctgaccatcgtatatcttatcatttattactgtctttatatttttcttgatactgtaaatactttgtattttgttacctttatttactattaattccaatggtttgttgatttcgttgagttttttatgtaaggtgatcatatcacctgctgataacagtgtgactcttctcagacgtgtgtgtgtgtgtgcacacttgtttattcacatttttggacttacagttttactggtatggcctttagtaatatgctgaatagtaaaaagataccaagcatccttgttttgttcatattcataaaagtaatggctctcttgtttcccagttaatatctgtaggttttaggtattatagtcttatcaattcgagaccatttcctccgatctagktttctaagagttttataaatagatgttgaacttcatcaaatgttatttctgcatctaagatcattgcatgacttttctttattatgttgtattttctgaaatttttacttcttatttaacttctattaatatatctcttaggtgtactctgttctttttctaacttagttgaacacttaatttacatttttaatcttttctagtattgattgacattctctttacaaaacaccctgagtgtaattcaggattcaggcttaaaaaaaggttttgaaagataataaagtacgtattccttattacagaaccactctcatgcagtctagggcagcatccccagaatagtttcattccattgagtaaataaaagcagtaaagagtttcatatatgtttaggacaggttttgctactgaatgaacttgctgcaaactttcaaaattgagtgtgaggcataatgaacttttctgtgtttaagcctataaattcccttctaagtactattccagctgtaggctatactttttttggggggagggaggatggagtcttgccctgttgtcaggctggagtgcagtggcgcaatctcggctcactgcaacctttgcctcccaggttcaagccattctcctgcctcagcctccccagtagctggaactacaggtgtgtgccaccacgcccagctaatttattattattattttttaatagagacagggtttcaccatgttggccaggatggtctcaatctcttgacctcgggtgatccacccgccttaacctcccaaagtgctggtattacaggcatgagtcactgcacccggcctgtaggctatacttctaatgtgtgttattcagacctaaatattttttaattttcttttttttctttgactaaagcataatgttttccttgagtttttgtcttctcagtaatttataatttattgctatgtgattaaaaaacatgttctggatgatagcttttctgaatgatttggctgctcttgttgacacttgctttatgtcttactttattgtaaattttgcaaatgttccacggctttatcacaaaaatttatattatatattccttttattcaaggtgtcttgtgtccattacatcaagcactttaattattattcaaatagttgacagtcttagccgttttctgtctggtatgtaaatgaatgagaaagaaagagacagtataaagatcagtattacccaccgtatggattcattctctgtctctgtttcgtttttaaattgtttagtttgaaggtgtgaaatgtatgtgggctcagcatttttacatcgttttgaatgtcccttatctctaacaaaaattatgttttaccttaaagtccatttgtctgatagcagtgtagctacaccagctatcatttagttattctgtgattaataggactctgttttcaattttactgtatcattgtgtgtagttcttttgtacataattggattttaatcctagtatcattttttaactgaggagtttaatctgtttacatttattttgattactaacttatttgtatagtaaacactaatatctgctgaaatatgaggtgattcacaattttcccagtagcatttaaaagagtttcttggccaatttgatatgtaaatttaaagggatgtataagaaatggccaaaaataatgttatttgatttattaatgtaattgcacatatatatttaaaatgtcattgtgcaaataatatattcaaaaatactgctctttcctttaccccatgcagcagttttattctaattcttcctaggcatcttggataccatattcatcattagaagcattgaaaaatttatgtttaaagtctgtcattttcacgtctgtctgaatacttggatgcataactttttgaatctgtgtatgttgctatccctcaaaattttacccaagtctcattcagtatttgtggttctacacttgaccccttacagggttgctttttgttgtggtctttaaaaggtttgcttacttggttgtatactgtttcattgtgaagtcccgctcccaggaatatgtattatgtgtgggaaataagtacaatatctgtgtcaaattattttacctccctttataaaaaacaaactgatttcttcaaaacacctaaaggtagcattgttagagatcattctggttgaagttgtaactaattagtagtgggtacagctgcatataataggaaacccaaacttagatggcttagggaaagtagaagtttatttgccctcacaagtggggagcaaggtagctagcgccacagatgattagggacccaggttaccatcctgtgttctgtccttgaggtgtgtgacttccattcataagtcaccttaagggaggatgtcaggcagatgggcagaaaagagtctccttctgggcctgtcagcttggttacggcaatgctggccacacctagttgcaggagcagctgacagaagtggtcttttgttccagggcagtggccttaattttttcatttctttttttttycccttgcctttagtctgcttgatcaggttttcttgattagacttcccttattcttttcttctcctcatgcttaacataagtaattcctgtccaatttttttttgtttgttttttgagacagggtctcactctgttgcccaggctggaatgcagtggcaccgtctcagctcactgcagtgtctctctcccaggtgcaagggattctcctgcctccgcctctggagtagctgggattacaggcatgcaccaccacacccggctaatattttttgtatttttagtagagacagggtttcaccatgttggccaggctggtctcggactcctgacctcaagtgatccccctgctttggtgtcccaaagtgctgggattgcgggcatgagccaccttgccccaaatgttaattaatcttcctctcttccttactgagcagtacagggacttactagactcctacttcagttgttccccatccccactccccctttcttgatgtctgatatttgacctccacttattttgtatcctccaggattattatatttgagaatcaccttctttacctatttaccactttcttattgccagtctttaggtatttctttctttatccgtgcagcttctttgcgcttaaaatttctttttctaaaatatattctctattagattgttatgtagagattcagagaaggtaatctgtatctcttaatgagaaatgtttttattttacctccttggatgacagttagtgggtaacaggttctaagtggatcattatttgccctgcagccttggagaatttcttcatcatggcctggcctgtgttatggggagactgtgtcagtctaattattgttcatcttctgttttttctagtggctttcacaattatttttctctaaaattctacagtttcactgtcatgtgtcttcttgtaatttattcatatttatcctacttgggattcatttttgtacttcagtctgtggatttctgtctcccatgaattctgggaattttttagcttttatctgttcaaacattgtctctcacttttttcctccagtttttccctgtagagctaatgtttagtgtacttttaaccttcatatcctctacgttcagtatgtactctttcatatttttgcatctcttggtaatctcagctctgtctttcatttttctgcagtgtctgatggggtatttaatctatcttttagatttctaattttattggctcttagattttatttctggaagttatatttgactatttagcaagttagcctgtccttttttgtttttgtttttgagatagaattttgttcttcctgagcaggctggagtgcagtggcacaatctcgactcactgcaacctctgcctcctgggttcaagcgattctcctgctttagcctccccagtagctggtattataggcatgcgccaccatgcctagcttatttttttgtattattactagagatggggtctcaccatgttggtcaggctggtcttgaactcctgacctcaggtaatctgctcgcctcggcctcccaaagtgctgggattacaggtgtgagccaccacgcccagcccagcctgtccttttcttagtaactttttaacctttccttatgtttatgctcttgggagcactttctagtgtccagcgtctcgcgttcttgggcagtggcccttctgcatgtcttgtatcctgactctcactcatggtggggttgtggtttttgattgggaaagttgttttctctcttttgagtcctctcaggtctcgattgtggagatgtctttctggttggttttacttgcttctgcagcataccctataagattttaggttccaggattcctgtatcaagtgcccattatgacctattcctgctagcctgcatggggcacaggtctgagacttccatttctcaccggaaactttgttccttcgctactccaagtgctggacagaaatagtatccctacatcacatcatgctgccttctgatagcttttgagctgtggttaagtgttttggatatacttgttcttaatcatttgttttctgtgtattacagtttttatagaatggtctcaacgtttatggcacctttggtacatgggtggtctatctcggtatttgtttgttgtttgttttttgtttttaatctttttgtgactgccaatacctgactatgaaatcagggaggacttaggaaacttaaggaaaccttgagaagtaagaacctgaataacatgataaaatcagaatcacagttgaggaggtgagtggcactggatttgaaagagaagcccggagggcagccaagatagccgaataggaacagctccggtctacagctcccagcgtgagcgacgcagaagacgggtgatttctgcatttccatctgaggtactgggttcatctcactagggagtgccagacagtgggcgcaggacagtgggtgcagcgcaccatgtgcgagctgaagcagggtgaggcattgccttacttgggaagcgcaaggggtcagggagttccctttcctagtcaaagaaaggggtgacagacggcacctgraaaattgggtcactcccaccctaatactgcgcttttccgacacgcttaaaaaacggcccaccaggagattatatccctcacctggctcggagggtcctacgcccacacagtctcgctgattgctagcacagcaatctgagatcaaactgcaaggcggcagcgaggccgggagaggggcgcccgccattgcccaggcttgcttaggtaaacaaagcagccgggaagctcgaactgggtggagcccaccacagctcaaggaggtctgcctgcctctgtaggctccacctctgggggcagggcacagacaaacaaaaagacagcagtaacctctgcagacttaaatgtccctgtctaacagctttgaagagagcagtggttctcccagcacgcagctggagatctgagaacgggcagactgcctcctcaagtgggtccctgacccctgacccctgagcagcctaactgggaggcaccccccagtaggggcagactgacacctcacacggctgggtactcctctgagacaaaacttccagaggaacgatcagacagcagcattcccggttcacgaaaatccgctgttctgcagccactgctgctgatagccaggcaaatagggtctggagtggacctctagcaaactccaacagacctgcagctgagggtcctgtctgttagaaggaaaactaacaaacagaaaggacatgcacaccaaaaacccatctgtacatcaccatcatcaaagaccaaaagtagataaaaccacaaagatggggaaaaaacagagcagaaaaactggaaactctaaaaagcagagagcctctcctcctccaaaggaacgcagttcctcacaagcaatggaacaaagctggatggagaatgactttgacgagttgagagaagaaggcttcagacgatcraactactctgagctacaggaggaaattcaaaccaaaggcaaagaagttaaaaactttgaaaaaaatttagacgaatgtataactagaataaccaatacagagaagtgcttaaaggagctgatggagctgaaagccaaggctcgagaactatgtgaagaatgcagaagcctcaggagctgatgcgatcaactggaagaaagggtatcagcgatggaagatgaaatgaatgaaatgaagtgagaagggaagtttagagaaaaaagaataaaaagaaacaaacaaagcctccaagaaatatgggactatgtgaaaagaccaaatctacgtctgattggtgcacctgaaagtgacggggagaatggaaccaagttggaaaacactctgcaggatattatccaggagaacttccccaatctagcaaggcaggccaacattcagattcaggaaatacagagaacaccacaaagatactccttgagaagagcaactccaagacacataattgtcagattcaccaaagttgaaatgaaggaaaaaatgttaagggcagccagagagaaaggttgggttacccacaaagggaagcccatcagactaacagctgatctctcagcagaaactctacaagccagaagagagtggggaccaatattcaacattcttaaagaaaagaattttcaacccagaatttcatatccagccaaactaagcttcgtaagtgaaggagaaataaaatactttacagacaagcaaatgctgagagattttgtcaccaccaggcctgccctaaaagagctcctgaaggaagcattaaacatggaaaggaacaaccggtaccagtcactgcaaaatcatgccaaaatgtaaagaccatccagactaggaagaaactgcatcaactaacgagcaaaataaccagctaacatcataatgacaggatcaaattcacacataacaatattaactttaaatgtaaatggactaaatgctccaattaaaagacacagactggcaaattggataaagagtcaagacccatcagtgtgctgcattcaggaaacccatctcacgtgcagagacacacataggctcaaaataaaaggatggaggaagatctaccaagcaaatggaaaacaaaaaaaggcaggggttgcaatcctagtctctgataaaacagactttaaaccaacaaagaccaaaagagacaaagaaggccattacataatggtaaagggatcaattcaacaagaagagctaactatcctaaatatatatgcacccaatacaggagcacccagaatcataaagcaagtcctgagtgacctacaaagagacttagactcccacacattaataatgggagactttaacaccccactgtcaacattagacagatcaacgagacagaaagtcaacaaggatacccaggaattgaactgagctctgcaccaaggggacctaacagacatctacagaactctccaccccaaatcaacagaatatacatttttttcagcaccacaccacacctattccaaaattgaccacatagttggaagtaaagctctcctcagcaaatgtaaaagaacagaaattataacaaactgtctctcagaccacagtgcaatcaaactagaactcaggattaagaaactcactcaaaaccgctcaactacatggaaactgaacaacctgctcctgaatgactactgggtacataacgaaatgaaggcagaaataaagatgttctttgaaaccaacgagaacaaagacactacataccaggatctctgggacacattcaaagcagtgtgtagagggaaatttatagcactaaatgcccacaagagaaagcaggaaagatccaaaattgacaccctaacatcacaattaaaagaactagaaaagcaagagcaaacacattcaaaagctagcagaaggcaagaaataactaagatcagagcagaactgaaggaaatagagacacaaaaaacccttcaaaaaattaatgaatccaggagctggttttttgaaaggatcaacaaaattgatagaccgctagcaagactaataaagaaaaaaagagagaagaatcaaatagatgcaataaaaaatgataaaggggatatcaccactgatcccacagaaatacaaactaccatcagagaatamtacaaacacctctacgcaaataaactagaaaatctagaagaaatggataaattcctcgacacatacacccttccaagactaaaccaggaagaagttgaatctctgaatagaccaataacaagctctgaaattgtggcaataatcaatagcttaccaaccaaaaagagtccaggaccagatggattcacagccgaattctaccagaggtacaaggaagaactggtaccattccttctgaaactattccaatcaatagaaaaagagagaatcctccctaactcattttatgrggccagcatcatcctgataccaaagctgggcagagacacaaccaaaaaagagaattttrgaccaatatccttgatgaacattgatgcaaaaatcctcaataaaatactggcaaaccgaatccagcagcacatcaaaaagcttgtccaccatgatcaagtgggcttcatccctgggatgcaaggctggttcaatatatgcaaatcrataaatgtaatccagcatataaacagaaccaaagacaaaaactacatgattatctcaatagatgcagaaaaggcctttgacaaaattcaacaaccttcatgctgaaaactctcaataaattaggtattgatgggacgtatctcaaaataataagagctatctatgacagacccacagccaatatcatgctgaatgggcaaaaactggaagcattccctttgaaaactggcacaagacagggatgccctctctcaccactcctattcaacatagtgttggaagttctggccagggcaattaggcaggagaaggaaataaagggtattcaattaggaaaagaggaagtcaaattgtccctgtttgcagatgacatgattgtatatctagaaaaccccattgtctcagcccaaaatctccttaagctgataagcaacttcagcaaagtctcaggatacaaaatcaatgtacaaaaatcacaagcattcttatacaccaataacagacaaacagagagccaaatcatgagtgaactcccattcacaattccttcaaagagaatgaaatacctaggaatccaacttacaagggacatgaaggaccccttcaaggagaactacaaaccactgctcaaggaaataaaagaggatacaaacaaatggaagaacattccatgctcatgggtaggaagaatcaatattgtgaaaatggccatacttccccaggtaatttatagattcaatgccatccccatcaagctaccaatgactttcttcacagaattggaaaaaactactttaaagttcatatggaaccaaaaaagagcccacatcgccaagtcaatcctaagccaaaagaacaaagctggaggcatcatgctacctgacttcaaactatactacaaggctacagtaaccaaaacagcatggtactggtactaaaacagagatatagatcaatggaacagaacagagccctcagaaataacgccacatatctacaactatctgatctttgacaaacctgagaaaatcaagcattggggaaaggattccctatttaataaatggtgctgggaaaactggctagccatatgtagaaagctgaaactggatcccttccttacaccttatacaaaaattaattcaagatggattaaagacttaaacgttagacctaaaaccataaaaaccctagaagaaaacctaggcattactattcaggacataggcatgggcaaggacttcatgtctaaaacaccaaaagtaatggcaacaaaagccaaaattgacaaatgggatctaattaaactaaagagcttctgcacagcaaaagaaactaccatcagagtgaagaggcaacctacaaaatgggagaaaattttcacaacctactcatctgacaaagggctaatatccagaatctacaatgaactcaaacaaatttacaagaaaaaaacaaacaatcccatcaaaaagtgggcaaaggacatgaacagacacttctcaaaagaagacatgtatgcagccaaaaaacacatgaaaaaatgctcaccatcactggccatgagagaaatgcaaatcaaaaccataatgagataccatctcacaccagttagaatggcagtcattcaaaagtcaggaaacaacaggtgctggagaggatgtggagaaataggaacacttttacactgttggtgggactgtaaactagttcaaccattgtggaagtcagtgtggcgattcctcagggatctagaactagaaataccatttgacccagccatcccattactgggtatatacccaaatgagtataaatcatgctgctataaagacacatgcacacgtatgtttattggggcactattcacaatagcaaagacttggaaccaacccaaatgtccgacaatgatagactggattaagaaaatgtggcacatatacaccatggaatactatgcagccataaaaaatgatgagttcatgtcctttgtagggacatggatgaaattggaaatcatcattctcagtaaactatcgcaaggacaaaaaaccaaacaccgcatgttctcactcataggtgggaattgaacactgagaacacatggacacaggaaggggaacatcacactctggggactgttgtggggtggggggagggggagggatagcattaggagatatacctaatgctaaatgacaagttaatgggtgcagcacaccagcatgtcacatgtatagatatgtaactaacctgcacattgtgcacatgtaccctaaaacttagagtataataataataaaataaaataaaatagagaagcccttgaagccttagggaagaagaaagaaaatatttggagagcacctcttatgagccaggcactttcataatagcaatttccctgagaggtagactctcccctactttaatgatgaagaaactgagaatcacagaggtcagtgatgtccctaagcttctgaatcgtcaatagccataatacagaggggatctctctgacagactctataacccatggttttttcactgagtcttcttgccttttttataagttagttcgctttcatgaatttacttcaagttgtcattcttttcttttcctggtttcccagcatctgtgttttctcaaggatgaccaatgctgttaaaaggtatcaatgagaatagtgtttctccattttttctggctacagtgcattttatagagcaacccagtacatggaccagtacagatacatagtcccatcactcaccctgtgccatggttctgatattttcttttccgttctattttgttttactgtttcctctggttaaaataggctgattgtgaccaactaacttggtctcacagccctttaacagtttgcaacccataatttgagcccatgattttgaaacatggctcatggctcgaatatagatcagcagagggcttaacggaagtaccttcaggagcccattctcctgtcccagccgggctcatatccggctccagtgtagctgccacccacattctccccgctccccaggagtgtgaggattcctcttcaacagcattccagcgttaactttagacattgggaacatatcccacttactctttagtggcttcctatacatgacatttctttttaagccgtttaactatgcaagatcataactcactctgcctattcttgcctttgatcttattttatattttcttcctgtttggcttattccagatttttctgagatactttatttagcagcttcattcttaagcgagttttaaaaccaaagcatttaagatttgccattcattcatcttggaattctagcttatttttcttttttattttcatagtacaggtattttattaaaaataaaattaatggaaaaatatcttatttttaatgtaccatgctctaatattacttcttaaaaacaagaaatcaaagaccagtatgcaaatagggtaggatgacaacactatgttgttgtgcctaccaccaaggtaatatgatagcatgtaacatgaatgtgtaattgacatgtaccactctatctcttccctagccctccaagccacaaaactgtggtgaatggaaaagaatgtataaacttcgcctcatttaattttcttggattgttggataaccctagggttaaggtgagtagcacatattgctgaagtggacagataacattactgatttaagaaactagacataaaagacaaaggcaggctgggcgtggtggatcacttcaggtcaggagtttaagaccagcctggccaacatggtgaaaccccatctctaccaaaaaatacaaaaattagcagggcatggtggcacatgcctgtagtcccagctacttgggaggctgaggtgggagaatttcttgggcccaggaggtggaggttgcagtgagccaagatggtgccactgcactccagcctgggcaacagggcgagactctatctccaaaaaaaagaaaaaaaatcatagtattggaaagcgctatgcaagtttttcccattactttttgtctgacagagttgtgagcgggacctagacagagagaggcaagagtctcttatgtggctcagtgttaggcagcaaccacagaactgaacaggccagacctagagaatagttggagaagggtctaggaaattgctctctctcctattgggattgtgggctaacaggcattttccaggaaagacttggcccacaaatgcagaaaagttaaccaggttttgagaatcaggctagtataacttttccatattttaagtcatatactcaktctttacacctgtctcttctttatattctgttagagttggaggaggaaggaaggagctctgtgggttaaagaataggaaatgtttgttttgaactcttaaagataaattattaaagtataattcttgtacttcaataaaggcagcagctttagcatctctaaagaagtatggcgtggggacttgtggacccagaggattttatggcacatttggtaagtttttgttgtgttctctttgagactactgctttcaatagttaagattcaattttaggctgggcatggtggctcacacctgtactcccagcactttggggaggctgaggtgggaggattccttgagcccaggaatttgataccagcatgggcaatatagggagaccctgtctctacaaaaaataataaaattagccgggcatggtgggctcatcctcgtgtgcatgtgtggggattgcagcgtgaggaacgagtgcagagcagcagtactctttatgcaggggagatggcctcatacttctgcccacagtccaytgatgagagcggaacccctgccatgactagccacgcagggggctgagaaacagctctaggaagaaagtggagagcagattgcctggggtggagggaggggggataaacagtgtagttttttatctttctagaatgaagatgaaggatcattgatttccttgtgtatggataatccgggaacaggccaactaaatatttgatgaatgtatgatttcaaatacagtgaattccctgggagtcatcaaagaagaccggcattttatggttgtttttattaagtgtatattctttgctcctgaaaatgttattaaataattgtttaggccgggcatggtggctcatgcctgtaatcccagcactttcaaaggctgaggcaggcagatcacctgaggtcaggagttcaaaaccagcctggccaacatgctgaaacctcgtctctactaaaaatacaaaaattagctgggcgtggtggtggatacctgtaatcccagctacgtgggaggctgaggtgggagaattgcttcaacctgggaggcagaggttgcagtgagccgagatcatgccactgcactccagcctgggcaacagagcaagactgtctcaaaaataaataaataaataaaattgtttaaatgaatttattgctggaaatagcattttggcttataaaatgacacagtgtggggaaagtagagcaagggaaatatcttccatcttccatccttgtttccatttctggatctttttgtgtttttttactttaacagttaagttttttacttttgtgattttttaatgtragggagcaccttatgttatccctaagctagtttggtgattacattatttgtcttggaaacagataaggagaagtagtgtccaggaatcctacagctggaagtgatctttaaaatctttagttctaaccctaaaattagaaattggccaggtttagtggctcatgcctgtaatcctaacactttgggaggccaagaagggaagattgcttgagcctaggcatatgagactagcctgggcaatgtagtgagaccccgtgtttacaagaaataaaaataaacctggcactagcgtgaacctgtagtcccagctacacaggtggcggaggcaggaggatcccttgatcctaggaggttgaggctgtaatgagccgtgttcacaccactgcaattcagcctggatgacagagtgagaccatctcaaaaatagtaataataataatataaaccaagtatcctgacttccattcttgatggcaagtttgaagaaataagctcatatcagagcctcccactttcctctagtctaatgcaaatgggttgtttgcttggtttttgattggtagggaattattttcttggcaggtattagaaaactagaaaaggcacattttatggggttgttgattgtaatctgatgaaagctttctgtgactgcttgctgaggtaaaggaattgtttttgtaggtaggtacggaggagagcagcagcttgttggtattagatatcagggagtttttgctgtatttttctaggaagtaaagaagttgtttgggagggtaaaggtggggatcattgaaagaggttcagaggtgtagggagatgggggaggttgctgagtcagctggcagggcagggacagctgtgtagtaggaggaagagaaggaaatacatagccaacaatctctggctaaggaaggattggagatggtgaggagggagtgggtgaggttgatggtttgctggagataattagatggaggggtagagggtggcaagggaatgggagtgagacaaagagtaagtataaaagaaaagaacttcatcagggtggaagaattggagagtaccttgccacagaaggtcatctgtccattctgagagagttaagggtggcagcttgagggtgacaccacgagatatcagctacaatggtctggagtaaaagcgtgaactggtagtatagacaaaagcagggcatttagaagtacgtgagaatggttagtagggacataagtagacagagtttaaatactggggtgactgtgtaaaggcctactgtaaataaaaggtatacagggttattgttctttttcaggaatgtgggtaagtttaagggaagtgggggagagtacttgcgacttcaggaggaggcagaggagctaggctggtcgtctgatgggcacagttttatcctggagcgatgaacccagtggggaggattctgcagacgactgtggttggggtactatagacgaccaggtaaggtcctgtccaccgaggttctagagtttgaggggtcaggttcttaacaagaactgaccgtccggctagggtgtctttatatggctgggtatctggagtaggtaaaaggaaattggcagcttagtggatttcctgtctagcctgttgaaggactggaagataatcaccaagaggggtggtgtctgaaataaggttgggacccagcagaaaggtgcggccgtgtaagagttcaaatggactgtacccggtgggttcccagggtgtggctcgaattcggaggagtgcaaggggtaggagagtggtccagtcttttttaagctggagggtaagtttagtaaggtgtgtttttaaaaggtccttggctttttctacttttccagagaactgagggtgatatggggcatgaagattccattgaataccgagggcttgggaaactgcttgagtgatttggctgatgaagaccagcccattatcagactgtatggaagtagggagaccaaaccggggaattatgtctgttagaagaaggaaataactgcagtggccttttcagccttcagaccccgtgggaaaagcctcaacccatctgatgaaggtgtcgacccaaaccaggaggtatttgagtttccagacacggggcataagagtagagtcaatttgccaatcttgagcagggataaattgtcgtgcttgatgcataaggaaaggaggaggtttaagaaagccttgatggggtagtagagtggcattatagcccattgagaggtgattgttttgaggatggatttccaggctggaaaagaaatgagaggttctaaaaggtgggttaaagatttatatcctacatggaagtggtcatcaaaggaggagaggatagagtaagcttgagaggcagggagaaggagctttccatgatctaaaaaccagttgccttgagtgggaagtgactggtagtttaaggtttcagaaggagagtaataggagtgatagatgagaaggagaaatattggccactgggagcagatactggggagtttgctgtttctttggctgttttattggcataggtgtttccttgggcaatgggatcagaggttttttggtgtcctttgcagtggattactctggctttggctggaaggagggcagctttaaggagggctttattaagggggcattgataatagaggatccttgtgtagtgagaaaacctctttctgcccagttgacagggtggcggtggaggatgtgaagggcgtatttagagtcmattagatattaacatgcagtcctttgccaagagttagggcatgagttagtgctattaattcagcttgttgagaggttgtaaatggggagagtgcagcagtttcagtgatagatgagtgagacacaatggcctatccagcttttcctggtgttaatcaactggtttttgaagaactgccatcaataaaccaagtgtggtctgggtcagggacaggaaaaagggaaatatggggaaaaggagaggaggctatgtggattaaggaaatacagttgtgtggattaggatttgtagtgggtagtaagtgagaggccgggttgaagtcctgtccaaaggcaatggtccccatgagattttcaataaagagtgaatagagctggaggaggtggggagccgagagtatgttttatatgtgaagaggaaactaagtcttggaggttgtgagtgctataaaaggtgagtggggcatagcctgtgattttgagagactctaagagtataagggctgtggctgctgtggcatgcaggcatgacggccagcccaggactgtaagattaagctgtttgaatacaaaggctactggtcacaggcctggttcctgagtaagaattcctacagcgcagccctgcgtttttgctgtgtggagaggaaggagggttgggaggagtcgggaagcgcttgagtaggggttgcctctagggccttttttagagtaaaaggaggggcgagggaaggatttaggatctgtgggttcagctaagtttccttttgtgagtttatagagtggtttggttaggatggcaaaacctggtatccaaaggcagaagtatccaacaacgtctaagaaggagaggagtagttgtttggtggtggggattggaatttggagattagctgaatacrgtctgctggaagtgcacacctatgttggtggaggattataccaagataagtagaaatttgagctttggagggggatactctgtaccccttggagtagaggtgttgaagaagcaggatagtgtcttgctgggaggattggtaagaggggctgcaaagaagaaggtcatccacatattgaatgagatgggaaacaaatggacgaaaagaaagcaggtcacgggagagggcctggctaaagtagtgtgggctgtctctgaaaccttagggcaggacggtccaggtgagttgttgggactggtgggtgtcagggtcagtccaagtaaaggcaaaaaggggctgggaagagggatgtaaggggatggtaaagaaggcatctttgaggtcaataacaraataatgagttgtggaaggcggtattgaggataggagagtataagggttaggcatgacaggatgaatggggaggacaatctgattgatgaaacgaaggtcttggactagcctgtaggatttatctggtttttgaataggtaggatgggagagttgtaaggggagttggtagggactaagaggccatgctgtagtagacaggtaataacaggctttaggccccttaaagtctgttgtgggatggggtattggcattgagcaggataagggtggccatgtttcaatgggatgataaggggtgaatgatcagttgcaggcgaaggagtggaggtatcccatactttagggttaaggtggggagatgaaaggagaggttgcgagggaggtttggaattggataaaagggtagctctgagatgtggctgtagtccaggaatagtcagggaggaggataatttagttaaaatatcttggtctaataaggggactgggcaggtggggataactaggaaggagcgcataaaggagtgttgcctgatttggtaccagagttggggagttttaaggggtttagaagcttggccgtcaatatgcacaacagttgtgggggcaagggaaacaggcccttgaaaagaaggtaacgtggagtgggtagcccccgtatcgattaagaaggggacggacttaccctccactgtaagagttacccgaagcttggcgtctgtgatggtccagggggcctccgagatattcgggcaacgtcagtcttcagccgccaagccgaggagatctgggaaggagtcggtcatttcgggtttgtactccaggagctccaggattggtgatgagagtcagacagtctgacttccagtgagggcccacacaggggcatggcttagaaggaatcccgggccgtgggcattccttggcccagtggccaggtttttgacatttgaagcaaggtcccagaggggcagttaaacgctgcggtttgtacgccttgaagtttttgcaggtaggcggtgctgctggggtttgttttaaggtggaggcaagcatttgtcattctgaaaggcgcgctgccgcctggcagcctcttccctattattgaacaccttgaaggcagggttgattaattcctgttatagggtttgagggccagactctaatttttgaagtttctttctaatattaggagctgactgggtaataaaatgcatgttaagaataaggcggccttctgtcccttcagggtttggtgctgtatatcgcctgagggtggcagctagatgggccataaactgagctgggttttcacctttgttctcagtggtctcctttagtttgtcataattcacggctttatatgcagctttctgaagcccttgaactaaacaagagatcatgtagtcctgcctggctatgccttgggcccctgcctggtaggtcctttggggccttcacgggtactgccctagtgcctggccttggaggccaggctcaaggcgccagcagtcatcagcataagattgagctagggtccaaagtgaagatgacatttaagtcattccaagtgggattataggactgtgttaagtattggaattcttgtatatatttgagtagggtctgacggaaaagagcctgaatgctgactgatttgggaaaggtcagatatagagaaagggatgtgaacctggacttttccttcggctcctgccacctctcaaaggggaaattgctgggcaggggcatgggggtcggcttcagggtcaaattgtaagccagagcaggtgtgaggagggatggtaatgggagggacgtaaaggggtggcttgtgggtagaactcggttctgagggggaattagggccaggttcggataggtgggttggggggagaaagattgaaggggttaacaggtaaagaggagtcagcatccccagtggaagaaggagaggtagatggaagggagataaggaaaatttgggatggaccacattgggagcagagactagggagagatcatagtaaaaaatgcctggatgtagggtacctcagaccatttgcccattttgcaaccgaagttgtctaagtcccgcaaaatagagaaattgaaagtgctgttttctgtccgctgagagccattgtctaatttatattggggccaggccgtgttacagaaaaaaaaaattagacgtttaggctttagattgggtgaaagctaagaggtttgaggtttttgaggacagaagccagtggggaagatggagggtgggaggttgcccatgttagaactgggaaagtttgaggggaaagaaagagacaaggaaaagagcaaccactagcatcctcagtgggcatccccaatggaggtcccgggttgtgtggctggcgaatggccaaggctggcatccctggcattcaccaaacactgagggaagactgtcttcccaagaagagtccgtgaccaacgttggattttggaaacatggataagaggaaggttccttgtctcaattttgaggagagaaaaagagggagagagatgaggagagaccgaggcagcttacccgatccgtagacagaggtgggagtgttcgcgggggctggtctgaggtcctgaggtcgagggaagtctctttgatggaagagcgtggggaggataggggagaggtctcccagagagagttcccctatcccgggctttcggcaccgaatgttatgcatgcgtccaattgaagagacaacctgaacaggctaagtgtgagcaacaaggctgtttattcactcgcgtgcaagtgagctaagtatgaaaagggagtcagcagagggtggtgggattggagatggttttataggttaggggtaggcaatggaaagttacagttaggggctggattttgcaggtaggggaagaatgtcacaaggtacattatcacaaggttacagagcacagtgtcatgtgtcatgaggttgattgatcagttagggtagagcctgttacaatggtagaatgccccaaggctggctaatcagctaagacaggtactagccgtttttcttcttttgtggttttcctgttgtcccagattttctggctgcaggacaccttctggatgtgtacgtgtgggtcacaggggtcacgatggcttgaccatggcgcagcttggtcaggggaccttacaatttggtcataaaattcctagatctgccacttcctcttaccagtcatgggatcatggttttctcaggtgtaagtgggaacaatcattgcttgcatggctttagaacactttgctaaggatcacataagataccgcatgtgaaaacatgaaaaacatttggctctgtatgttccagtgagtacctaagggctatcacttatactcttaagaagaaaaattgtgcatgtctctagggatatttttgtgtgtgtgttgttgtggttgagacggagtttcactcttgttgcccaagctggagtgcgatggcgtgatcttggctcactgcaacctccgcctcctgggttcaggcgattctcctgcctcagcctcccaggtagctgggattacaggcatgcgccaccatgcccaactaatttttttttttttttttttttttagtagagatagggtttctccgttttggtcaggctggtcccaaactcctgacctcaggtgatcctcctgcctcggcctcccgaagtgctgggattacaggtgtgagccgccacacctggcctctagggatttttttttttttaaggacagtatgtatgcaaaaatatgaaggccttaagagaaaatgtagtttgtttctaaacgtcctaaagtcagctattttatggtgttctctctggaaaacaaccaggaaggccgtaatctctcctccttgtaagtgagaagctgaacaagtggctcttattggaagatagtcttaacaattcagaattcacatagctttattagaagattgcctaagtgtgaccaggtttttgcttttaaaataaaaccttttcttttattctacaagtattaatgtaattaaacaaactcttaaatagcatattgcttgttccatgccaggcagtgttctaagtgttttatcagcattaacttgtgcagtcatcctactaacccttgaggaaggtaggactatcccccctatttgacagaggaaggcaccaaggctgcccagggctgaacccccagacctaactacaatctgagctctgtgatgaccgagatagtgaggcctcctgtccctgaggttctggtgagggagccagacaggcagataagcaagtgcaagaaagtgctgagggctgtgaggtgtgcggaggcattctaggacacctccctctatggtcacttctctgccgtgtttaatactaacagtgaattgtagaatatagtactttagttttattccatgcaaatctacagctccagttagtgaaatggatcatacacacagaagatatggacatcaaaagttgaagaaaagtgagtgcccttgtagttttcctgcttgctgccttctcctcccttaggttgagagtttcttcgttgcacaaaggagcatcaagagaaacaagttcttcagttacccatatttacctgtcacaaaacctgctttgcaaggctgacatcagctaaaacccagtgtcttctgatagaaggaaaagactagtctttttgaacttttgggactatgctagaaccagtaagtcattgatttattgttgagagattcttcttcccacttatggcaactgtatataaacagttacgagtatacctaatgatgggaagatttgtaacatgctgattttcatcaactgggtaactcactctaaagtcctgaaacagggttatactcagttttacattctcatcattcattgatgaaaggagtcatttagagctaagaagtctacagaatgatttaaaatcccttttgtggttagcaaaaataatttgtatacatagcatgtttttctttttgaaatggagataccaaatgaaagcaaaccactgttgcctgagttgtccttctggctgaactgtgaaggtttgtggcagatactttcaattagaagcaccattatactttgaaggaggcctcctacctgggaacgtgagaggtggcaaagtgatggcgctcagagaacagtaatgaggatgagaaggaagacatacccaagagtaacccatgctcagctacttggctgttttcctctttcttgctagattttgcctgaaaccttttctgatagcatctctcctagagggcggctgtcagatacagggaatcacggccttggatttcatgtgatcgtagtgtcagaggtcttatactcgaagatcacctgggatacgttcttctaaactctgtgtgttgttgtaaagtcctacgtttatttaatgttggtgtaatgaaaagtgtcctttttataaaataactataaccaattggtaatggaaatcaaatgatattgactgtgttaacgtacaaataggaagaagcatgcctcatattttatcactatttgataggaatggaattaatagttcattttaacagttttgtaacgttctttaggaagtctgtaaatatactgcctcctgccaggccgtcagccctctctgctgcccctagctcaggaatgcccagaccgcctgccattgcctgtgcttgggttctcatcagtagacacatcacggctcactcatcctgggtctcaaaatccaactctgtggcctctgatttccctcctttctcccatagcgctctaagactggaggggcctggcttcttcgagcgctctccacacagggcctgtggtgaaactctgttatctagtcctccagggttgggtcctgccatagttaaaagagctaagggaattttttaaaatccctttccctccttgataatgtctcattttaaggctgttttaaagttttaagattctaagctggccagtggcctatttattctaagcatcactggtcctccgtccgagggcatgaagcctcatggttcagtctgagaggtaaaaggctgtaaggagccatgatttaagaggaaaataaaacatgtcagtctaataattataatttatcctcactattatgtcaacatcctccttacagtgcatctataaaaggactatatttccttttgtactataaatttgaattcttcattacacttacaagaaattcagacagaatcccagccccagaaagtgatgggaggtgccactactaaatgctgacacagattgttagaggagtggttactggagttctagtaagtgtcaccttcttgatgcaaagtatacagggttctttttgctaaaatgcaaacagacattaataagttaacatcaaacattggtgagacctcaatggttttggtcaaggacagttaatgcagggaaacttggtaggccttgaagtcttacagtagagtgatatcaaagcataaccagaagttggaactgccccagtaacacattttgcagatagatgcgtagctgatttagttcatgtattttagaagttgtatgggcctagaattattttaatagatcttgtataatctatcatttaaaaacaattccattttggccataaggtgaaagtattgataattatactgcttgtgttcttttatttgttctttagtagagaaaaagaattataaggcagtttaaccatttaacttttttaactgaaatagatgttcatttggatttggaagacckcctggcaaaatttatgaagacagaagaagccattatatactcatatggatttgccaccatagccagtgctattcctgcttactctaaaagaggggacattgtttttgtgtaagtaaactttacstagttttctaatagcagttcctttgaaataatactgactgtcttagagaaatacttcattagaagttatctgcataaaataatgctgctttttgtttttcaagaaatagtcacctcaccaaaggtttcaaaatttgtgaaaccttcacttaaaagatgcttaacggtgtctatagtcatttatctgccatggtaattatttattgatgtccagatgaggacagctatctgccttctttgtgcagctctgtggctgtgtggtatcctagtctgtggtcaccacctcacgttgtcagtcagactgcccggcaaagtctctccatgtctcatcacccattcaccccgtcacctggtctcagctgatcttgcttcctaccttattaaggatagaggagccgtgacttggacacttctttgactacccacaagtggatcttcacactcgcgtgcctgtgctgaatgcatgctaccgaggtttactgtgaagggcagggtacagccaagcaagggctggcaggccccaggcagctggttaaaccagtcagaagcatctgctgccccaagccaagccctgtcgtcctatgagtggactaaaatttggtctcaaattgactttaatttcctcttctctgttttttttttttttgtgtgtgagatggagtctcactttgtcaccacggctggagtgcaatggcgcaatcttggctcactgcaacctccgcctcccaagttcaagcaattctcctgcctcagtctcctgagtagctgggattacaggcatgcgccaccatgcctggctaattttttgtattttcagtagagacagggttttaccgtgttggccaggctggtctcaaactcctgacctcaggtgatccacctgcctcggcctcccaaagtgctaggattacaggcgtgagccaccgcacctggcctttttttatttttattttttaattttttttattttgagatggagtttcactcttgtcgcccaggctgaagtgcagtggagtgatcttggctcacagcaagctccgcctcccgggttcaagcaattctcttacctcagcctctcaagtagctaggaccacaggcacccaccaccaaacctagctaattttttgtatttttagtagagatggggtttcaccatgttggccaggctggtcttgaactcctgggattacaggcgtgagccactgygcctggcctcctcttttcctttttaacatcacagccagagtaatctttttaaaatgtaaatcctattttgtcacattttatttaatacaatttagagcttctattgttcctaaaataaagacccaagtcctttgtatgatcttgtgagctctgcatcactttttcaggctgattttgtaccattttccctgaggtgtttaagctgtagccttgccagccctgtatgctagtgtcctctcaccttggggcccacgcacatgctctttctgactagaacactgttcctcctcccttctcctacttaaccttctcatccttcacatacgtcacctctgcagggaggccgtcccacacctcagagcaggtcaagacccctgctgcatgtggacaaaatcttacagccagagagaatttattgttcttgtttatccatgctcacacgagcactcaaactgcctgtcaaggtcaccctgcttctcaagcctccctcccacacacagacacacacactctctcacacgcaccctgctctgctcatttgcttcatacttactgtacttttcttttgtagagcttgtaacagtttataattttatatctgtgtggttatttgcttctgtttcttgctgggagcccattacttagaatagtatttatcatttagtaatggtcaataaacagtagttcagtaaatgaatgaaaggaagctggagctcagaataggggccagataactgtgttgcagagcctggcatccctcaagccctgcactggcctcttgcttaccactcaccgttggaacgcttgtgcagcgacagaaccttctatcataattactacagagctgactctacctggggcttctgcagtacatgtgacccattcctcactatagccctacagcagtctaggagcactacagcaaatgtcctgggtctaagtagtatactaatgtgaccataaaaatgaatatttttattaatttttggcaaatagtttaaaaaataatgtgaaagactcatcactaactgaagcgccattgacttaaacagtgtttctaggtttttagtaaaagcagagttacagacagctgcagtgtcattcagtgtcactttatacacaagcaccccactataaattcttttaaagtccagaaaaagttgatggttactggtgaactcctatgcttcctttgataaatactacattgtgtttttttttttaactgctaggaaacataggctaaattcacttccatgtgttatgcccagtgtcttaaaatttccatttccagtgagttgctaacctgtttattctgctacgtaattttaaatactctacctgaaatgtgtttgaatgtaggagtgctagaggtaaacatggtgtttggtaaattggttttgataaatttgtcaggcatagacactgtgtgatgcttcatttccttcctttcagtaaacagtgttaatgctttgccaatagtggggctcagcacagtggtcattcatggacttaagtctgtcctatcactccactaagtatgtgttcatgctgcttcacagatctttttaaaattaaactttttacattcagataattgtagattcaaaagcacttgtaagaaataatatagaaatcctttgtactttttactaagtctcttccagtgaggacctcttgcaaaacgaacagtttcacagccaggatattgactttgtcattgtcaagatgcagaacatttctgtcgccacagggatccttcatgttgccacatccacattcctcccatctgcccactccttaactcctggcaaccactaatctgttctgtttgttaattttgttattttaagaattttatacaaatggaatcatccagtaggcaacactttggggttggcttttttcatttagcgtaattctctgatggttcatccaagttgttgcttgtatccagagttggttccttttgattgatgagtattactccatggcatgaaggtaccactgttattgaagttaccttttaaagacatctgagttgttgccagctttgtgctgttataaaaaaaaagctgctctaaacattcatgtacattcatgctatgtgagcataagtttttatttctgtggaatacatgccaaggaatgcagttgctatgtttatagtattgcatagtttttaaaggaactcctaaactattttccaaagtgtctataccattttatgttcccatcagcaagatatgaatgatcaaggttctccacatcttcagaagcatttggtgttatcactacttttttagccagtctgataggtgtatagaaaaatttatatttttctgatggctaatgatgttgaacatccattcatgtgcatatttgccatctcttcagtgaaatgtcttttcatgtccattttctagttgtatgatttgtttttatactaatgagttttgagagttctttatacattctagatcatagttctttatcagatatgtggtttgcaaatacaaattttgatgtccacgtattcattgctaaaatatagaaatgaagtggattttttgtgtgctgagcttgtatcctgcaaccttgccaaactcacttaattagctctaggaactgtttttctagattgcttaggattttccatgtagacagtcgtcatgtcatctgtaaatagttttatttattttctaatctacttactttttattcccttttattgccttattgcactggcaagaacttccaggactgtgttaaaagtagtaagagaagacattcttgccctattcctgatattagaaagcgtttactctttcaccaataagtataatgttacgtgcagatttcttacagatgctctttattacattcactttcctgcacctcatcttttttttctgagcattttcattgcaaatcaatgtgaatttggttggtcaactactttttctgtattggttgatatgatcatgtgatttttcttttttagtctcttaatgtggtggataacattgatttattttcaaatattgaaccagccttgcatacctgaaataaataccacttggttatggggtataattttttttttataaaaagctaaattcratttgccagtcttttgttaaggattttgaatctgtgttcatgagggagattgtcctataatacactttttttgatacttactttggttttggtagcagaataacacttcacagaatcaattgggaagcgttctatcttctattttgtggagctatttgtatagaattacttttaattatttaattgtttggtagaattctcccatgaaaccatctgggcctggagagatttcttttttgcaagtatcttaattctgaattcagtttccttagtagttatcaggctattcaaattatctgtcatattgagtgaattgaggtagtttgtgtttttcaaggaattggtccatttcttaaaagttgtcagatgtacatgtgtggtgctgttcatggtattcccgtattattctgatgtctgcagagtccacagttatataccttgtttcactcctggtattggtaatttgtgccttttctcctgttttctttgtcagtcttgttagaggtctgtcaattttattgatcttttgaaagaatcagctctttgtttcattgtttttctctattgtatttttattgtcagttccattgattgatttctcctattatttcctgccttctgctgacgtttggtttattttgttctttttcttgatttggaggtaagagcttaaattattaatttgaaactttttctcttttcttgaatgttcatttagtgcaatgaattgccctctcaacactactttagttgtgtctcacaaattttgatgtgttgtgttttcatttgtatttagttcatttttgttttgttttaagaaatagggtgtcattattttgctctggttggccttgaactcctgggctcaatggattcttttgcttcagcctcctgggtagttgggactacaaaaacacaccactatgcccagcttacactttccctttgacctatggattatttagaagtgtattgtttacttttcaggtgtttggggactttaaatttgttgtagtttggtttatggctaatacggtagtctattttggaatatcttatatgggcacttaaaaaatgtgtattctgctgctgtttggtggagtgttctataaatgtcaagtctttttggttgatggtgtttttgggttcttctgtcttggtgattttctgtctagttcttctatcagttgttgaaggataatgaagtttccaactgtaattgtgggtttgtctatttctttcagttttatcagtggttgcatctcaaatttagcttttttgtttagttcatatttaggattactaagttttcttgatgaattgacccttttagcgtttcataatgttcttctctgtctctgataattttccactttttgtgtatgtgctgccaaagcaaacactctgataattttctttcttccaaagtttactttgtcagataccctttttattattttttatattacatagttgtgtgtataaatctgtattttttactacctatattattatatttgtagtgagtttcttacagacagcatatagttgggtcatgttatttaatttattctacctgcctgtctttaaatcatgtatttgtacatttacatttaatgtaattattgacatagtagagtttaagtctgttaaaacaaagtctgccattttgctttttgtttcttgtttgttcactctactttgtgtttctctattttctcttttctgcctttctgtgggctaattgaacatgtttttagaatttactttttctttgtatagctttttttagtcattactctgagtgttacattacacatatattataatagactactggtgtcattgtaccaattcaagtgtagaaacttttaccttcctttacattcctttatttgcctcatttacattataattgttttaaatatttcctgtacatacagtgagaaccacatcagtgttttaatttttgctttaactgtccaaaataatttagaagactccagaggagaaaaaaagcctagtgtatttgcccatattttttacttactgtgctccttcctccttcctgataatctaacagtattcttttatggcttttttcctatttagaaggcttcctttggccatttctttagggtaggtctgctagtgacaaatattcttcatttttcttaactgagaatgtcttgatttcaccttcattcctaaaggatatttttgctggttataggattctgggttgacagttattttctttcggcattagaaacacattgtgatgctttttttctggtgtctggtttctgatgaaaaatctcccgtcattcaaattgtttttctctatgtataaggtgtcatttttctctggctgctttcaagattttttttgtcatttgttttcagaagtcatctatgatgtgccttggcaactatttgtttgcattagtccgtatggattttgctcagcttctttaatctgtagatttaaaccacttgacaaatttgggaagtttttagccattatttatttgaatacttttttagctccccacctctttctcttcttctggaattccaatgacacaaatgttacgtcttttattataatcccatgggtccctgagactctgttcatttctttctagtctattttcttcctgttgtgctcagtgaatgatttcttttttctttgttttttttttttttgagacagagtctcgctctgtcacccaggctggaatgcagtggcgccatcttgactcactgcaagctccgcctctcgggttcacaccattctcctgcctcagcctcccgagtaacccggactacaggcacccaccaccacgccaagctaattttttttttttttttttttaagtagagatggggtttcaccatgttagccaggatggtctcgatctcctgacctcgtgatccacccgccttggcctcccaaagtgctgggattacaggcatgggccactgcgcccggctgtcagtgaataatttctattgcttgtctcagttcactgatccttcctctgcctccattctgctgctgagcccatccactaagcttcttattttagtaatttagtttttcagttctgatatctctgtaggactcttctttgtatcttccatttcatcactgaggctttttattatttcatttgcttcaggtgtcttcatggtggctcattaaaatatttttatcgtggctgctctaaaattgttgtaagataatcttgatatctctgtcatctcactattggcatttgttgtttcattctacttgatatcttctggttcttgatataagggatatttgatggaaacctagacactttcatattgtgccgctgtagtccatgtctagtttaagccatctcttttatttggctttctctgacatgattccaacaggggaaggggctaggggactgctgcctcatactgccaggaggaggaacaattcaggggccctactcggcctccattgacatcgttgggggtttctttgttgctgctgggtgatgctaatagtcctgactctccactcgccctcctgtgacactgcccaggaggagatggggagggtgcccactactcccaagtgcaggtggaagttagggctctcyatgtgttctttgctgacaccacagtgggggtggagggggtccacttgttaccaactgataggaataaaaggctcagcttcctacttggccttccctgacaacaccctaggaggkgtgtcgccttgttacagcctctcgagggtcaaagtctaagttcccttctcagcctttgctgacatagatggggctgggtacccctcatttttttctgtggtgtttggctacagtagaatagtcattgtctaaaagttttctgtctagctgggctgccagtattacttctcagggcaaaataatggcagagtaatgtgtcagtcatatcagagatgccactgatggtgaggcacaccagtattttatgtttcttagaaagagaaaagtatgtgaataaactgatatgtcatccatagtaagatgcatgctaatttcagagagattaatatatagtgagagtgtgcttcttggaatagattaaatatggtagttatgtgaaaaggactcatggatgaagagcaaacaatgatgtataaatattcaaacatgttttatttatttgctatgctcatgttaacaatcagtgattggtcagcttasaaaaacaagcattcctttttgagaatgttgacaagaccctttaaacccaatttggtggatctcttttccttgcagagatagagctgcctgctttgctattcagaaaggattacaggcatcccgtagtgacattaagttatttaagcataatgacatggctgacctcgagcgactactaaaagaacaagagatcgaagatcaaaaggtatgattcttttgaagaaaattatacagttcttttgtactttctaaccagctaaattatatmtgaaatggtaatttgtcatgaaaacttgcctgtggatcacatttggatattaaggtgttcctgcttattaaatgtacttggtgttggagagccaagtctgattgtaattgccttgtcattgccgtaattacatatagcaarttggagggaggtaatccaagcagctttctgagagatcaagagaggctgaaaaacagcatgtgcttagtgaggcagggagatgtctactcatagctgggcataatgacaccaaaacttactaggcctttaatgacatgtacctagtgaattcagaataggcttattcataccagaataaatcatgtatcaattacatgaggaaagaatggcagcaagcttattatattaatatatgaacaaagtgaagccctttctccccaccccacctgtatcctgctctgagcagctactgcctgtgggaaatgactgcccctaacatggtctccttccagcttgcagccctgttttcagctgtttcctctcgagaacctaacataacccaggtgatggtggtttggaagtagctccttggtgttctgattagggtgaaacagaggaagtgtgttcagagcatcattgttaaaattacaatttattttcccctgatgacatgggtaagtaaagtagctcaggtctgtggttctgagcaggacaccatgatgtgtgtcttcatctcagacacagtttcaagtggactttgccagtgcaactcagtcataactagaataaatgataaaaatgctcatcacatttcttaattttgtgtattttgtgttaattttcaattttccaaatatttgcattattcatttaggattctgtcatctttgtttaggtgtcagcctaagtgcatcacttcatgaatatacacattctcatgatgaatatgcatgatcttgccattttatactaactctgctctaggctaacrtttcacatttacacaatttagaaaaatctataggcaaaatctgaaaacagcccattccactgattaatttcttttacaaagtataaaaagatgtttcttatgatgatgcagtaatagaaagctagtctgttttcagtactagaactgcagtctgctgccatttgttttgcctagtattgtataaatttggaaaacatcagattcaagttttgtatgtgctctttttctacaagatctgtaagccatagaacttttttttaaatgagcaacaagaagtaaaattaaatatcttgaaacttatttctactttataatttttacttttttactaatttatatttttcttgctgagagcaggctttctaagtaactctacattttggtttttagaaatattcattttcagtttcattttcacataaataatctggtcgttaacactttgaatgttttctttgtccattttccaagcgccatggttcatgaattgttttttatcccctttcctacagggttcccataatggtcagtggatatgaacagtagttcataaaaggaatacacataactatgaacaagtgaaaaatagcctggcctcactaataattaaggagattaggctaggagttttgcctgttaaattagggcatgtttttaatagtaatagtcagtgctaacacagatgtggtgagacaaagagtgttcctatgacactggaaggagtttaaattggcactgcctttctggaaggcaaatgggcagatacattccaggatccaagtaattccatgccctttgacccattcctgtggtgctgtctttaaaaacttacgagaaatgatgtcacattttgaaggatattcatattgtgatatgaaaaagcaaatgaaggaaacaactaaatccaacattagggaaataagtagtttatggtatactcacaggcagaacgtctccattaaaatcatgtaatccgaaataatttagaaatgctcacagcataatgtttttaaaatcaggtcctaaaactacagtaaaatcctgattctgaacaaagtaatttatatgtttatacaagaaagacaaaaattatcaccgtgtggtatgattagctgatttatttaattgttttttgtacttttccatttcccaagaatcctacattgaatatttttaaatctaagaaaatgtttttccttaaagacaggcagaggtagcatgccctgtgtagaaattagggtggcatctcttcatccatcacttctaacatattgctagctccccagctttcagttgtgagttgacagagtaaagatgattgagcaacatcagtgatatgtactttttattcctcaacaaactttttttttagtgctactgctgtgggttgtaaaataccccttaaagcattgctctgatactttctaattctgatcatttctaattgtccattggagcagaaacttagaggcaagagatctctgagtaagaaggtaatggcaaactctatctgtggatctcagtattttttgcagtcccacacacctgaaccatgtacagtttcatacatgtgggagatttattagtgacttgctctgagcagagtgtgtgaaggtgtgtgttttttgaaaagatctctgccgggcgtggtggctcaaagctgtaatcccagcagtttgagaggccgaggtcagtaatcaagaggtcaggagttcaagaccagcctggccaacatggtgaaaccccatctctactaaaaatacaaaaatcagctgagcgtggtggcgggtgcctgtaatcccagctactcgggaggctgaggcagagaattgcttgaaccctggaggcggaggttgcagcgagcagagatggcgccactgcactcccacctgggtgacagtgagactccatctcaaaaaaaagaaaaggagacctctctaccccaccacctgggaacatcattggacaagctcatagtcaaattttacttgatccgataatacatcagtggggagtgaggagggaacagggttgcccctttttttgggaggtgaaggaaaacggtttgagttttttaactttttgttatggaaaaatgccaacatataagaaggaaacacagtggtatagtgaagccccctgtacccttctcccagctttgttatcagcattacatcattcttgtgccatctgttcctcaccccatcttcatgatgatgaccttcattatagttgttttgggtaaaattgacagacattgaatcacatgaatgcagccatacaattttgaccagtgattatacccatgtaacccaggaatgtcagccccattatgatgtaaaacattcccatttctttagaaagtcccttaggccccttcccagttggaggtttggagggttttgtttgtgttttaatattctcagagggcctaattagtttgtgtgtgtggcgggtcacctagctaatgctgtgagctgaaaaacrtctgagagaagatagtactgttgttcatctcaaaataacccatcacaaacactgagctttcaattcattcagaatatttttttaggaataaatcttgtaaggtgaaagtgctggggaatatgtaacagatcttgtcttcagagttactgaaatgtaagatgtctgctttttctcttttaaagaatcctcgcaaggctcgtgtaactcggcgtttcattgtagtagaaggattgtatatgaatactggaactatttgtcctcttccagaattggtaagcaaccatgttcagctgtaattttaatatttggactatttgacagatgtgccttttgtttatgaccgcttttagtgtataacgtctgygttgctttgcgcattaggcctcataagcatattttgctcagatcagggaagaagaacaacactgaatgccagtgctggccttcaaagagtaatcaagactgctctgttgcccaggctggagtgcagtggtgtgaacacagctcactgcagccttaccctcctgggctcaagtgatccttccaccttagctttctgagttagctgggactacaggcacatgccaccacacctggctgatttttcccttttttgtggagtaggggtctcactgcgttacccaggctgttctcaaactcttgggctcaagcgatcctcctgcctcagcctgccaaagtgctggtattacaggtatgagccaccacacctggccaaaacttagctttagctttttttttytcccccgcaagacagtcttgccctgtcgtcaggctggagtgcagtggcgccatcttggctcactgcaacctcctccccgaggttcaagcagttctcctgcctcagcctcccgagtagctggaactataggcgtgcgcagacacccccagctaatttttgtatttttagtagagacggggtttcaccatgtcggctaggatggtctcaatctcttgacctcatgatctgcccgcctgggcctcccaaaatgctgggattacaggcatgagccactgagtcggccatacgtagcttttaagatccagctttatttaggtgaaatcaacgtataaaatacacctactttaagggtaaagtttgataagttttgacagatgtatatacatctgtatcactgcagccatccaccaccacagtcaagatacggaatatttttatgtaagacaatgtttatccagaaagaaaactttatccagaaagcttcctgatgcctcttggtagtgagtacccatgttggccccagacagccattaatctactttctattcctgtagattagttttaccttttgtagaattgcatatgaatgaaagcatagcttgcttttttgtttttttgtgttttgttttttgtttgagatggagtttcacttatgttgcccaggctggagtgcaatggcacgatctcggctcaccgcaacctctggctcctgggttcaagtgattctcctgcctcagcctcccaggtagctgggattacaagcatgtgccaccatgcccggctaattttgtatttttagtagagacaaggtttcttcatgttggtcaggctggtcttgaactcccaacctcaggtgatccaccctccttggcctcccaaagtgctgagattacaggcgtgagccaccacgcatggccaaaacttagctttttaatagtgaaagcagcataactgtttttagaaaccatgaccattgagatttcctttattgaggtgaaattcacataacacaaaattaaccaatttaaattgtacaggacagtgacatttattacatttaccatgtgtgcaaccatcaactttaggtcaaaaaccttttcatgactcacgaagaagacctcaaacccattaaacagtcactccccattttcttctccctctagctcccagcaactaccaatctgctttctgtctctatggatttaccttttctggttatttcctataaatggcatcatataatatatgaccttttctttctggcttcattcacttgatgtttttaaagttcattaacattgtataycatgtatcagtatttcatacctttttaatgctgagttatagtccattgcatggataataccacgttttgttttatatgttcatccacagatggatatttgggttctttctacctttttgytattgcaaatagtgctgttgtgaacatttgtgtacaggtatttgtttgaattcctgttttcagttcttttatgtatatatctagcagggtaattgctggattatatggtaattctgtgtttaacttaataaggaactgacatactgttttcaacagcgattgcaccattttacattcctatcagctatataccagggttacagtttctctacatctttgtcagcacttatattttccagggttttttgttggtttgttttagccaccctagtgagcatgaggtagtatctcactgtggttttgatcctgtttcccccaaatggctaatgatgctgagcctcttttcttgtttttttktttgtttgtttgtttgtttggccatgcgtatacctttggagacatatctattcaggtgctttscccattttttaaattgggttgtttttttgtttttaaaagaattccttgtatattctggatactagatgtttatcagatacatgatttgcaaatattttctcctattttgtgggggtttgtttcatttatttgatactgtcctttgacacacagtttttaaaaattttgatgatgtccagtttatgtgttttgttgttgcttgtgcttttgtgttttattttaaaatctttgtttaatctggccgggcacggtggctcacgcctgtaatcccagcactttgggaggccgaggcaggtgaatcatttgaggtcaggagttcgagaccagcctggccaacatggtaaaaccccgtctctactaaaaatacaaaaaaattagccgggtgtggtggtacacgcctgtaatcccagctactcgggaggctgaggcaggagaattgcttgaacctgggatgtggaggttgcagtgagccgagatcacgccagtgcactccagcctgggcaacagagcgagactctgtctcaaaaaaaaaaaaataataataataatctttgtttaatccaaaattatcaagatttattgctatgtttccccctaagagtttatagttttcagtcttacatttaggtctgtagttcatttgagttcatttttgcgtatgcgttgatgaagaggtccaattttattctttcacaagtggttatccagttttgcctgcatcatttgtttaatgtttccccattgactggtcttggcacccttgttgaaattaattgaccatagatgtatgggtttatttctagactctattctgtttcattcttctatatatctgtcctatgccagtaccacactgtgtcaattattgtagctttgtagtgagttttgaaatcaggacatgtgagttcaactttgttctttttcaaaattattttagctatttggggtctcttgaaattccatttgaattttaggattagcttttccatttctgtaaaaagtattgttgggattttggtggggattgcattgaatatgtagtcacattgggaagtattaccatcttaatgatattaagtcttccagtccatgaacttgggatttttccatctatttagatatttccttcagcartgttttgtgatttttagtatatacgtcctgcacctctttggttaaatttatcactaagtatttgatttttttattctactataaatggaattgtttccttaatttcctttttagattgtttactgctatttatagaaatacaacagatatttgtgtattgcttttgcataatgtaacttctgctgaatttattagctcaaataatacttttgtggatcttattctatgtataagattacaccatctgtgaatagagataattttacttgtttcttttcaatttggatgccctttatctttcttgcctgattgccctggctaggacctcgactacagtgttgactacaggtggcgaaaatgagcatctttgtcttgttcctgatcttataaggaaagctttcagtcttctaccattgagtatgatggtagctgtgagttttttataataaccttttatcaggttgaggaagttccttcccatttttaatttattgagtgttttatcatgagaggttgttggattttgtcaaattttttttctgcatttattgggatgatcatgtggggtttttccccctacattcttctaatgtgtatgtaatacatatttgatttttccatgttgaaccaccattgcattcggccattgagattttaatctaggagtctattaattgaataaggattcaaaataagggttccatatgttgtttttaaatgttttcactatttctgaggaaatctaaatatattttaagtatcaatagaagagatgtatttgttttcttctttttgtttttgtaagagtgtcaatggttgatagaataatgggagggaggtagtgaaccagaagatactaggacgtatattatagggctacagtaatgaagcagtgctaatggacagatacgaaactaaagatgaagtgtaggaacagctcaagtgtagataagcactgaagctgggcatggtggctcacacctttaatcccaacactttgggtggcggaggtaggagaatcacttgagcccaggaggtcaaggctgcagtgagccatgatcctaccactgcactctagcctgggtggcagagcaagactctgtctcaaaaaaaaaaaaaaaaaaatcagtattgtgctgtcttttgttaagtgaatcattttagaccatctaaaggacaattgattctcatcattcaccctacttatattctataaagttgccatgaacactggaataagaaatactaaactattgctgctagggcaaataatagggttaggttcctctgagcctctggttacaacattttcatcaaccagttgacacaaaacttgctttatgtgtatttttgtttaaaggtgtcttatttaatgtctgttgattcattgcactaccactcatgcctgaacaaagcttctctaacacacaaattttctccataagggacatcacagcactaggagtaatagacggcactttagcatgacacttgggggcgactctaaatagcaaaatcaccaacaaaaagcacagaagtccaaaaaagtggcagtaaataggccatgaaaagggtagttgttcacaggatcagagctgaaacagtcgcctgttcaccctcacctgggaaaacacgtgtcaggtaattcaaattcttcactgctctgcacatgcacatatccgtgatgacaggaaaaaagtattgatatggaggttgcaartaagttttaataagtagatgaatttgcacatatagaattcacaagtattgagagtcagctgtacatactttttaatcttaatttttttctccataatatgttctatatggtgctaatcattagtattttaacgtttatrtaacrcttaggttaagttaaaatacaaatacaaagcaagaatcttcctggaggaaagcctttcatttggagtcctaggagagcatggccgaggagtcactgaacactatggaatcaatgtaagttccccttttttaagaacgtttcccctcttataggagacatgtagttccattctgctaggcctatatttttataggcacaagacagtgttccttatcagtttgaagggtcacgaaactttggtgtctgtcacctcagtgagcccaggatgagtctagtcagccagaccagggaaccccatcttccttctgcacttataaactcggagtgggtagtcatggtttgtgctctgtttgcaaagtttcattcgaatagacttttagtgtctcttctctagaaatggttaaattttgccttccaattatttcttaaaatcattaggaatttcctgagtggtcttttcagaagtattcatgacggcagagaaaggatactgtttctggtgtttaaaaatctgtattctatataatgtgtttgtgggaggtagatacagttacgcgtgcgtgcgtgtgtgtgtgcatgtgtgtgtgtgtcagaaacaccactggcatgcattcagcaaaacctcttaaagtcccaaacagaatgaggtgtcatgtttccttttctgagggaaatggacccagactgcccgcagtgcctagtgggttttgctcctggagcctcagggcagaggaagtcagccagtcttgaacagctgtcttaccaaccaccatgggaagagttacagaaagctttttctccaaaacatgygcataagagctgtgcaacctgtgttacagagytgaactataaaacgtaaaattgccttacattatcgacatcccgctaaccatatagtcccagagaaaaatgtaaagcagagtgaatatcccgggaggttggatggaagcacctcctccaaggcagactgacattcagcagttacatrcaccgaggaggtaaatggaataaatggaaagataaatggaagtgtaattcaagcagatttagcagtacactacagccttttttaaggcatgaaaatttttatggaggaaaaaacttgaacttcactgttgtagttttgtgaatgcttccagcagttgtcactttgggaaatactgtgaggaaatactcacaagcgcctgagagtagagagcagaatgtacgggctttatttggatcctgattcaaacaaatgctgttaaaagaaaatttggtgagacaatcagagatatctgaacactgaatatttgaatatatttaacatcaaatttaaacttaacatttaaaaattgttaatgtcttaagtatgatactagttttgtgattatgttttgagagagtttttatcttttagaaatacacagtgcaatgtttatagatgaaaccccatgaagtctgggactcactacaaagaaatgatgagggtggtaggggatataggtgaagcaaggttgtccttgagttgataatgtttgaatctgggtgatggggattctttgttctgttctactttgttcaggcttgaaatttttcataatgaaaggtttaaacatgctttttaaaaagggcaggagtgcagagtttctcaaaactctgctggatctatgaaacactaaggaaaacactagctgtgttctsacaatccattaacatggccatcagtaagtaatgattgaatgcctactgtgtgcccagaatggaacttggtgctgagggctggacccaaagatgaggaccgaaggagttctgagtggtcagaaagatgtaggactcaaagcccattaggtcattttagagcacattaggttcttctgctgtccagttggtcaaagattccatcgccatgacgtttggataaattgacttatgaaatgctgagaggcaaactgaatacaagaataaagtgctcaaaacttcgatagactttttatttatctcagtgcatcccatgaggaaggccagctagaccactgttttagcgaggaaatagtcttattttgtacctgtgactacttttaatatcgaacagctttgggttttattttyttataatttatttgtctttgctgtgagttaatttgtcatgtataatgaaatggtaaaaatgtataaaatgagacagtttcagatgggccatgagactacagttcattcagcgatagatgttatatggtttattttttattttcatgtagataggtagtttgaatccagatattaacagacagtttaatgctgttaaattttgtctctaggcttgaagttggccttttttttctttaaactgtggaataactgtcactcctccttttccggcagattgatgatattgatcttatcagtgccaacatggagaatgcacttgcttctattggaggtttctgctgtggcaggtcttttgtaattgaccatcaggtgggttctttttaaaaacaggagctaaaactgaaactaatttctccattggtcacctcaaaatataattttgaaatacgaaattttacttagtttatcacacaatttttatttaaatgtcaatttttaaagaatcactcaaaatatttctatttagaaatgatctcacatttaacaaaaagtcttgttgctgttacacgtataatgtttatttatggctggatcttacccccctcaccacatgtacacactgttcagtagttgttctagagaactggtgcctttcaaatgtttacctagaaaggacagagaatgtgtatatgtcttcatttgtttcttctcagcgactttccggccagggatactgcttttcagcttcgttacctcccctgttagctgctgcagcaattgaggccctcaacatcatggaagagaatccaggtataaccctttaaaaacccaaggaatcaaagagatttcaggttacgttagttgtgttactgatttacttactggagaaattatttgccagacaaaactggtttgcagttacattatatggcattcataggaagaatggcagtgaagaagctattcctgccccaaggacttggggtcagagcttttctcctgtgcttggggccagagccagagccaaagcaaggctagctcagatagtgggtggagatgctgggaggacgaggggctctcagccagttctgggcctaaacgttccattggtgtaaataagccagtctttatttggttaatagttttttgagaaatcagctgaagcatgctgcttttttatctgtgcaattttataaatattgtgagttttcacctttagcctttgaatcatcagttggtactgaggccaagccgggtttaccagcaaagaacttactcagtgggaaaaataaaaagtctactaagaatttaaaatgtggcctttggctatgacagtgccacctttgcaaagcttaaaacggaaagggagcagcaggccctacccggtacagtatttctgaatcttcatcactgatactaattcagagaaccagaaaatgtgtgtctctgtgctcattcatatgcttgcttctcagatggcctggcacgcctaccttctgatcagatactttagttttgggattttccttgaataaaaaaggaaaatatcaagaaaagattgtaaaaattactttactatagttgattttttaccaaattgtttaggataaagaaataagcaataaatttgtaccctttgattcttagccagattaggatcttgatgagaacaagaggcattgattgttcttgaaagcatcattccaggtttgttgaaagtgggatactgaggtgagaaggggccagttagcacgcaccagagacaaagcttgggccttcaggggagtatgggttcttggctctgttagtatgtagaaggatttgtagcattttaaattgatgaacttgatctgggtcttcaaaaatatttttaggttagtactatcataagtttcaaatagactctcaaacgtatttttttcatctaggtatttttgcagtgttgaaggaaaagtgcggacaaattcataaagctttacaagggtgagttttatrtattttcaaccaacataaagtttatctgcaccacacttaacaactaatggaaarttttaaatttctaggcttgggtcagtttgaccagattgcagctaagaaaccraaaacttagttcactcacattggtttatttgtgtaaaaccagatcatctgttttaaagaatcgtgactttgtttttctgaaaatgaaacaaactcattaataaaatattacagcagtacagaagatagaaagatgaaaataacaacccaacatcttaccaccagaaataaccagggtaaacactgaagcatctctccatgtctgcacacacagggatgccattatatattatgtaattagatgactgggttcataccatctgtgttactttttaataaattactaagttttaacacaagaaaaagaaacaagtgaaattttatcagtgttttttttttttttttttttttttttttactacacaagagtcactttttttttttttattatactttaagttttagggtacatatgcacattgtgaggttagttacatatgtatacatgtgccatgctggtgtgctgcacccactaacttgtcatctagaagagtcactctttaagattcctctgtagttaaaaaaaaaaaaaaatggaggttggtgatatctccaggcacatttctggtcttatataaagtgatttcacattgcccgaggtctttctttttgcctttcctaaggttaaacatgctttcttggtcatgaaagtcctatctgtgttccggatatggaaactggagacttaactgaaagaaaaggacaattgataaatgagtacatcacagctgttccagataaagaaggggcagagacattaaagttctgggtgtgtctgtgtgatagtaacagcagttcttgcatgatttatggtagagagatatatttgtattggttccagttccattggtttgtgaaatattaatatgccaacacagcctagcatattggagtcactggaaatgcatcagtgctagccttacatgcctttcactctatggtgttaacctgcctttttctaagtctaatctccacttaccccagctgtatcacactttttctttccaaaattcctaatcctctgtcttcactcccctcacttttagctaacagcctggccttatgctgtcacttgggactctgtcatatttcctgacaaatctacacacctgtgggtatctgaaccagtcttccctcctgtagaccagtaaatgttgctccaactaccacaggccctttttttaaggactgagtgcctttgcttgtccctgctactttgtcatcagcctgtcccctttcttgtgttatttgattagcagtcatgtccactttaaattcctcttgcctgtcacctgacgtttccctctgcaactccccatgtctttgctcctctcagtagctatcatctccacgtcttcacttacactggcagctctgagacctggcttctgctactgcccttcgcctggactgtttttgtggaggtctccactgactgctgaatccagtggaccatcttcagagctcatcttcttgatgtccccatagttttcagcacaggtgaccactctttccttctttggactctgctacactgcacgcctggatttccttttacatctttgaatggctccatctcggtctcctctgaaggctttctttcaacaccttgctcttcaaggctttgtctgtgcttctcttttcttctcattaccttcttgaagaattgccttctcccacacctggagctccacatcgtttcatgacacctgtatagagacagctcccagcttcgtatcaccaccctggaccactgcagctgcaggtctcacacccagttgcctactcagtatccacagttggaagactccatggcacctcacagtaaacacrcattcataagggtcgcaggggcaaaccgtgctggtatctagatggttacagagaacagtaaacaaaatagcaaagaggccaatgtgacaggaggaaaggagtgggaaatctggtggaagatgagggctgggtcatgggccatccgcacacagggacttgtgagccgtgatgaggacattggcacacagaggaagccctggcatggttttgagcaaaaaagtgaaacagcctatctgataccctagcaaaattacttttgcatggtgtgaaaaaatacattgaacagcagtaagaacagaagcagggagaccagttaggagattgacgcaggtgaaaggtgatagtgactctgaccatgttgggagccatgacctgcgaagtgtctggattctgggtatcttctgaagggagagcacactggatctagcagaagttcatatgcagggtgagtgagaaagagaagactccaggtagagctcagggggtttggtcagagtaaataggtagagttgctaatgagtgagagggacagaactgtggagaaataccttctggggaaggtcagcagtggttatgttaagcccaaagtgcccatcagacatggagtgcagagcagcagctggatatacaagtctgaagtgtgagggagagtactgagctagagataaatgtttgagtcttggggtatggatattatatgaagcatttcagtgtgaagaggtcagaaactagcaaagactagtctgagaaagagtggccagtgaggaagaggcaggctggaagagcctagagtcctggaaaccagggaagaaattgcttatgtaggaggtcagcctgtgacatgccgctgctgacaggccagaccagataacagaacactgatcctttgacttcgttatgtagaggtattatgacttggtgagtagtttcaggggagtgtggggtaaaatgcctgcttgaaggaggttccagacaggtggacacggcctagatgactgttttgaggagtttttctctgaagagggactaagaaacaagatggtggctggagaaagaaattggtcaagagaagaatatttcagtttaagattactgagatcaatttctgaataacatctggctaagtataaaacatcctttctcctactggttgacagtactgtatcatataccaggttcccatttgtacctagatctgtttttaaactgtctcttccattccattggtatatttgctcattcctcagactcttttgattttgtctgtttttatcactgttttggaatacaggtttatcactagtgtctgtttttatcactgttttggaatatgggtttctccaaaattattgctagaatcttaattggaactgcattaaattttctgatgaatgtggagggaaatgtcatccatgaacatgagctctctatttaaatctccctttgtgtcctttaatggaattcctataaagcccttgtacctttatggaacctttaaagggaattttcagacatcctatagattttgttgctgttatgaatggggttgtcttttctgttatattttctacttgattattgctgattcataagaatattattattttctctaaactgaccttatatccaggagtctttctaaactcttagtatttccagtaattgtttcattgtgttatgatgatgtgcatggaagtcctgttatctgcaataatggtgttctctctttccttcctaatgcttttgcgtcttagttcattttcttattttattgctttggtctgagtccctaatttgtattgaacagtggcaataatagcaaacattccttccttattcccagtatagaagcacttcttcattaagtataaaacatcatgctatgggtttttggtgagtagcttttattgaattattcctagttttgttttgttttgtggtttttttaagagacaggattgtgctatgttgcccaggctggagtgcagtggctattcacagatatagtcaacacactatagcctcaaactcctggactcaaccaatcctcctgccttcaccttccaactagttgggactacaggcatgtacctctgcacctggctaaatgattcctaaatttgaaggcctttttttaaaatcataaatagacgttgaactttatccattttttttacatctattaaggtaaatcataaatttgtcttatggctgaattacattgaaatattttctgatgttaaaccatccttgcattcttgagaaaaccgttacttcattataatatctttttctacactgttagatttatttagctaatattttaatttgactttttatatctgtttataatttaaatggatctataaccttgtaccaactttacgtaacataggagtcagtgttagggtagcttcggtagatgatttggctattttccactctttctgcttcatggaagcactgagtaaaacaaggcttgatcgtttcttcagaagttgagagtaggtctcccactttacagccatctaggcttggggcctttggtttgggaatagttgttgattatctctcatatatctatattattttaactttttatttatgtaaatttggttttgtgtgttttcatcatagtgtgttttcttatttttatgcactgtctcattgcactgtgttcttactcttcttcagcttcttacatttagcttttggttttatttcgtattttccaataaatatattaaagataaatattttcaaaggcagtatcttcaatgtttagttctgagtaatttttttgttcaatttttctctaatttctcacttctctcatctctgagattgagtttgggaaaggaagtcaacatcctatgctggtttgcctctgttttcattgtaatagagatagttattggtgtcaggttctccctatagactgtaagcacacagtggagaccgtggctaccttggtgattgctctgtccctgggagctagcccagtgctcgtttatccactgggataagatgatatgtttggcaaagtcttttgttaaggaatagtataatagactctgaaacacggcttcgctgaactcaagctataactgtgtccgtttggttttaattaaactcatctgacattcagcatctaggcaaccagagacagggcattttgtttaattccttctctcactagcatgtgaaatgagaccatttgatcaaaaagcacaagttagatctggacctcaggtgccttgtatttcttttctttttttttttttttcttttgagacagagtcttgctctgtcactcaggctggagcacagtggcgcgatctcagctcactgcaacctccacttcccagattcaagcgattttcctgtctcagcctcctgagtagctgggattacaggcacgtgccaccacacctggctaatttttgtatttttagtagagacggggtttcaccacattggtcaggctggtcttgaactcctgacctcgtgatccccccaaccttggcatcccaaagtgctgggattataggtgtgagccatcgcgccttgtatttcttgaggaaaattgaggccatttgattcatatgaaatgctatttggaaagcagttttttttgttgttttttttgttttttgcttttgtttttgtttttgttttgagacaragtcttgcttttgttgcccaggctggagtgcagtggcacgatctcagctcattgcaacctctgcctcccaggttcaagcgattgtactacctcagcctcccgagtagctgggattataggtgtccaccaccacacctggctaatttttatatttttagtagagacagggtttcaccatgttggccaggctggtctcaaactcctgacctcaggtgatctacctgccttggcctcccaaagtgctgggattacaggcgtgaggcaccacacctgactgaaagcaattttttaatactgtgagaatacatgacctttaaaaaaaaaaagatacttgatatatgcgtttaacatggtcagaatttacacaggaaatgggttttcaaagtgtattgcttagtttctacattagtaaagaactaatctagaaggttcccccacattccacatgctcaagattccatgattcagacctgtagcctgctttattgagagatctagcatgatatatttatatttaaagaaaggagacgctaattaataatgttccaagggtgattggaaggccaggtcagatgagtttccagaattcacattattgtaacacacagtagtcattctgtaaaggcttgttgagtcctaaactgggaagatgccattgtgctacctagtactttttattgtcatttcattctgagggaaaaacaaatygttttaggtgaaacaaactaaatgaaaggaatctaaaatgtttagctcagtttcaaatagacatatatcacatttgtgtcctaggaggtaggtcaaaagtcaaataatatttgttgttataggataaaatagactttaaatraacctgactagatagtagccgagatcgtgccactgcactgcagccagcctgagtgacagagcgagatgccatctcaaaaataataataataataatagtagtatgacatagcatctcatggcagctgtagtaaaaatacaggattaaatttaatttaatttaaaaatacaggatttggcccctaaagatctatctttctccttgagaagctacagatttttgtgctattaatcctaagtaaaaagaaaataattttaatccaagtaaaatctaaaacttaacatgcaaataaggacgtttttctatctaaacatattgctgttagtcaaaatataaggtatgtttggtatttgttgagtttttctttgagacagagttttgctctgtcacccaagctggagtgtagtggcacaatctcagctcactgcaaccttgacctcctgagttcaagcgatcctcccacctgagcttcccaactagctgggactacaggcgcaagccaccacactcggccaattttttgttttttgtttttgtttttgttttatttgtagagatggggtataatgttgttaatgttagaaatcatccctgtaatttatgagagacaaaaactgaagacatagataataagcaaggaagcataacataaactgtagtgagtagcttgtgaaggatccagacaggatgaaaaatagcaaatgatggagcagagccttccctaaagtgggtgatgaagaaggccccagcagcaggcagtgctggagctgggccctggcacatgcagccaacacagggaagaacaaacattgggggcgagggagcacatggcaagggaatgacaggccaaggtggggcccagagggcctgtaaggaggcacagactccctggtgggaggctggggccatgagacccggtcctgcactcaggaagccacatygcaggcagacttttttagatgaggaagcactgcccagagtgcctcgtttccctttctttgttggaattggaatgatgcttcccatcagtcgcaagcttctgtacgttcactgtgccttgacattgtggacttctaacattatttctccgtgagcgatcttcaagsctggaagggacttacagctgtgtgtgtgtttcccttcttcagcatttctggattaaaagtggtgggggagtccctttctccagcctttcacctacaactggaagagagcactgggtctcgcgagcaagatgtcagactgcttcaggaaattgtagatcaagtaagtatccgttgacttgaggcatccccccacaccacttctgcccttgccccaagcaattttttaatgttaaatttttaagaaaagtctctttgccctgagagagaagagggtagaaaggaagatgctggtgacccgctcttgacatggaatcctaatcctccaggtccttcctagcttctggccatggtaacaggcagcaggccctcccattgggtcaatgtgtggctccctccaaagatattgtgttttgtaccactttgcatttaaatatacttggcctctcctctgaaaaattagccttgcagaaaactcacttgctcaccattttacaaagccaggctttcctatgtgtagttgggggaggcattgtgtgtgggcatmgcacacattcctggacggctggctgtccccgcagcacagctcagggacagtccactcacagtcaccctgaagtcaggatgctcttgtaaacggaaaggaagaccgctttttataacatacctaatttggggagatttatttaaatttctttatcttccaaaagttattttactactaattgtctaagaaacacatcaccagggaaaactgcttgccccttttcatccagtagcactacccctccagagtgcttcctgccctgggcacgcgggtttacagtggttcagagccaacagaagtttctttaaaagggggaggaagagcagcggaataacctgggcaggaaggactcaggacgggcagtgggatgccacccaccttgcacccctcttccaagtcctgggatgctggacatctgctttcagaagaatctggacttttatgtgggctgctgctgctcctttgagaagaatctgacatatayctagtatgtatttgagaatgaaaatgggcatgattctgcttccttgtccagaggctgtagctatgagcaatgctactaggtttctggggtcataatggcagctaccacctgtcatgtgcctttcctaggccaggccctgtcctgagcctcatccgcctagacagcctctcaggcaggctcttctaggccacatggctgtgcagtatacagaccgrgtgtgcaggcagcctctgctgcctagctggcttcagctgtcctatgtcccaaatgtttgagccacgtaatctggaataacagatttgtggagaacttcataaaatttgtggtcttctagagtcaattacattaaaaaataaataaaaagccccaggatctgagcttcctaaggaaacatgtcagattatgaatgatcaggctggagctacttatcttgtgaggtgaggaaatgcagctgatgtcccctcaggcacaactctgtggacatgaagactctctagacagggaaaaacatcccactgcctgctttactgcctcattgtttgtattgtaacgttccttaaatacagacaaacacaaaactaagtatgacatctttgtgattagagttctcatacaaatggaaaactaaaacgcatttatacattaaatacaaactaaatggacaagccagtaaaattcccattcatttcattaccttcatgaggcaggtgaatttgtttttttcaatggacttgccccagcgggacagctgagagctgtgttcacagagcaggctcatgagctgcatgcgctggtgttgggtctgagtaatggctccgccgttctcactgagtctcttctcgaactgcatcaggacagttgtccacacatgcttcatgttgagggacagttgcctccttcagatgccagtgtattcattgcatagtaaatccacctctgttctcttttcattagatagcaacagctaaagtcttactactgctttgtaccaaagagacgcagaggaggacgtgcgaatgaagcaactcggtgttaaaataccatgcttacaggaattagccacgtaatgaaagaggaaacgaaaagtctgtggacagctcacagatcccaaactcctgtctgtgggcctggtttgatactggctctcttaaggaaatcctcttgagagttgagtgagaagagaacaatctggggtagggaacagaatactatctagaaacttcattgatagaaaaaatacatatatcttcccgcttctgtgcatcatcacagcttccatttttaaaatcttccgaatcttttgttccactcccctcatcttttcaatatttgaaggaaagaaaagaaccatgctgctgtaactcttatttaagctttgtagatctgagaggctttgccaagtttatgttgagttgctcaacaggacactgtttttacaaactgagctattgtttataatgtctcttaaccagccagggctagaaacagagccagtccagatgtttgcaggagttcacttttccaagtacacttccagagcctagagtcagcgggaggctgttgtcattgcctagtatggtttttccatctcttcctcgcagcctacgacgtgacccctcttcaggcagatacttttactgccagagacatggaataattgttctttcctttacactgccctttgctctgttgctatttttttttaatataactcacataccacataccataaaattcaccctattgaagtatatcgttaagtggcttttagtatcatacattcagcaggttgtgcaaccattactatctcattccaaaactttttcatcactccagaaagaaacccctgtagcctattaccttgctctggtgtttgtgctttctttattttagtagagattgttttcattttttcttaatgttgacagatggttaatatataggaaagctgggtaaaactttgttaacgccagattctgcagtgcccagtggcaccatgcccagatgccacatgtggacatcgtttttgctaatatctgaagtgcagtggtttttctctgacgcagttctactggtggtggtggtcataagtccagcctgcaggactttgctcgcaccacttcctcatgtgctaactctgctttgtctaaatggtagtcactagctagctatggctgtttgaatttaaactaagtggaaataagaaaaggtgcaactgtgacctctcagtagcaccagccatatctccgtgtgctcagcaggcacacagggctcatggcgactgctgggcactacacaacagaggtatttgtcattgcagaaagttctgtggacagtgctgccaaggtggtggtgtagtattttggtgatatcttctagcaattataattggaaaagtgaattaaagctaccgttgcaggatttcagcgttcccccagtttaattaccaccatgtctgaagtccaggttgcagatgtcttctttttcttyctacagtgcatgaacagaagtattgcattaactcaggcgcgctacttggagaaagaagagaagtgtctccctcctcccaggtcagttgacgttaaaatatgaccttatttttttcccctactctgagctctrtgaaatacgttatcttttgaaaaattttgaaagactatcataggctatggaagaatatctgtcattaaaatatagtacattacctgtcttctgctcttaaactagaagtttctaaaattttaactgaaaagctcccaaggactcactgagtaccctctcagttaactcagagaaatgtctgggagcccagcaatgaacttgggcaaactgagtttccatcagctcatatctgccacatctgaaaggtggcacatgccacaccaggagttcctgccacaaggaccgtcctgcagggaagatcggcagtgtggggtgggggtgggcatgcgcctctgctgctccttcagtcagcaacactcagtaacatttgagaaaaaacaagcaacagtggggaaaatgtacagcatcaagaaaaaacaccaaaagtgaaagactaatgtcttacttttaaggagactggattctgttcacaaagcatatacgaggtagtccaaggagttggccatcccaccacagcactgggccaggcagtcacagcagggggcatgracatggtcagttctgccctggggcattgctcaggcttttgagagcaggcgatgtctacaccaaaactagagaagygtgtgtgtcgggcatcctgtgggcatcgtggctttccatcagatgaggtggtgtgtgctttgctcagggttttcagtggcttggagacctccaggttcatctgggagtacagagtgcaagccgcagaagagctggagagaagggtcctgaggccaggtgccaagtcagggaggctgcaggagagcccactggggagtttgaatgctctgccggcccacagtgccagaccaggatttggaagatcactctggtagcagctcaaagcaccttaaggagcctgcccttttcagccaggtgcagtggcccacacctgtaacctcaacacctgggagaccgaggtgggcagatcacttgagcccaggagtacaagaccagcctgggcaacatggtgaaaccccatctctgtaaaaattagccaggcatagtggtgcacgcctgtggtcccagctacttgggaggctgaggtgggaaaatcacctggttccaggaggtcaaggctgcagtgagctgagatcactccattgcactccagcctgggctgcccccttcattttttattgcactcatccaaaggtgtaatcctacatcctacgtttacttgttagtaagaccgtaggtgcatgaggacgggagccgtgctggttttgtgccctcaggactccatgcacagcatagtacagctcaataaatatgtgtcaaatgcatgaaacagatgtttacagatgaactctgggggacagaggtagcattgtcctttcaagctattatttctttgatttcctgaaaacttgaaaatttctgccatgccttagagtattacagagctttcacattgctattgacataaatacgaacaatcaaactgtcgttgatttgagaaggatggaattcctgctttgtgcctggcactgcctgaagcagtacatgatggacaggatgctatttcccagcttctgaggcagagcccacggaaactcactctgactgggtgtgcactggtgtggtgtaggccgaggccttcaggctgcagattccctgccgcagcaacccacctgccacagtagtgagaaagtgactgtgggcagcaggtacatgaatagacaggcctattgggaggactgccaggagaggtttgtttacaaaaataggcagtggatttggctctcaggccatatatggttgactgtgagtgcagttcctcacctcacatagataattcttttttctgtttgtttgtttttggtttttttttttttttgagacagagtctcactctgttgcccaggctggagtgcaatggcgcgatctcggctcactgctagctccgcctcccaggttcacgccattctcctgcctcagcctcccaagtagctgggactacaggcacccgccaccacactggctaattttttggtatttttagcagagatggggtttcactgtgttagccaggatggtctcgatctcctgacctcgtgatccacctgccttggcctccaaagtgctgggattacaggcgtgagccactgcgcctggcccacaaagataattctttgtgtcctttactgttctcagcattcgggttgtggtcacggtggaacaaacagaggaagaactggagagagctgcgtccaccatcaaggaggtagcccaggccgtcctgctctaggcagagtcccgggaccatggcctcctgccacacaacacgcagagaggactcaagactcccgctggccatggagtggcytgaaagagagcaagaacatgtggrtctttgataggattgttaccaaatggtgtcagtatggaccaattgtgtgaccatgagaaggatgcttattttttttaaaaagaaaacacatctaaaagcccaggaactgatttttttaagaggaaaactaatgacagtgtataactgatgtttaaattgtgcatttagtactatttaaatgttttcttatactagtattttatattcttttgttgtcgtttaaaactggagcttcagtgtctcttccctccctctaatagtaatggttcagtaagcactccttaactccttagtatttcatagaaaaatgactgcaacattaaagctaagaggaacacttcarcatatgtggtacaaatttatattgaagatctaaataaaccacgtattttccagtcttcgttgtgtgaagctaaatggtggctaaaaggaacactttttgtgtgattattataaactttgcattgtatttgaatcttagaacttttgtacacactaaatattgatgtcacaccatttctaatctgagcatccttagccagagaatattcattatacttcctaagtgagcaataatttaaatcagaagctattttattttaatgtaattaacctttctttacatttcttatgtgttcacctctaatctgttttaggaagagagttggttattatgttgatcccataatataaatcatatcctttatattttagaatatctcaaatgtattccttttttgtatggtgggtttgcctagggacgtgtaactacaggcttttactaagccaaggaaaaagagaatttttcttttcatcttacaaattccagatatctacaaaagatgtgaaagcactaaaaataccatttttaagcagtactttacctgttttttctttagcaaaccaggttatgtggtgtaaaggtttgttatacgtgccacaatatagcatataaatattatgccatcattccttctcttgttaaaggtagaagaataaaattgtgatttttataacctgtgcttattactcaaatggtcttcaacatctttttaaacaacacatactttttgaatgttcagtttctattttgcttgaggtattttgtacatatgtgccttgtgattgctgctgctttaaaggataaagtactctttgggggatgagtctggtttgttttgttttattttttaatgaaataaacctatattcctgattattagtctatttgcatatgtaatatatccaacagaatagtctcttaattttaacttttttgcactggggtagtattctttgttgtttggtcttattttagaaaataacaattaaatttcttagttccttttttcacatccaaccaaagaatatatagtatctgaagtttcctaggttcttgctgacctcataggactacaaaaatatcatggccattattttcataaataactgttcagcttcttttagaatactttctaagtgaaaatagcaacatcaaaataatgtttgtaataaactttttgaaaatatgatcaggagtttctgggaaagatggcggatcaggcacattatttcagtccttaaaaccaacattgtaaacgaaaggaaccaaaagtaaaatttttgtgttaaaattatagagtgaccacaatccagtaatatacaccacgatgaaatgtctactagaaacagtaaaatttggatcaaactgaagcaaaatgctgagaaagtacagtcatctcaaatctggaccaagttacaaattcctcttttacagagtgagaagtttccagagtgctctaccaatgatctgtgttttaaaaggcagtggcttggggtgagcagtgtagagaccattgggagcccatttccactcagcaggactgtccgcagggaagaagagaaccacaccacctttttattgtctgtgactaaattctaacttcaggaaaagtagggctttggggcaagttgggacagaaaatacaccagttatttcatcaaattcagtacttcactaattgtaccatgtgtactttttttatgtaccactagaagaaaataattctatctgtattatgctgtaagatgtcttccaatattagagatattacaatgtgggtagagaagatgtatctttaagtctatgaaataataatcatctgatgtgtgggcctcatgccatctttccttgtgggcataaaaccttagtcccagaagatagagatgtccaacatgtaaatctgaatatctccatgcatctttccaaaacactgtccctatgatgacatcaaataaaaacattcataacgtacacctaacagtatgggttaagctatggaggatgcttaaacttcatttccttacttatttcctggtgaagaggagtaggaagcttaaggatgatggaacacagataaaataactcatctcgacagcaacattttctagagatttgaaggaagaaggaaatgtgattcaaggattttatttccacaaagcagtctttcaagtaacaaagttatagaaaaacaatttaaaattagaatttaatacttctttttgagcccttcctgagggaaccactaggggaaagcatctgattaagaaatgcaaggccgggcatggtggttcacacctgtaatcccagcattttggaaggccaaggcaggaggactgcttgagatcaggagtttgaaaccagcttggggaacatagcgagacctgatgtctacaaaaataaaagccagacatggtggtgtgcacccgtagtcctagatacttgagaggctgaggcaggaggatgatgtgagcctaggaggtcaaggcagtcatgagctgtgattccagcactgcactccagcctgggcaacagagtgagaccgtgtctcaaagaaaaaaagcagaatgataatctgtcatgagattggagtttttaaaaagtaaaatactttaatgtgtgtaaattataccttgcgaattaactcaaaaccaaataaagcatgttctcacttaggagctaaccaccgcatactcatggacgtgaagatgggaacaatacatactgactgtgggaaaggaaggaggcagggcaagggttgaaaaaccattgggtactatgctcaacaccttgatgatgagatcatttgtaccccaaacctcagcatcatgcagtatacccaggtaagaaacctgcatatgtacccctaaatctaaaagttgaaaaaaaataatttacttatagtgtattatgtaaataggtggggtacagtagaaaaatatttagacaaatggaatgctagaagtacaaaaacgggattaggtacattataggaagttgtattataaagataactagtagaataaaaacataaaacttcctaaattcaaaaaaaagcaaaattagaccctatacaggggaaaaataataaatataatgcaatacacacagaaaatacacccaagtatcaaaactgcactgtaccccctgaatctataaaaaatttttaaaaatacaacaaaatagcatgaggtgagactaagcatattaatcatacagtgaatgggcatccacttacttttttttttttttttttttgacacagggtctcactctgtttcctaggctggagtgcagtggtgcaatcacagctcattgcagcctcaacttcctgggctcaagctgtcctcctgcctcagcctcctgagtagctcggactacaggtgtgggccacaatgcctggctaattttttaaatatttttgtagggacagagttttactctgttgcccaggctgatctcaaactgctgggctcaaacagtgtgcccacctcggtctcccaaaatgctaggattacatgcatgagccactgcacctggcccatgcactttatttctactccaagaaaaaattttcaaattggttcacaaagcaaaacacaaactctgctatatacaagagacaagaaaagctaaacatggctgggcacagtggctcacgcctgtaatcccagcactttgggaggccgaagcaggtggatcacctgaggtcaggagttcaagaccagcctgaccaacgtggagaaaccctgtctctaccaaaaatacaaaaattagctgggtgtggtaagaaagaactcttcacccagagattccaaaatacatagtcttttcaagtgtacatgaaatattctccaggatagaccacatgctgagccataaaacaagtctcagtaaatctaaaaagattgaagtcataaaaagtatattatctgtccacaatatgattaaatcagacatccacagtagaaaggcaactggaaaacactcaaattaactggtatgctcctaaataacccacagatcaaagaaatacacaaaggaggtttttaaatgttacgaactgaatgaattaaatgcaatatatcaaaaaaatgtagttactagttttattataaaaaacattatttgcatgatgaaagattacagaatttcagtgggcagcttcatgttgatgccatttcaatagtgatttgtttcagtctacatacttttcaagaatgtctgccatctcttaataagatacaatccttgtcatctagaactattttggtgtctccatattctggaggaaatttatttttgactttcatgctaactggttgaatctctccaccttttcccttatagcctcatccagcagccactactattgcttgcaatacttttcctttagatttttctggaagcctaatgtctcctttggttacagtttctgctgcactcctttcaaccaatatttgcctttcaaccaatactttcttccaaagagtggaagaaactttccaaatgctggtcctgccatgactcctgtagcagccacagctcatattctgctctcgtgctgccatcacaggccaacaaatcaaagtttatgtgaggcagctaaagcagtggttaagaggaaatttatacaggttttaaatgcctgtatcagaaaaggaacatcccagtaataacctaagcttctgccttaaagtaaaaccccaaagcaagtagaaggaaggaaataaagattagagaggctttttttttttttttttttttttttgagacggagtctcgctctgtcacccaggctggagtgcagtggcgcgatcttggctcactgcaagctccacctcccgggttcacgccattctcctgcctcagcctcccgagtagctgggaccacaggcgcccgccgccacgcccggctaatttttttgtgtttttagtagagacggagtttcaccgtgttagtcaggatggtctcgatctcctgaccttgtgatcctcctgcctcagcctcccaaagtgctgggattacaggggtgagccaccgtgcctggcctagagaggatttttttttttttggaaaaatatcaataaacatttatttgatacagtcattttaatacatacagtgatggctcgtccccaggctactcgggaccagggtacggggcggggacgaggaccggggacagatggtcacaaggcgggcggggcccgagttcaccgtcgaaacatcttgcaaataaacactttgtagatagactatatatgtatatatacatggttacaagtgatggctggaacctctttcaaaatgcgcttatgtactgagaactagcattaaaaaaacccaaaccaagaaacccaaagcacaggacgcgcggccgcgaggcaggggagagcctggggcccctgacccgggcctgggggagccgcctggggcccgccaagcagggcacacggggacggcccttcctggggtcaggctcactggctccttcccttcagcgccaccaggcaggaaggccaacagtcacacaggaggcaccctcacttgcctttgcaccagtaaataaagtgcatcctatttccgtgtgagccagtccttccgggccctttcctgttctcagggcagggggcgtgcgctgaaccagaggtagatctgcataaagatccccgactggtcctcaggcagggccggcacccaccacactctaggggtcttggtccctctcagggctcctggaggcctgtatgggccagcgtgggtagtgggctgactctgctgagctccacccagggccctaccccttgggaggagggctctgcagaccagcatgtgggagagggagggcagaaagagaggactttttttaaataaagaaaattaatgaaatcaaaagactttctttaaaagacatcaacaaaactgacaaacctttaactggactaaccaagaaaataacagagaagacataaattgccaaaattaggacctgaagaggtaacatcactaccaatcccacagaaactagacaacttaaatgacacgaatgtattccaagaaagacgcaaattatcaaactctggaataaaaagaaaatctgccagggtggtggctcacgcctgtaatctcagcactttgggaggctgaggtgggtggatcacttgaggtcaggagttcaagacagcctggccaacatggtgaaaccctgtctctactaaaaagacaaaaattagccgggctccatggcatgcgcctgtagtcccagcaactccagagagaatcacttttgagcctgaggggcagagcttgtagtgagctgagatggcgccactgcactccagcctgggcaacaggattgaaaccctgtctcaaaataaataaataaatagaaaatctaatagactatcacaactaaagaaattgaattaataatttaaaatattttcacaaaaatatccatgtacaggtagacactagggaattctgtcaaatatttaaagaaaaagtagtactaatcactcacaaatttctttcagaaaaattgagaaggtggcaacatctcacaattcattgtatgagattattattatgttgattccaaagccagacaaattacaagaaaactgcatatgaatttccctcctgaacatagacacaaatatctttaactccttttcaaaacggtgttcaagaatctagcctatataataaagctaaaaaagaaaattaaaagcatccagattggaaagcatccagtttaaaaaacaattctatgtataatgtcaaagagaataaaataataattaatttaacaaaaatatataaggcttatacactgaaaactacaaaacattgctataagaattaag

SEQ ID NO: 94356 - DNA, 58938 bp, Homo sapiens
  misc_feature (1)...(58938): n = A,T,C or G
tactaaaaataagaatccaaaagtccacactaaatggatgtaaatttctttaataaaataataggaaacaagggaatataattccttacaatcgaattccaaactaataaatgcagaatgatagaattagaaaatcatcacagtaaaaaatgtttcaggcaattatcttcaaaagatgctaaaacaggcaaaatacatgtaatatgatatttacatagtctcaaaggatttccctataagatacttattaaatacacaaggaaaaatagcaacttaatatggagaaacctagacggtaccaccctcaaccaagttaccaaaatttacgtcaccagtagtgggacaaatagacttcatgtgactgcagatatatgaaggatacaaatcatttctgtcatagtcatggaaaagaaaagaccactgagatgaaaggagactaagaagacatgacagcaaaatgcaacatacgggcctagactggatcctgcactacatacagcacaccagcagaacaactggcaaaatgtgaatgaggtctgtagattaggtaataatattaatgtgctgatttttgctgattgtagtgttacacatttggaatacgtgggtgaacaaaatacaggaattatctttactatttttccagctattttgtaagtgaaattatttcaagttgaaaagacataaaagctaacagacaattaaaatacattaacatataggaagtgtggggaaaagagatcagattgttcctgtgtctacgtagaaaaggaagacataagaaactccattttgatctgtactaagaaaaattgttctgctttgagatgctgttaatctgtaaatttagccccaactctgtgcccccagaaacatgtgctatattgaatcaaggtttaatggatttagggctgtgcaggatgtgccttgttaacaatatgtttgcaggcagtatgcttggtaaaagccatcgccattctccattctcgattaaccagagacacaatgcactgcggaaggccgcagggacccctgcccagaaaagcctgggtattgtccaggtttcccccaactgagacagcctgagatatggcctcgtgggaaaggaaagaccttacatcccccagcccgacacctgtaaagggtctgtgctgaggaggagtagtgaaagagggaggcctctttgcagttgagataagatgaaggcttctgtctcctgctcgtccctgggaatggaatgtcttagtgtaaagtcgaccattcccattcgttctattctgagataggagaaaaccgccctgtggctggaggcgagatatgctggcagcaatactgctttgttgctctctgctagttaggtatttgtgtaaagtgaaacataaatctagcctatgtgcacatccaggcacagtacctttccttgaacttattcatgatacagattcctttgctcacgtttccctgctgaccttctcgccacctgttgccctgctacactcgcctcgccaagacagtaaaaataatgatcaataaatactgaaggaactcagagaccggcactggtgcaggtcctcgcatgctgagtgtgccggtcccctgggcccactgttctttctctatactttgtgtcttatttcttttctcattctttcatctccacctgacgagaaatacccacaggtgtggaggggcaggcccccttcaggaagtatgcagataaagccaaagttgcacaagtgatatgcaaatgactaaagtgtggaaaataggatactacagcaatgcttctaaaactttaatgtgtatatgggtcacttcttaaaatgcagattgaatccttaggcctggagtggggcctgagctctgcatttctaaaaagctcccaaatgaaaccaatgctactgatgtgaacaccacattgaatagagggcttaataccatgcttctaagatagtaacttccaagacagcaaagatttgctatccacacactaaaaatacacagttgctctaattgttggctgcttatgctagaatgctctattcacacctgccctggctaactccctttcatgacagcattagtagttaaaatgaccaggatgttatgttccagccaggtggcctttaacaaggtacttaacctctctaaggttcagtttcttcaactgtaaaataatgtgacaaccaagagaatggtctcaagtagcatttagtcaataactagaatttagacatgcagtgattatatcagaataccttagatgacaataaagaatcatactctgataggctacaagtcaacaagatgaaatagaagcagtataaaagggaagttctgcatttggtgtttttaaaaagaaacaacatagggagaacccaacagcatgatgaaaataagaactgaaggattttagttgacataatgcttccagcaagtcaacaatgtgatcctcttccccactcccacccccaaaagtaatataaacttaagttgaattaacagaggtgtatgaccacatgaagaaaagaaaggacctctggcccactgtactctgaccacacctgaaggcctgtgtttagttcttggctgaactgcataaagtacaactgccaaatatccaaaggagggaacctcaactcacgagaactctggacaccatggcacaatggcagagggtagttgagaaaaatagatggaagagagatgttatagtggcacctactggctatcaatgaagcaggccaagtggtagaaagtgtctcttccaccaggtggaaagcagctagtagtgacagctgctctcagcttcagcccagttgttgacttgggagaattaagatctatggttactagatcttccagatttgaaaaagtagctggaaatctgcatttgttatatacaactttctgatctttaaatgttggcaagtattaaaaaaactaaaatcttctgcagactgaataaaacgcccaaaaggggctaatttgcagtctctcttgaatgtaaatatctggaaggctgttgtcctcaagagggtatagaatggttctagcttcatccagggacaaacagactggggctacaaggaggtacattatatcacaatataaggaagaactttctaatatctggctaacaatcgaatcagctgtccctgacagagtaacacgggctcaatggaaacctccagagtgtagatgaccatctctcggcaacgttgtgggtaagattaaacttgttggtggctaaggcttccaacactgagtctgtaaatctacatacatacaatattcgttgaagtctacttttcttaaaagtctgttctttggattattaaatggataaaaagccagaaaaggtgcaaacggtcctgcaggcaacataagacgtatgtgcttcgtgagtcaattgttattggacacagaaaagtgactttgagagaagtttgaaacattttcctctcaaacttttttttttttttaaaggttcattattgctttctacctgcttaagacaaagcaggggtgtgagttcaaggtgggttggttttttttgttttttttgttttttttttttaaccattaaaagggaattgctttgtggttataatatgtttcttgcaacttagtaagccttaacatgaaagtgtctgctgaacgacctgaatggtaaatatatatatataaatgagttaatgcatatgaagcatttagcactgttcctggcaaataagaggccttaaataaaagacagcaactctaagactcaggtaagatcacctccttcaaataaccccagaaacaccttccttacagataccctcttttaatttcagcccatggcttatgctactacatttacagattgtgagttcttagggaccagaaacctggtgagatgggaagggtggtaaaagacaaggtcagaaaaggcagggccagatcgtataaggctttagtccaagaaaaaagactggattttattctgcatggaatggaaagccattgaaaggttctaagcaagaaagtaaagtgttctgatttatatttttaaaagattaagctggtttctgtgtagaaagctgttttgcttggtttgggttggggtggagatgggggcaggaaggtaaaagtggaagcacagataaccagggagtagattactgcagtgttacaagttagagatgagggtgtcttgtattaagacggtgataacaaaaagaagtggagagattccaaatacatttttgccaatgtgaaactaagaaatctattatataataaagtatacacatgcttaggattataaaaattaaacttactttagatacttggcatattctgggtctttccagtaaagcaagtatttaagataattaacaaaagctttgtctttgaagtaacctctttgggcaagaactgaaaagcattaaaaaaaaaaatctgtaggtcaaaccaatccttaaactgtgatttgttacccctaatataaaggatctatttacataacacccccaccaccaacacacattggattcaaaacacaagtcccagtacgcaattatatctatataccagcataagtgtaatgtcattcaactgagaatgtgtaaaagtagatactattttgaactgcaactcttctgtcagaaatcattaatagctactcaatttaatgaggtgcttaacaacttacaattaaggtaatttgggttggctaaacattgcacaaattccaactccaactgaaaccgaagtcgatttccagcatcatctaggagacaagacagcaaaaatcatggaaaacaaaggtcactgtatataatactgatttgtagtaaggaaagagcaataaagaaacctgactaatgttgagatggtcttcctaaactaggagtgggaggagataaaccttccttcgaaatctaagaaaagcggagccctgattaaaaggagtaagttagaagtttctctaaagttaaagagaaatcatcaaagaaaacagcaacacaaacggagaattcctaccactcgtgggccactatgtaggaattttaacagtgatcactaaggtaggctgtaataactgtggcttcccctattttaataatgcgttgtaacaactgttaacagtgattaagtttcgcaaacgctaggggctgaatcagtaaagaaaaacttaggatgcaagagactgcggagagcctaaaagatcatgcagcgcatgcatataagaagcaccagggtcaggagatcgagaccatcctggctaacacagtgaaaccccgtctctactaaaaatacaaaaaaaattagccgggagcggtggcgggctcctgtagtcccagctacttgagaggctgaggcaggagaatggcgtgaacccaggaggcggagcttgcagtgagccgagatcgcgccactgcaccccagcctgggcgacagagccagacgctgtctcaaaaaaaaaaaaaaaaaaaaaaaaaagaagcaccagtagcagaatgatacacaagtctggcgacgatatttcaaacttaggcaagctcatgtgagaagcagaaaaccaatcaaggaggacacggtttaacacacaagtcctctcccttagtctcacccacgccagggagctggtggggtggtgtctgaatagcaaagatgtgcgaacaaaccaaatcaggaaaactgcaaagagtaccttagtctttctagacgctacaagagccttctctcctctctgtccaaatattaaccctgccaagagtaaggcctggaaggaggccacggggaagaggtctgggtcaaggagagttccatctgcgaagactccaagatcagagagctactcacctgtctccatagcgacagcagcggccataacaaacgaagacaccaaaacgccaccagcctgacagagcaaaagcccagagacgcgggcgaagttccggaaaccacggctccctcttccggtcccggggcactgtgggatatggggcggggcggctccgcccatccccgaccagccctgggatggctccacccgcgctggctccaaaatagcgagggggcggggcccgggccgtgggagcgcctgaggggcaggagtccagtgttttagccttcgaaggaccatggtgcttccacgtcatcgtgttgtggcgctcccggctatggcagtaccgtagttttcctctcttctgcctgcggtgaccattgggctgtagggtgccccgaggcctccctggccccctcacgccggcagaatggcctcagcccgaggggccaagcagtcttcgccccgggtggggaccacccgctacacagagacgtccacggtccgcgtggagacctcgtcccaccgcgtggagacgtcgtcccggcgggtggagacctcccagcgccgcagcgaggggccctccctctccccctcggggaagcggctccctcgcatcctcgaggcgtcctcccggcacgtggaatcctcctcgcagcgcacggaaacgacctcccgccacgtcagagcctcgtccctgagggtggagacgtctctgcactgcgcggagagcccgaccccgcgggccaagccggccgcccgccagaacgaaaaaacggcccgatgagatgctgyttcccaaaggccaccaaggggccagggccctcagccaggacagaaaggcctccagttgccagccagccagccagctgccaggtggaccaatcattttcggtttcatggaaacaaaccataaatcaatgtaagaaacagccaagccgcagtttctgaacacagccaacgtttactgaccgtcctgcgtcttggaccagcctacttttgwcccagtgaactattttcacttgaagccagcacagaaggttttcaggcccaggatgctgtctaaatcgggttgatggacaaagagaggctgtttgagcctctgagccaggtgagtttgggatccacagccctcagaaaaccttcaccccttaggaacagagaccaaactgaaataatgacctgtggaatgaytccatgcctgmtaaaaactcgagggrcaaggaacagactcataaattattaattggcctttgtttatgtttcaaagtaaatggtcgttttctttatgctaagtctttgtacctggcacccccatccatacacttttttaaggtaggttagatgtggttaaaaatgacagtaaacccaccagcaagcaaaaataatcttaraaagtgagaggaggtcactgaaacctggcctgaggtttgaagaagatggagaagagttatatttattgagaaccggctctgtgccaggcactagatgttcctccacttacgatggggttacctcccgttraaactattgtaagttgaaaatatggtaatttgaaaatgcacttaatacccctaacctactaaacatcatggcttagcctagcctaccttaaacatgctcagaacacctaaagttgagcaaaatcatctaacagaaagcctgttttataataaaatgttgaatatctcatgtaatttattgcatactgtactaaaagtgaaaaagaatggttstawgagtacttaaagtactatttctactgaatgtcacttttgtaccattgtaaagtcgaaaaatcataagtcaaaccatcttaagttgggaactgtctgtattctgggaacttgggctatagcagtaaaaaaggcaaagtcccagctctagtggagcttacactctggtgaaaaggcagacaagcaatgatgaaacaagacaattttctattgtgattagcactatgaaggaaatacatgggtaatgtgatagagaatggaagtaagtggcttcttttgataaaatggtcagggaaggccttgctgattagttaacatgtaatctgagatatgtgtgaatgaacagtgatctggaacaggtgcattctaggcagaagaacagcaaatacaaagggtggatgggaaccagctttgaatgttcaaggaacagaaagaaggccagtgtggctggagtgagagagaagcaattatatagacatggaagcagaacggaagagaggagttaaaagcaagcaggggccagtccacagaaggtcttctaagccacagtaaggaatttgagattattctaaggtcaacaggaaaacattgaagggtttccaacaggggaacgacatgatgccatttacatttwaaaaatatccttttggcttctgtgtgtagaatgtgggacagtggttctcaactaagtgtgattttgtcccccagaggatatatggcaacctctagagacattttagtttggttgaaaagttgttgggagggggtgggtggcacattaggtgctactggcacctagcgggtagagtccggggatgccacctgacatcctacagtgcacaggtcaacaccctcccctctgccaacgatgaagaatcactggtcccaaaatgtcaatagtgccaaggctgagaaacactgacagttctagcagcttggaaagctagagcatggtcyaytgggacagcgcaccactttaaggaacagtcatggaagagggttacctttaaaagtaaagagaaatcatcaaagaaaacagcaacacaaaygagacacaatacctaccactcatgggccactatgtagraattttaacagtgatctctaaggtaggctgtaataactgtggcttcccctattttaataatgcattgtaacaattgttaacagtgattaagtttcgcaaaagcacgtgctgaatcagttaagaaaaacttaggatgcaagctgaacaagagactccagagagcctaaaagatgatggaacatatgcatatataagaatcacaagtaacacaatgatacacaggtctggcgacgatatttcaaacgtatgcaagctcatgtgagaagcagaaaaccaatcaaggacacgctttaagacacaaggaggacacgctttaagacacaagtcctctcccttagtctcgcccacgctgggaagctggtggggtcgtgtttgaatagcaaagrtgtgcgaacaaamcaaattaggaaaactgcagagtaccttagcctttctagacgctgcaagagccttctctcctccctgtccaaatactaatcctgccgggagtgaggcctggaaggaggcmmgggaagcgggagaagaggtctgggccaaggagagttctatctgcgaagactccaggctcagagcgctactcacctgtctccagggcgacggcagcggccataacaggcaaagacagcgratcgccacctgcctaacagaggaaaagcccggaggggcgggaggagttccggaaaccacggctccctcttgcgrtcccggggcaccgaggaatatggggacggtggctccgctcatccccggccaggcccgcttagcccgcgctggctccggaatggcgagggggcggtgccgggctgtgggagcgcctgaggggcaggagtccagggaggcagacttttaccctcaaaaggaatgagtcccagagcctggcacaaggaagacaagtgtgcaaagttggtggaatgaattcggtggcctaaatgtaccttcctcaaatgccacggctgactgggtctcctcgcccacttcaccctctcttgcaatccaacttgtgaggcgtgtgtgtgtatgtgcatgtccgcgcttgcctttagatggaggttggcttcccagccatccaggcttgcatacacgtgcataactcctacccctacctcgcctgcctgctgtaccaggggttgattccttcttcctgcgtgttttctgtccaaatccttttctgatttggacagaaaacacgcaggtggcacacagtaagcgcttaataaattttccggctacctgatcttcttggaattgagggcatgctcctgtgcgcccctcattgcacagagctcccttgtctggaaactcagcagtcaccggagccgccgtcggtcctctcgctttctctattttaaaaaacgtttcaaccgctagcgctgttggatctctacctttcaggctttatcacctggggtggagtgggtggtgagagggaagggatggggagtcaagacaggagaacgctctcgatttcccgacccacctcccgtcatatctcatgtcatatctaccgggtgttctacccggtcctgttactttttttcttccgcgaaagcccaaattcccatcactgctctagctctctcccagatccccaaatccggatgtctgtctcagggaacgtcaaagcaacatgcccggatgaggtcctcccctctccccacctcccagccctctcctcctgcctcccccggtgtcacccgcgcctccttcctctcttcacctccctctaaacaagaatccggcgcagtcagttctagaccctgagcatctcccgcgtccctgcccaatatccgtcccgcccccgaccgcccgcgtcctcttgaacctgcggagccctgctcccygcactccacgcccttgctccgagcttccgagaaagcggggcaaagggagccaggaagagagaaaatgcgcacggagcaggtggccccgcgactccatggtgaggggacggggcacggaaggtggaaaggcgcgctccctcctcccttttttcctccctatggtgggcagttggtgacacacagtaaasgctcaataaatgttcccgctactcgatctccttggaattaaggggatgctcctgagcgcccctcattccacacagctctggtgnctggaaactgcggtcgccsgagcggtcgtcggtcctcccggtttctctattttaaaagccatttcaaacctccagcggcctcgccacctctgctgcagaccttccaagcccttctgaagccgraatgatttctccctaattcactccccctgcttaacacattcgaacggctcccgcttgttctcgggaccaaatccaaagcccctggcgccaccttcgagagcctccggacctgctgaccccccacacctgggctctgagctccagmtccaagatgctgctcgccctcccttccccgccgctctctttctgcgcgcctttcccctgccttccctttctgtcactctccctggctgagccctctccgcctccaggtctccgggaaggttgtccccaggccggtggggcccctgcaggtcctcagcctcgggcggggtggggtggaggggtcgcacagcgggaattgccaccagcgcgtccgggctccacagcgcgctcgtccagggcgcggcagcgctcagcccagcgcttggcacagtcagtgaccacagggaggagaaagtgaaggcaggagcgcaccytcccacctgccgtccccgtcccctcagaaccgagtcctggggccacctgctcggcgcggtccctctctctctggctcagtccccscaccccgatacgtctcctcctctcagaggctccgaggaagggcgtgggcgctggagggagcagggctcagccgggtgcccctcccgccaggccccaccggggctgagcctcttctgtcgcccgcaggagacagaactcaaggtggaagtaccggagtatctggggccgctgmtgtttgtgaaactgcgcaaacgtcacttccttcannnnnnnnnnnnnnnnnnnncatcataatctaacctcactcagtctacccacaagttactgtgaattacttttggaagccttcccaactcttcaatcacacttttaatctgcaagaaaattactgggtttgtgccatttctatggaagatgaattttacccaccacattttgatttttctgaatttcacttataaaaaaaaccttttggttgggcacggtggctcacacctgtaatcccagcactttgggaggctgaggcaggctgatcacatgaggccaggagttcgagactagcctggccaacatagcgaaaacccatctctactaaaaatacaaaaaattagccgggcatggtggcaggcgactgtaattccagctactcgagagactaaggcaggagaattgcttgagcccgggaggcagaggttttagtgagccaagatcgcgccactgcactccagcctgggcgacaagagcaaaactccttctcaaaaaaagaaaaaaaaaaaaagctcaactttactcataataagggtaatgcaaattaaaattaaaactagggtaccatttttcacctatccgattggctaaggtaaggttatgaacacaccattggcaagagtgaggaagaatgggcattctcatacacagtccactggtgggagtctaaatcagtacaactttctacagagggcaattgagcagtttctgcctaaattcgatatgcttttggtccagaaattctatctccagggttttgttctacagagatactttcatacgagaaatgctgtatatgcgaggtttatttctttcagcactttttcatagctacaaaagattactaataacctgtgtccactacaagagactagtagaatttatggcgttacagcaaatggcagccttascaaagaacaaggaagctctttatgcatggatatggaatgacctcctgttgcactatggaaaaacgagatgcagaataaggcatgctacaatgtgcagaaaaagacaaagataggcgtgtatttgctcagtaatattagtgcacagaagagactggtaactgtgattgctgggagtggagcaactgggtgscttggggccaagaggagggagaaactagtgaatatcactttgtaccttttgaattttgaatcacatgaatgtacttcccagtaaacaagcagggccggacrtgatggctcatggctgtaatcccagcacttggggaggccgaggcaggtggatcacttgaggtcaggagttcaagaccagcctggccaacatggtgaaaccccatctcgactgaaaatacaaaaagtagccgggcatgttggtgggtgcctgtaatcccagctactctggaggctgaggcaggagaatcgcttgaacccggcaggtggaggttgcagtgagccgagatcacaccactgtactctagcccgggcaacagagcaagactccatctcattaaaaaaaaaaacaccaaaaacaaaaaacaagcaaaccagaaaatatgcatcacagacatattttcctggacttcatttgtgttaccaggctgattgtaatccatgccatgaagtttatgttagtattccccttttgtttacattgcctgataacttgtttccctttgtctcccccaagggaagcattcatttataatgaatttttcagctcagtgtgtttcagcaaacacttattgacacccacaaaccctgacactgtgccgtctccaggggaaacaaaagtgagagtcctgctgggtgtgtagtccctgcctaggacgggctcacattagtgggggatacacacatacaaatgctcacactgcagtattaactgtgcaacagtagaagtgtgcgcaaggagaaaagtgttagaaaggaaagctgggccgggcgccgtggctcacacctgtaattccagcactttgggagactgaggtgggtggatcacaaggtcaggagttcaagaccagcgtggccaacatggagaaaccccgtctctactaaaaatacaaaaattatccaggcatggtggcaggcgcctgtaatcccagctactcggaaggctgaggcagagaattgcttgagcccgggaggcagaggttgccgtgagccgagatcgtgccattgcactccaccctgcattccagggtgacagagtgagactctatatctcaaaaaaaaaaaaaaggaaagctaattcactctggtggggtggtggggggtgaaagtaccgggtaagactttcctgagaaaccggaggtgaactagggtttagaagcatgaatagatgaatagactaatccaggagcaagttcttttgagagaacagcaggtggggttctggggaacacatggctccagcccaaaaagaaactggagmcgaattagggtttagaagcatgaccagactaacccagaagtgagttctttgagagaacagcaggggcggcggggggagggggggttccggggaacacatgsctccagcacaggagatgccagggtgcagtgggatgagaggtgaggagagcaggtcaggttascaagggcattgaatgccagaaacatttggacttttattctgcagrcaacagggaggcagcggcttttatgctcaaaaggaatgagtcccagtggctggcacagagaaggcaagtgtgcaaagctggtcgaatgaattccgtggcctgaatgtaccttcctcaaatgccactgcaaactgggtctcctcgcccacttcaccctctcctgcaatccaacttgtgaggcttgtgtgtgcgcgcgcgtgtccttgcrtgtgtgtgtgtgtgcacgcgtgcgtttagatggaggwtgkcttcccabccacccaggcttggcccaaagtccgtggtacacacgtgcataactcctacccccacctcgcctgcctgctgtaccaggcgttgattycctcttcctgcgtgttttckgtccaaatccttttctttttctccctcccgtcaagatagtggtttccactccctsctctcgccaggacaccgccttttggactggsgctgaattctgccccttgaagctctgctccttggagctgggggccccagcggtaggcggagttgattggagacctgccacccacattccgaccccaagcgacctccgagagggcggggtctcaggctgggttatttagctcgtccacccttcttcwccaccagaaggagcgaaacatctttgagcaagatgggtctctaccgcatccgcgtgtccactggggcctcgctctatgccggttccaacaaccaggtgcagctgtggctggtcggccagcacggggaggcggcgctcgggaagcgactgtggcccgcacggggcaaggtgagctccccagagccgggcggggtgggctgcgcccctggctccgagtcagtcaaataccggggaggacatgcgcccccgtcggcctctggccgattctctttgccaagggcccgcgcattgggctcaaagcgcgcggaggccacgggggtggggggctttagggcagtyggtggcacacagtaagcgctcaataaatgttgccgctacccgatctccttggaattgagggcatgctcctgtgcgcccctcattgcacagagctcccttgtctggaaactcagcagtcactggagccgccgtcggtcctctcgctttctctattttaaaaaccgtttcaaccgctagcgctgttggatctctacctttcaggctttatcacctggggtggartgggtggtgagagggaagggatggggagtcaagacaggagaacgctctcgatttcccgacccacctcccgtcatatctcatgtcayatctaccgggtgttctacccggtcctgttaactttttttcttccgcgaaagcccaaattcccatcactgctctagctctctcccagatccccaaatccggatgtctgtctcagggaacgtcaaagcaacatgcccggatgaggtcctcccctctccccacctcccagccctctcctcctgcctcccccggtgtcacccgcgcctccttcctctcttcacctccctctaaacaagaatccggcgcagtcagttctagaccctgagcatctcccgcgtccctgcccaatatccgtcccgcccccgaccgcccgcgtcctcttgaacctgcggagccctgctccccgcactccacgcnnnnnnnnnnnnnnnnnnnnaaggttgtccccaggccggtggggcccctgcaggtcctcagcctcgggcggggtggggtgggggggtcgcacagcgggaattgccaccagtgcgtccgggctccacagcgcgctcgtccagggcgcggcagcgctcagcccagcgcttggcacagtcaatgaccacagggaggagaaagtgaaggcaggagcgcaccttcccacctgccgtccccgtcccctcagaaccgagtcctggggccacctgctcggcgcggtccctctctctctggctcagtccccccaccccgatacgtctccycctctcagaggctccgaggaagggcgtgggcgctggagggagcagggctcagccgggtgcccctccygccaggccccacyggggctgagcctcttctgtcgcccgcaggagacagaactcaaggtggaagtaccggagtacctggggccgctgmtgtttgtgaaactgcgywaacgtcacttccttcaggttctgcagctggatctccgtgtagggccccggagccggggacgaggtcaggttcccttgttaccgctgggtggaggkcracggcgtcctgagcctgcctgaaggcaccagtaagcgcggggctgggggtgtcaggaggcctctggggtgsgagagaagctggggggatgcgcgtgtggagaagagggcgcaggatgggggtgctggaacctggagcgcagggctctttgggagtgtcgaaggggckgtggctgcagctggcacaaagtggctggagcctgggggaggggcgtgatgctgaagaggcaggggtcacacagaaggacggagtgatgaggctctcctggcaggggcgagaagaggmgctcaccaaaagtcactggccaagccctcctctggccttctaggccgtactgtgggcgacgaccctcgaggcctgttccagaaacaccaggaagaggagctggaagagagaaggaagttgtaccggtgagccctcctcccctgaccccacgtgagctgctgatgcttccagcacccacgcctgatttccttcctgccctacaggtggggaaactkgaaggatgggttaattctgaatgtggctggggcaaaactatgtgacctccctgtggatgagcaatttctggaagacaagagtgttgactttaaggtttcgctggccaaagggtgagagcaaggggaggctgggtgagagggaggtgtcctggtctagtggaagccaaggggcttatgggctgcactgcactgcactggaccggctcaaggtsggtgcctgtggctgtcatgttggagtctcagaatgatgctcaaaccctttgccccattctgtcctgaaggctggccgacctcactatcaaaaactaaatgttctgrcgctgggcatggtggctyacgcctataatcccagcactttgggagactgaggcgggcagatcacgaggtcaagagatcgagaccatcctggccaatatggtgaaaccctgtctctactaaaaatacaaaaattagytgggygtggtggcacgcgcctgtagtcccagttacttgggtggctaaggcacaagaattgcttgaacccaggaggtggaggttgcaatgagccaagattgcaccactgcactccagcctggtgacagagtgagactccatctcaaaaataaaataatgttccgacttgctagaatgatctgaatgacttcaaccagattttctgctgtggccagagcaagctggctggtcagtcccccaccccaatatgtctcccaggacgcttacccccagatcccacccaacccaggggaattgaaagawgcagggtggggagaccagagacttgggtccctctggtgggctggagtcaaggrggcatggttggtggggttggaaggaccaagagctcagatcccacaacttgctcaacaactgcctkccccagagcgcgtgcgggactcctggarggaagatgccttatttgggtaccagtttcttaatggcgccaaccccrtggtgctgaggcgctctgctcaccttcctgctcgcctagtgttycctccaggcatggaggaactgcaggcccagctggagaaggagctggaggtatggacatcagagccctgaggaagctcagcagtgaagtggggtggcctagtgccaatgatgctgctgcgggacccactgtgggcctggcttgctgccagccagcaaggacggattctgcaggagaggtcctgagggaccctggagaagctcagctgctcggcctccttcccacacgagagtagctgcggagggagggcgtgcaagatggaatggttgatagaaacarggtcaaatgaagaaatgtgactggcccctggtgctagggattcggggagtgtgcagagtaagagartcaggatcagagtgctgtggctgttcatcaggaggcgatatggaacaacagagaggaaattcatgggattaagggcagataggcttggatgtgaatcctggttctgctatttgtaagctgtgtgacctcaggcaaaatacccagcctctctgattatctgtttcctcttctgtgcaactgaggctcgttcaactaggtataaaaattataaggctgggcacagtggcttgcacytgtaattccagcactttgggaggtcgaggcaggaggatcacctgagcccaatagttggagaccagcctaggcaacgtkgtgaaaccctgyctctacaaaaatacaaaaattagcacctgtaacttttggtgtagtggcatgcacctgtagtcccagctatttgggaggctgaggtgggaggatcacctgggcccaaggaagtcaaggctgcagtgagccatggtggtcccgccatggcactccagcctgggcaacagagtaataccctggctcaaaaaataaacaatgatatgaggcaataagcacatgatccattacctggtacaaagtaggtgatggagacaagttagcttctctctctctctctctctctctctctctctctctctcctctctctctctcycttcccccttggaggaatccgagtgggaagaagatgctttatgttgatagcagcctttgacctcttcctgcacccagggaggcacattgttcgaagctgacttctccctgctggatgggatcaaggccaacgtcagtctctgtagccagcagcacctggctgcccctctggtcatgctgaaactgcagcctgatgggaaactcttgcccatggtcatccaggtgagaggactcaggatttctgctcccagtctccagccttctcagctcagccccttatcgaaatgcactaagcaccatcttcaaaggcgctgggctaaggcaccagggagacgcgaaaggaggaaatgcgccaagtctctattcgaaggccttgcaatgtagctggagagacacatagggctagtctgcagaagctccgggactgaggaagtcccggaggacagagacagcccaggagggatcggggagttgggatgtcaccagccttggaggagggccaggtctcagacaagcaggagggagaggaaggaccagtcctcaggggcaagacagactgggcagaggctaaggtagaggagtcaggagattcctaggggacagttggacyggggccagactaagccaggctaaggagcatgaagtgggaagctggagaaggctgtgatgaaacatgctataggcacgcggtgtgggcagtggtgtttagggtgggttggagaggggagatgctagaaacagggactggggcaacatgccccagcactgaccccaggaggaggggagctcggatatgggtagtgaccgtcgggatggagaggaccggtggatgcgagtgcagagggagatgaaggagaggggaaaggggagccaggccaggtgcctgcagaaatagcaccaataaagagaacagggtgcccaggtagacttttgtctggccaatgttgaggtaacgggaagacatttaaattgtccagcaggcagctgagaacaagagattcagtcatttgtgtagaggtggggccaaaagatgagatttcgaaaaacagtgtgggatggaggaagcaggtggtttgaatcttgtccacaatgcggggactgaaaggggaagtggaggctggaggaggcaccagaagagcagtttctgcagaatgctggaggcaaagcagcttgcagggtgctaatgcactgagctggtaggaaggggaggggaggaaatggragctgtagggagaggcaggagtgggatggggaaagcagaacaggtttggaggacgaggttaacatgcaaggggggcgggaatcgctgagtgccgggcactcatgccttctctccccacacttgtccctgctccagctccagctgcccagcacaggatccccaccacctccccttttcctgcccacggatcccccagtggtctggcttctggcccaatgctgggtgcgcagctctgacttmcagctccgtgagctgcagtctcatcttctgaggggacacttgatggctcaggtcattgttgtggccaccatgaggtgcctgccgtcgatacatcctatcttcaaggtaacaccttatccccttctctcctgtattcagctgaatacttgatggggacctttgtttctctagagttctctttctgtacaacaccctcaatttcagcatgctgccctgtgaattctggctgtattggcctcccagtactgccagctctctctgtccccttaactcaggaagatgataggactctgccagggttgctcctccctactctgcagctggaaagctttctccaggcagtaagctggggcaattgtggggcccacttgtgtctgtttcttcagttatttcaggcaagagggtaaatccagttccttacttcactccagctggaggtctcctcctcattattttatatacgttttgtggaagattaactttacaatttagtttttaggtaacagaatattcagacaggactgcgactccattcatggagtaattatcgtagctcagagatgaatattattactctctcccagagacggatgcagtgacttttgggactttgtgtgtctcttttctcaaggagagactaatagcatctttatttctatgaagaatagttgcattgtgttagatagaaaagaatattttattttattttattttattttattttattttattttattttattttawtttatttttgagacagtctcactctgtcagccaggctggagtgcagtggcacaaccttggctcactgcaacctctgtctcccaggctcaagcaattgtcctacctcagcctcccaagtagttgggattacaggcgtgtgctaccatgtcttgaactcctgacctcaggtaatctgcctgcctcagcctcccaaagtgctgggattacaggtgtgagccaccacgcctggcccattttttcttttgagtatggaagtttaaatatamatgctgattaaccaatagaactgactgtgggagttaggcttcgcccttggctccaaccctctaccttctaaagtcagcttcctgtctaaggctaggtctctgcaaaccatattcctgccttcttacctggctccatgtcgagctcacaccagtaactaattcaccctggtagcagatgttccttcccttagtggcagctgaatccacgttgcaactttctaatgtttgaaaaagctgctttattgcatccctgctcagaataccagcaccagccaactggcaccccttatcaaaagtctgagtttcagatctccagggtccytcctccaagtttctgaagttttaataattccaggttctgttctttcctgtctactggtagggtagagcatcctttcatacgcttattacccctgtgggtttctttttctgtgacttctctattcatatctttgctcgttttgcttctttcacgtctttttcttacttgagtcctttaaatattctgaagacaaattctcacttatttgcattgcaaccatattctcaaagtttttggcttgcccccatcctttaattttttttttaatttcagaagacagtttctcagctttcaccatgtgcctttatctttcctggtttccatctctgattttattttataatggcaacaatgtgtttctgtcttaataaagtggtccaccaggattgctatcccagtggtttttaaactgcagtcaaaacattaaagactggcgaaatcaatttagggggtcccagtcagcattttaaaaaatgaaatagagtagaataaaacatatcagtagagcaatatcagaatacatcacactgtttaataggaaggaaggaaggaaagaggaaagggtaagaaaggaggtgggtttggacaatttattttattatttatttatttatttttgagacagagartcggtctatcacccaggctggagtacggtgcccagcgtctgcctcccgggttcaagcgattctcttgcctcagcctcccgagtagctgagattacaggtgcccaacacgcccggctaatttttatatttttagtagagacagggtttcaccatgttggccaggctggtcttgaactcccgacctcaggtgatccgccctcctcggcctcccaaagtgctaggattacaggcatgagccaccgcgcctggccaggtttggacaatttagttatgacccagtgtcaaagtttttattacaatgttgcggcaagaaatgaggcttttgctaagtcaattcaacaagtrtctataggtaaggacactttacaggaaaagagaatgactagataatcattgttagactggatacaagaaaaagaaagaaaagttctagttaaggattattagatttattaaaagacagttaaaggcccttggattccttccctccagggttgatattagctgtgtacataggtaactggtttctaacaagaggtcataatctcattaaaattcatcagaaagtggcttaagcatttaatcaggcatacarttgatttccaagaagagttttgtggcttatattcccaaaacatccttgtcccagccagcgtgtgggacaatcttttattttacagtgtatatattttatgaaaacttgtatttcactacatatgtaccatatcttgaagcaaactttatttttgactgtgtcactgtcaatgaggtttgaaaaacactgctgttcttaagagctgagatccaatcaaggcctcaggaattcctggggtccctaaacctgtccttgcctgtagtaaacctctctatctctgcaggcacctaggggaggttctcctggatgtcttcacagacatcctgcatagctgttaaactcagaagtctatccatcccacgtctgctttttgccatataagatttcatttgcaaaagggtcccaatgctaatgatctttgaacatcatcaagctaatgtaatcccattgttttactttgaggaaactgaggctcggagtgagaacaccttgccagtcgcatggcatttggtccacctgcagttgtactgcccccaccagtctaccagagtagcaaagatttcaccagtaggaactcatgtatttagtgttaatggcctgtccacatttccctttaaaaagaccaggagaggctggacatggtgggttatgcctgtaatcccagcactttgggaggccgaggcaggtggatcacaaggtcaagagatggagaccatcctggccaacacggtgaaaccccgtctctactaaaaatacaaaaattagctgggcgtggtggcacatgcctgtagtaccagctacttgggaggctgaggcaggagaatcacttgaacccgggaggcagaggttgcagtaggccaagatcgcaccactgcactccaggctggtgacagagcaagactccatctcaaaaaaaaaaaaaaaaaaaagaccaggagataagggctaagtaattaaatttctccttagtgtatattcattgatcagatttttttttaccaaggctacttcacccattagtcatgatagggtatagtcgtaaggcctgtgaattgttcaagggcctacaaaaatggctgaggcccaaaaaactcgttgccttcaaaatacaaaaagaaaacaaaattgaaattaataagtgatatagtttggatacttgttccttcaatctcctgttgaaatttgatccctggtgttcgagatgggacctagtgggaggtatttggaccatgggggcggatccctcatgaatggcttagtgccattcctgcagaattgagttctcactcctggttccagcggggratatcgctgctaaaaacagtctggcagctcccctctctcttgctcytttgctctctccctgtgatgcctgctctccttcaccttccatcatgagtagaagtcccctgaagccctcgccagaagcagaggctggtaccatgcttcttgtacagcctgtagaattgtgaaccagataaatctgttttctttacaaataacccagccttgtatgttcctttatagcaatgcaaaatggactaaaacagtaagtcccaatgtgcataaattttagtatgtatcatatgatatggatcaggatctccaaaaataagaatgtgtatgrtctaggaaggtctcaaaatggctctttcaaggtgtctatacactgatatccaggctccaaggagatgatagtgtggagccttctctctaaaagtcctaagactgatagattcagcacagtatttggcccggagtggcctgagacaatacatttctttcttttaattttattttttttgagatggagtcttgctttgtcaccgaggctggagtgcaatggcaccatctcggctcactgcaacctcctactcctgggttcaagagattctcttgcctcagcctcctgagtagctgggattacaggcacgcaccattacacccagctaatttttctttttgttttggtatttttagtagaaacgggttttcacagtgttggccaggctggtctcaaactcctgacctcgggtgrtccgcctgcctctgcctcccaaagtgctgggattacaggcataagccacygcccctgccccaaagtgttgggattacaggcgtgagccacggtgcctggctggtaaacattatttcgtgaaacttttttgtttggaatcncagtgtaaaatatatttctgggagncatggtcaaaagagttggagaaaagtgcgtctctaagttttctcccaattagtgccccctcttgagttcctggccatctgttaaatgtgtgccatgacagacgatggacagtagagggcagacaatccccrcacagcrgcaaaggctggacttcggaggagttggaaaccacagrcgaatgccaagcaggacagaagcctgaagccaggcctgaagcttctgaaagagacagggcacacgtacctggtcctcctaggcatcgcagcactctctgtgtgatataactgcagccactttccagtctccatccacaggctggatccttgtctttggatatttttcacctccctgggagtacttccaggtgtctagttacttttaaaccaaggtcctgtaaaaccatctttgttccgtcacccaggctggagtgcaatggtgcgacctcagctcactgaaacttccacctcccagattcaagcgattctcctgcctcagcctcctcgagtagctgggactacaggtgcgagccaccacgcccggctaatttttgtatttttaggagagacagggtttcgccatgttgtctccaactcctgacctcagatgattctcctgcctcagcctcccaaagtgcaaagggattacagatgtgagtcactgcacctggcctggcactttaatatcgtagagcagagaacacacactgagctctcagtctcccccaggcactgtttgcagcactctacatgtactaactcatgcactcctcacacctagrtgaagtaggtcaggacactgaggattgagaagcttaggtgacttacccagcattcctggctaggaagaagcagagccaggatccaaacccaggctagctggctccggagcttatgctctcaaccagcagccgctgttggtacaagaggaataaatgcctagtcttctacctactgtatctactcctaaggatactgagggtgtgrtgtggtygggagaaaccctggaggccatcagaagagcaggggatattcaagcctaagatgggaagaatgggtagacaccacttcattctgctatctgaagggctgtctttgtcagaggcagcctcaagagcagaactagaatcaaayggtgaaaagctaggaggatttgggctcagaaaaaaaaaaaagaaagactttaaaaaatgtattataaaatctggccgggcgtggtggctcacgcctgtaatcccagcaatttgggaggccaagatgggtgaatcacgaggtcaggagttcaagaccagcctggacaagatggtgaaaccccgtgtctactaaaaatacaaaaattagccgggtacagtggcagctgcctgtaatcccagctgcttgggaggctgaggcaggagaatcgcttgaacccaggggacggaggttgcagtgagccgagatcgcaccactgcactccagcctgggcaacagagtgagacttcgtcttaaaaaaaaaaaaaaactttattctacagacaaacataggaagccccattgaaaccccaacactgtgccacgtctgtgtcagatctccagggaaaacatttctcacagttgagccagccctgtggcggtgagcactctgtcttctaaagcaagagcagacaaacgctgggcaaccactgtgggggaaggtgccacagagggcatttagcttggcgtcagacaggaagcctggggggtcccaggtagcccgagtttgagggggtgggaaggaagcagtgggaagtccctgggttacatcttcctccttgaagtctttagcttttccctctcctcctggtcccttgcctaggtcaacaaaaatgtctcatctccccctgccctaactggactcccatttctctgcctcttgcccacccctgcacaccctaagccattattcattttatttcccaggctcttcaaagagctctctaccctcgctgctcacacgtccccgtcctgatcgtttttccctgcccttgcactgcaacctcaccaaatctgtccttcccaatgtaacttcgtgctgtttccccttcccaatccaatggcttcttctcgacccccaatttctctgacctttccgtagcatttggctctggggacaattccctcctcatcaaaactttttcctctgttgttctccgtaagcctgaactctctctccccctccccccacacccggcaaatgtcagtggtccccagaattctttcctccgccttagcttctcactttgcacactgccccggcgctcacatggcaaccgctgcctgactgcggatgtctctctcgcccaggcctccgtcctgagcaccaacctctcacaggctgggaatcttgttctggattaattagtttcatttttgttgttgttgttgttttgagatggagtctcgcacagttgcttgggctggygtgcaatggcgtgatctcgctcgctgcaacctccgcctcccggattcatgcgattctcctgcctcagcctcctgagtagctgggattacaggtgcacaccaccatatcaggctaattttttgtatttttagtagagacagggtttcaccatattggccagactggtctcgaacttctgacctcgtgatccgcccaccttggcctcccaaagtgctgggattacaggtatgagccaccacgcctggtcaaccttttctatttctctatagcgcctactaaaatgggacttgatattatttattcattgcttaattgtttatgatctatgttccccacgggagrgcaaggactttgacttgtttactcctatatccccaaacctagaacagcgtctggcacagagccagcatgcagtaagtgttggtggaaggaataaatgaaggaatgaaggaatggtcgggatgaatttcttgcctgtggttcactgatgagaagctggggaaggctgaagcaaactcacacgtgcccctgacctcggytgctccttctgtcagataaactcctgtttgtcctcaaattcctgctccatttccacctccccaaggagacttgcctagtccttgactctgagcccacttcctgggtgttctcgctccccaccgctgctgcctgtttttacagcatccatgtggtcactccgtgaatgattctttgttgtttcctcctgtctctcccgtgagattgaaagcacatcaagggcaggcctgtcacaaagcctctttgtgttctgtagctatgcgtggagcgaatgaacaaggttgggcttgtctggacctgggcacggtcactgaatgttcttggcctctgtaaggaagggcatccccttggcagttagcagggcaggcacaaggggcatagcatccccagaacatgatgaagggcacctttgaaaagctagagaggctttggatagagctggaattgtctggtgacaygtgctcattcatactacatggtcattatactacgtggtcttagaatatgtcaaattctcaccttttcatccacccacaattcactgagttcccgttcagtgccagcttctgtgatgggtaatagyrgtgggaaacatgcagaactggatgatcaagtttagaatgagatcgtgcctactgtcggagcagtccaggaggggtgaccccaggatcccttcttcctttgccttccatctattctaaattgtcttcagctggtgatgcaccagctgggcatccagacgtcagctggcttaaacagaccgctgtgcttgcaacaagcaagacacttcagaacttgcagaatcactgcatccctttcttaaaccaagacccaaccccaccatctctttcttttcctttctggtttggcctctgtaggtgtgacatcagagacacacctcagcggatgtgactcagtgagcaccattcagactccccagggccactcccatgagctggccaggtgggcaggctttgctgagcctgtctccccaccggtctgaggtctgcagattaggcttccagacagggagcggcagggcaggcccctcagtgggaagacaggagtgtctgtatggccagccgggaatcaagaaccattcaccctccaccagcaagggtggggctgccctgagctttcaggcagctgttttatggaattattaaytttaatgtacagatggttttattttctgctcattttcacatattctaagaacccttaaatgttatactatatagtcttttttttttttttttttttttgagacagagtctttgtcacccaggctggagtgcagtgacgcaatctcagctcactgcaacctccacctcccgggttcaagcaattctcctgcctcagcctcctgagtagctgggattacaggtgcctgccaccacatctggctaatttttgtatttttagtagagacggggttttgccatgttggccaggttggtctcgaacccttgacttcaggtgatccacccacctcggcctcccaaagtgccaggattacaggctcaagccaccgcgcccagcctatagtcttaatattccctattttaaaaaatattcatggcggccatactagagcccmcgggatatagcggagagcactgccctcatggtctttagatacacgtctttcatggttctgttgaatgacttccttacaacacattcccaggagcagaattaccacattaaaaggtatgaacattttyatagctctggaagcgtattgcccaatttctcccctaaaaaggtggtgttaatttacactgccactggcagtgtgtgtaagctggtttcagcacagcttcaacagcatgagacattataattttgttaatgtttgctaatttcatargtgtgaaatgaatggcacatcagggggactttaatttgcgttccctggtgatcgtgagggtgagcctgtttggaggtgctgatgtgcacagtctgcctagtgggggcctctccgccctgtctcaggcactgtctgtttctcagcctgtgtctccccacacctctgcctgcctcccgccgactgctgttcttactgtccctctaagcctgtctgtctcagtgtcttagcctctgattcctctgagtttctctggttyctaactggccaggtgtggagctggttcatggaggtcctagccaagccctgacaagctgcagtctagaggcggggcgcagggttctgggcacagggctccaggctcctgcctccaagggctccctccccggggagctccctttgtgaactcacatggtgccctgcccttccttccaccagggcctcaccaaaggcccctttcatttctccaggtagcctcagctgggctgacctgctcgattggatccagtgattctgagatcccagaagtagctgggagtgagcaggctgtccctcagtgactccctcttaggaagtrttccagaagccccaccctcaggacaactcaccagacagtgttgtgtgtcctggccgttgggggtgtgtggtctgaaagagccagaaagtggtgtccccaaagtccagatgtgtggacagtagacaggtccacagaggtgacaatggcgccgcctgcctaccttctccaacgagccccttacctgaagtggcagaaagagctcacctctcaggccaaaccccacttggcaccaggtggacggggggccaccgaggccccatggtttagcagggtcagagtggggctgtcaccctgcccactttcaatggcgtggaagagtcttcaacacttgggaaagtttcagaaagactctagagaggcagctggcttcaagggaaggctgtgtggatgtacttggcgaatcctcatgatcagtgagttgctgactccgggctctggacctgccctgtggctgcttgtctttgaggcaggtcttgagggctctctgcagtcatctctcaggccctgtgggtggtgccagcctattagaatcgtagattgataccagccagaagggaactctgacatcaagttctctctctctttttttttttttttttttttttgagacggagtctctctgtgtcgcccaggctggagtgcagtggcgtgatctcggctcactgcaacctccaccttccgggttccagcgattcttctgcctcagctgcccgagtagctgggactacaggcgtgcaccaccatgcccggctaatttttgtatgttttagtggagatgggatttcaccatgttggccaggctgatctcaaactcctgacctcrtgatccacctgcctcggcctcctaaagtgctgggattacaggcatgagccaccacgcccggccctaccctctcattttatttaacattttaacgttaagcttttaaaaaattatacaaataatgcatgcctgtttctaggatatttggaaaatacagaaaactataaaggagaaaatattaatccttctatccgttcatcaaagataactgctattctatttcaatatcaaccttttctgtgctcgcatatttttattatcactacgaccatacattatacgtgatgtatttacctccgattatatgcattttcaatataacgaaatattctttaaaaacactgttaatgactgcataatagtcttttgagctgacacaccttaactaatattacctaaatgtcaggcatgtatgttttcagtttttcaaggatataaaaatataccaaagtaaacatcttgggacaggcgtcatggcttacacctgtaatcccagcattttgggaggccaaggtgggcagatcacttgaggtcaggagtttcagatcagcctggccaacayggtgaaaccccgtctctactgaaaatacaaaaattagctgggcatggtggcaggtgcctgtaatcccagcaactcaggaggctgaggcaggagaattgcttgaactgggaggggtggaggggttgcagtgggctgagatcacgccactgcacaccacagcctgggggacagagtgagactccatctcaaaaaaaaaaaatactgggtgtggtggctgacgcctgtagtcccagctacctggggactggagtgggggaggctgaggtgggaggatcacttgagcccaggaggcagaggttgcagtgagccaagatcgccccactgcactccagcttgggagacagagtgagactccgtctcaaaaacaaaacaaaaaatactaaagtaagcatctttatgcataaatttttgtccacaatttcatttttcccttagcttagattcctactcatagggtataggcatgttttaagatttcgcatgtgtatttttactttacttttgagaaaggttgaactaacacatgcccatctcgccacacaccatcaactacaccaagaaatatcattcaaagaaacatcgactaactcgaaagacagtatttctgttgcctcctttcagtgatcggtcagctaagtcttggagaggaaaagggacatgacgagggtggttctaggagtgtgttatttcattctgtcttcacagcaaccccatataaatagcaagaagtggaggagctaaagcacgcagattaaggttaaggaacttgcctggccrggcacagtggctcacgcctgtaatcccagcactttgggaggccgaggcaggtggatcacctgaggtcaggagttcgagaccagcctggccaacatggtgaaaccccgtctgtactaaaaatagaaaaattagccaggcatggtggtgtgcacctgtaattctagctactcaggaggctgaggcaggagaattgcaggagaattgcttgaacccaggaggtggaggttgcagtgagctgagatcgcgccattgcactccagcctgggcaagaagagcgaaactctgtctcaaaaagaaaaagaaaaaggaacctgcctggactcacattcggttactaagagttggagcccgagttggagcctgtgcygttgggccccagggcccttgtacttcatgtcacctccatgccacagctcctgttcccagctgtgatgctggaatgtggattggaaccaagtcataaagaaacttggagtttggatttaccctatagacagagagaggcccttgatgggtccttaagcatcaaagctgggttttacagagatgtttctggtggactggcttgagggagacaggaaatagggaggtcagctgggaaacgcaacatacagataatgcgattgacaaacagggctcgcacggaagcacacgtgcctatggttgtgggaagtgggcagttgggaatgctgagggtctcagaggcctcccaccatgccctcttcactgagcaaaggccatttttatctgctacacgtcaggcaaaacctgcgccaactgccaaagcctccacctcaaatctagcaaataagagagaggacggtatggatkacgttatatttaaaacaagcccacacaatgcctgtaatttttcattctgactccgtaattataactcaagaccagtcagatcatagttatccccacaccgacctgctgttgggacacatggaattaaaggctttgctcccttcaaattctattttggaggccgagcactggcaggtaacgggcctttctcaaggcccgtcttgttggagcccctcccggggcagcctccacgaaggccaagtcagcaccagggtttcgggaagaccacggatggtgtgggagcagttgagatgctaccgctttgcccgacctgagccctgggcctcggggctgagccaggggcctggaagcagaggtgagcaccgtccttggaccagaccttgggcaggtctatcccagagcatctgcaccctcgaagattcccaaatgctgctctmccctggmcctgaccagggtcccagggtcasatgggccaagccctggttgtccggcacacttgtcacagacaggctgctattgcccaaaggggcctaaattcagagaagaagaagaagaagaaaaacatccaaggagtgtgaaggggccaggcttccatggacagcctggctaaccaggcctaggccaactaagcttttcttccagtgtgagcaccacccctcagccccacaatggcaccctagacagagccagagtgggactggctccctgctcgtggacctgggttaccagcaggagtcaggagggccaactgccctttctccacacggccctcccaggcccagtcccacctccccatagccttgcgggggaggcagaacagcatcctttcatccaggcgctkcaggacctgctctatccaggcccttcatgcaccatctcatttactcctcccgtcactctgccaagggggtgtggttagtgttatcacaatttccagttgagacatgaacagatggagctcagagaggtggcatgaccgaggccactcaggtcataagtgaggaggtcagagctgggactgagttgtcctaacatccctggaccacacagcgcatccacaggcaactggcccgagaccgccaggcctgctcctggctgtgcctcagcaaykccttggtggtcccatgtycttgggcaacttgctgagcccttaggcctaaggaagctcaggcccagtgcctgtctcccagcccccctcttctcctggtgcacaytgcactgctcccttgcctcagccacaccagaggacragcccactccctgcacagggccttgttctcacgtccccacgtggatggttccctcttccagccaatggtgcatcttacacatgcttctgttttaaccctcaagacattgtgctgttactattcttatcactgtctccggctagacttctcaagggaggacctgtgtcctgtctctctgttgctagttttatgcatagcatgtagtaggtgctcagtaactgtttgcgcaagaaaaaaacaagaatctagaaaactcccatttgtctttaaaactctgcctagaatagatccgatgaagactttgctgattcacacagaccaagctaacyccatttactaggctgtatcctygaggacagggacagagcttgattcttctctgtgaccccatctctcagcacagaagaagcgtcaaccaagggtcagtaaatgtagaactgaattgctctttgcagttgcacacacacacacgcacacgcacacacatactgcacactgcttcagccccggattaagggcatcatgacctgaaccagccaagtgcccatgttattgggctgaaaccaccccaggctgrmatgccagggatgtttgctaaggaagaaaacactgaaatcctaactttaaaaaaagaaacacagtgaataggtgttctatttatatgaaaatcaggtctgtttttaggtaacagccctcccatctcacctccccaaggtgggtcctgtccttgcaccagttccttctacaccccacccggtaatcacagccctacctgccccacctcctctcccctgtttgctctctggggtttccctcgattgcagggtttgagcttccagacatcacaggggcctgtctcagactggccccttccctccctccctgacgctggagttagtgagaaggaggccagagccagggctctgtgagaggagagggggcaggcmgggagtcagtctgtcgcaggatctgtcccttacstgatccaaagcacagaagatggatggctggtgcacagaaggagctaagccctgcttctcccaggcctctgtcaagccagcagggtcccactccttagctcgratcatgcacrggtgccccatggcgcaatgcaaagagcagaggctttggaatcagggttccagtcctggtcctgctcctccatttagacaaacccctgcaagcctcagagtcctcagcagccaaagggggcgtcagctgcagagaagacccaccacgtcacactgtggggcagggatggcacaggaccagccactccagcagaggaactgtttgtggaacccagcagggaaagaaattcgactttgagagcagcagctttggcagcttaraaatcatctggaggcttcccgtgcacacattaaacctcaagctccaggtagcccagccctggttctgtaagcggccagataggcccacccaggctcttggcagcaggggaggagctggtggctctgaaaacagcactggctatsaccacaggggccaagaggactttgtcccctggctcctgctctttctccagcctcaggactccctcacctcctccgtccattcccttgccttcaggagtcccactatggcctgaggagcatcccgctctctggcaaggttctgctcctgctggaacaccagattagagcaggggtgccaggggcccctcaatatgctggcagctccctccagcctcagtcaggttccaggaagagaccagggcaagcctgaagctgcgggctgggcctcaccatcctgggaaaattctgagcctccctcayagctcagcactcaggcaggcacccagcaaaccacagctgtggtttccagagagccaggcctcccaccgcagggacagtaagctgagaagcgctgtagctataaatgtgaagtggcgaaccgcgggacactgccgcaacccagcagcgggcgggagcctgctcccagcctccctgcagggccagcccaccaagcctcagacctgccctgtccacgaggtctctgggctctgagcagagctgttttctacaccccacccggtattctcccatgtggccgcatggagggggtacccgagacagtgcagggagaggggcaggcaggaccctacatagcattttctccacagtcaatggcgctggtctcctcacaagcayagtcttgttttctgttgacttatgcaagaagagggagggggccacataatcattttggtgcttggtgcttctaaaagtcttactccttccctgggtggcaccaggtcacagctacagccccatctggagggtgccttggggtggacctgggactcgtgtggtcctggtrggcatcctcagagcactgcagaaaaggacagcgtggggaggagccgcaatggctgacatgagcccccagaagctcagaagggtcactgtgcccatttcacaggcaaggaactacacccagcgaggagaccctggagctcagctgtgcctcccggtctcccagacactcctgcactgtggacgggggtggcccatgtggaagagtcaggaaacagaggaagggaaggagagccttttccccctctgtcctckcagagcctgccaaggaacagtctctcctccaacatcctcctccactggaccatgtagggaaaacatcgcagggtgaggggccatctggtatggcccttcctgttaggctggggagctggccaggtaaggtaaggtcacctcagcctgtgtgtcgccagcccccacgggagaactcaaagacgagcatcagccctcttcttaaaggaaagagcctagagctgttccaaggagccccttcccagagcctgaccctctggggttggcaacaggagtgaacaaaacagacaaaaatccctgtyctcatagggcttacattcttacagaggtsggagagacagaccaaataaaaagtaaattgcatagtatgtcagaagatgaaaagtacaatagagaaaagtcmaggaggctgcagagagagagtgtggagcagatgagggagttgtcatctgaactaggctgagaagggaccactgagcaaagattggagcagtgagggagcaggaggagaccccgcatgctccagacagcaggggccagggttctaggtcagagtgagtcagtggctctcaactacaggcaattttgccttccaggggacatttggcaatgtctacagacatttttcattgtcacacctggaaggggagagggttgctattggcctctactaaatattaatagaagctaagattctgctcggtatcccacagtgcacacaacagcctcttacaacaaagaagtattcggtccaaaatgtcaatattgctgaagtcaggaaatcctggagtgagtgaggggaagaggaataggagagatagccagggagataaatgccaacccattttttttttttttttttggaactgaagaagctgacttagaaattcttatggaaaaatatgtgaaaatagcgaggcaaaaataatgaaaaagaagaataaacaaagtagcctcagcagatcttcacatatattataaaaatccctatgacagctgaatgactaatttcttaaatacataaagacttcttacaaattaataaaaaaagaactcttggggctgggcgcagtggctcatgcctgtaatcccagcacttaaacccagcatgtaaacctagcttaaaccagggaggtggaggttgcagtgagccgagattgcaccactgcactctagcctgggtgacagagcgtgaggcaccgcatctggccagaaactattcttacataggtgcacaaagatgtatgtatagatatgcttattacagcattagcaatccactggaaacaacccaacgcccatcaatagggaatttgattattctgtgatgcatacttacaatagaaaaccttgcagcttttcacacctgtaatcccagcactttgggaggccgaggcaggcggatcacaaggtcaagagatcgagaccatcctggctaacacggtgaaaccccgtctctactaaaaaatacaaaaaaattagctgcgcgtggtggcaggcgcctgtagtcccagctacttgggaggctgaggcaggagaatggcgtgaacccgggaggcggagcttgcagtgagccgagatcgcgccactgcactccagcatgggtgacagagtgagactccatctcaaaaaagaaaaccttgcagcttttaaaaagactggggctcactcttaggtatgcctcaggagaattgaaaacatatgctcacaaaagaaacttgtacagagatgtttataatggctttatttataatagccccaaattggaacagcccacgtgtccaatgggagacgacacaaactgtggtatattcgtacaaaggaacactatttagcaacagtaaaatgaacagatatacaacaacaggaatgaatttcagaagtatttcattaaacaaaataaatcagacccaagaatactcctgtatgattccatttctatgaagttcaacggacacaactcatccatggtgacagaaatcagaacgtggttgccgcaggaagtgttacttgaaagggcagagagaactctgggcaggaggcttgtggaatttggatgtggtttctaagatgtaagcatttgtcaaaatcattggatggaacactgaagatctgtgcagttttctaaatttaatctcacctctatttatttattgagaaatggagtctgtgcagtggcgccatctcggctcactgcaatctccgcctcccgggttcacgctattctcctgccgcagcctcccgagtagctgggactacaggcccccgccaccaagcccggctaattttttgtattttagtagagtcagggtttcaccatgttggccaggatggtctcgatctcctgacctcgcgatctgcccgccttggcctcccaaagtgctgggattacaggcgtgagccaccgcgctcagcctaatctcacatccgtttaaaactaacattaactrttgaataaaaacaattagccaaacttagtatgtcctgaaatagaatgatctccaaataaattcttaattggtggaggggggtaggtagaatcaagcacagaaaatgtgcatagtatgctcccatatgtaatacagttaatggatatctattacataatgtttctagattatataatatttctagragaatgtgtaagaaactgttgacagcggttccctttcggtgtggatggtttggggactaaaggtctgaagtgagaggcaaacatctcaataccttttgtgccactggaatttcttttactgtgttcmtattaattttttactataaaaagtagtttaaaaatttcttgaccagataacagggtgttctgagattgaactttaatatttctctgcccttgatagcaggaagcagggacaccactgccggccatgggtggcctgtggctctgcagctggaagggggcatttgtacaagcaggtcagggaagctgctggaagatgctcctggggtagggaagagagtacacctgagtcctggctcaggaagccaagtgagataaacggaatcttgattgcagagattcagcctgaaatggcaaacttccggttgagaaatgtaaaagcccatcccgtggtatggaggatttatcttgataaaacttgtgtgtgtgtgtgtgaatagatttttaaaaaggtttctggtaggttgggacacaaacccttttcagaggctgtgtgactaaggggagaaagtacctggaggaagggattgtggrctaagaataggacagccagctgtagtttgtttgttttcagacagagtctcactctgtcgcccaggctggggtgcagtggtgtgatctcggctcactgcaacctctgcctcccaggctcaagcaattctctgcctcagcctcctgagtagctgggattacaggcacccacccccgtgcccggctaatatttttgtattattagtagagacggggtttcatcatcttagccaggctgttcttgaactcctgacctcgtgatccacccgtctcagcctcccaaggtgttgcaggcatgagccacctcaccaggccaccagctgtagtttgtaatcagacaatacagcatttggactttgtttccacagacaagaacatgccattacaggtcttacccaagaacatcctgatttgttcatctcaaggattgggctttgtgctagtgagctggtatcctgcttggaacccagatcaaagagttgttttgtttatgtgcaagagatggtggggaggagagaagacttcacctgtcccaggtagatgccagatggggagaccccagtccttctccaagaaagctctcagctgatgatgaacaggggaggagacatatgtcctgccctcaggagcatctcattcagaggtcaaaggctaaggagcccagggacttaattttggaatgcaaagaatctttgtggagccataagtccctgccaaaaaaaattaagagggcaatcctggtcaacattgtgtgttcagctaacctcaagcccagatgtctgatccaagcactaagaagagagaactcaaaggcccagggtggaccctttttataaaatgtcagaggcaagatatagataggggaaaggcctgagatggccttcagcgaacccccatagggaagcaggcagtgggaccttggaacaggctccaagatgagacagcatgggagattgggatgggggctccatctggcccaagcagagggagggtcagctggagtaagaggatccgtgactctggggaaagcccttagagaccctctggtctaacgccttcatgaaggaaactgagacccagagtgcagcatgactgatttggtgtctgatgtcaggactgagctctgtgcatggctcagactctagcctcccaatccacgggaccccctgcagaaggtctacctgttgggaattggaggcattgttgaagctcttgaccagaaaaccatgtactcacttcctacctagcaacatgctcctactgaattctacggaaagagggcctctcaagactcatggagtgatcataccagacacttatcatcacctacccaacagctcctcccaccgttttgtcctgccagagcccagattttgtagtgggtggaaatagcttaatttggggaaacataggctaattccccaaccccgaaagatgagtcttaattggtcacagtattccaatgggactccaatccccctttgtgaatgatgggtctaagggtaggcaagtgacccacttgtggcccagaagacataaagggaagtctgcatgggacttctgaggaagcttttactttcctagtaaaagacaaagatgcagttgacaccatcatgccctcaccccatccacctttctgccttgaaggaaagcagctgtgtatgtagcctgggggtcaagcatgggggtaaaagtgtgaaggctttaagatgacagagtggactatggagcgcaagtccttggaggctgaaatgagctgttgggccaatgccagcaaccatctacctacagacttcctgaaaagtaaacattaattgaccttctggtttaagccactgtttgctgggccttctcttatttgccatcaaaagcaaataaragagcatgtatggctaagttaagtgttcagaatcacacatcgagttagtggcagttaccgttccaacccagatcttccaactccatgcccactgctccttacactaaccatgaagggccttggcctcatagagcttgtagggaaaggtaagtggccaaaagcaagtcatgccaagggaagatctctgaatacaggtccctctcttttgcctcccctgagataggctcaggacagtgatcaatgagacagggtggtccttgccctaagaagcaaagggtttggttggggaggccatacactttagtgcaactccagccaacacctagagttgtttaggattggcctctggtcagcctcttcaggtgggagcttggcactctggaagccctccacccagctttttgtcagccctcaaccacatggtgtctggaagagtcctccacccacccaccagttcctcccccattacccctggccattctactcatccttcaatgcccaccttggatgaccttcattgaccttgcctactaccaacagcttgcacctaattgactgcactgaccaatcatttatttatccatcatactaactgtatagcctgctctgggtcagccataatgctgacactagactcggtgggcagtcagagccctcagtctggtggggcaggccagtcaacggcagcggcacagagggcagtgatagagggctggggaggaaggaagtcagcagttgtaccttggtggggggaggtggcagccttttccctacttccctccccaaccaaacactttgcttcttagggcaaggaccaccctgtctcattgatcacttgtcctgtgcctatctcaggggaggcaacagacagggactcatgtttggagatcttcccttggcatggacttgctcttggccactcacctttccctacaagccctataaggccaaagcccttcatggctagcagaaggagcagggggtatggagttggaagctcttggttggaactgtaactgccagtaacttgatgtgtgactttggacacttcccttggcctccctgagcctcgctttttttttgaaagacaaagcaagataataacaccttcctatctcacagggttgctgcaaagatcgaacgagataactagtggattcaacagggacaggaaggcctggcacccagcaggtgggcagggcgtaactaactgttcattcatccacctccctgggctccccacactgcagaaaaccagagacaagtcagcagcacagtggagctttccgcgggagacagagcatttaatgagagcaagagctggacagtgtggtcaggaatcgtcccacccaaggaaccagacacatactcggtccttgatggggtttcctgaggctctcatactttctcctgccctggaaaatgccatccaggagctcatctctttgctactgcctctcttccagagcagcacaagaaggaaataaaatggacttgcgggggaaagaagatgcttgtctctcatgtctgtctcttacaggggggcttctgaagattcccacagcctctctggagttgttgccccactttggggtctttgtccgagtaacttcaagtagattggcccacgggcaggggttgtttgctgagagatcaccaagcgctgctcaatctcaacgatcctctgttgtcaccagccatggctgtgaaggccagtcaacaaagggaagattttacccagaggagctcaaacgctggcatgaaagactctgaagtggcatagccagtggaaattaacagctgtgtccactctgggcctcaggtgagggaggrcctagatagcccactgtggyccccagagcgccatcactgcccatacttggagtgtgatcctagctatttggggatggcaggggaagcatctcccagaaaagatgacctgcctgggagaaaagggggaccccagagggtgccagccaaggcgtctcggcaaatgttgacccagacaacaggggaccaaggagttgaaggaggctcactggagaggtgggacagggggccagtcgattaawacagaaccaagtgatgaagggmgtaggttggcctgtggtgcactgtgggtggcaagccaggtgtcgtcctgaagttggcaactcagattcctcatcctttggtggtggccacaggaggagttcccagaggcttcaggaggctctgattcccactcgcactccagcagtgggaggttgctcaagaccaggcattccgtccctggctggggtgtcccttccagagtgacagagatgatctgaggctgctcaaggtgagctggaagggacatgggcactggtaggtggttgtcttagctctcaaccaggggatcngattcccatttaaactatctaggacgaagcgagtgaaaaccagagccctgtgtgggggatgcttgaggcagagygggtacagcagcctgcatcctgatccctcggctacctggcctccctcacagagataatggcaaggcttgggaaagatgggtccagcagcccactgaggggttcccttcatttctgagcctaccctccagctgcccatgwccatctctgcatctrggcttggaggaagaggtggcccattggctgggttttggtggtgtgtggacatcgttgggtcattttggggtgtgaaccccaaaactctgtacaaggtgtgccagaaggttcggtagtcctgaggagggtragggctgtgtgtgtggtcttgtggctcttcctaagtctcaatatgtgtcacattagcccagtcagggaaatgatccaagtcaaatatggcccgtccccaggtgttgacagccaaaaacacacagaagactccaattatgttcattatgactcctgttttcacctggaaaagagacagagtcagcaccctgaggcctgctggggactagtgctctcagagaggaggacaaagggtcggctcactgggcctcgatgtccctgtgccatgctctgtccctggctggggtgtcccgacccccaggacagtgcgacttcatgtcccccaggtatcctcagtgctcaaggcatccctgggaagtaggcagagtggatgggttctctatgcccgygcgcatttggaaaatgacctcagagaagtgacaggaggcaacagcttaggccattcagggaaacggtcacagagcccagtgttccgtgagtccaggttcattgctcaccccagtgccttaacyatcctacaaggacgtgccagcttccctgtggacctcctcaggctctttctgatgcctgctctgcaagcttccctcatggtcactaaccatcgcttcactaccctgttgtagatattttactggggattggagtcaagtttgcagtccatggtttctgggacccacctttttttttgaaaatgctcatggagtccctgagatacccagcagaggctctgagataacgaacacccgattggtcccaggtacatttctggcctcttgggctcaaacacttgcctctttcccagcccagagctgcaaagctgcccttctcccagcaaaggtgacagagctaatgaagagttcttcctctgactacatttgtttccaaggcatcatctactcccaggcagtgctctctctctccctctccctgcttctacctcttcaggcacccctacaaatctctgtgactgtcattagcatccccctgctgcctaagcctgccctgcctatcttcatggttcttgctaatttgtcaagttcatccttggccatatgagtccctcagccccaccttcaccccttccaaggactcccctggtgcctgcacaggcttctccaggtgggagagtctataacccacctcagagaaagaacagtgtgtgaggcttgagatcatctcagaaaaagaagaaaagctgcattataaatgtcaacaatggctacaggtctggatgttccgtggcattcccaagtcacatgacatcgttttgaaactctgtcattcataaatggggcatcccttatgacaacagcrttatagtccgacgggagtaaataaaaacagctgtgttaccatgtcagcaaccttgaggtgcccataggtgaacacgatggcatttggaggggtggccacaggcaacatgaaggcaaaggaggcactcagggtacagggcagcatgatgtacagcggattgaggccgatggagcgagactgcggaaaaacagcactgcaacatcaccgtacagaacacagaagctcttggggaygtgattctgaaaaggattctctgaaygtgccgggtacgtttgaacctctgtgcctcwgtcttggttcctctcccttttgccacgtctctggcagataattccacctayggaacactgaaggctgaggtcagaggccacctgccctagaaggccttaccccctcaattcattcgacatgtatttcttgggcacctactatgtgccagagaccatgctgagtacttagactgtgctcaaccttacagtgccgcgtgcacatgtctgtctgtcttgccacagactgagagagcctagaggccagggaccacatcttctctcccgcatataaatctgtggatgtgtgtgtttttatacatgcgtggggtcattttgcacatggaatttggtagccaccttttaaattctacactttaaaatttagccacatccaacagcacctatcagagagtaggcactcattaaatatttgctgagtgtatgaatgaatgatgtaattcctaaaatctatcaaatcaatcatgtatcatgcacatgagggcagacacatgcaaacatgtttgttgcaaccatgtaacggcaaaacacaggaagccaactcaatggtcactaatagcaggatggttaaataaaatatgacacatacaaataatggaatagtatgcagctgtaaagaattggatttttttttctttttgtgctaatcaggaaagmtctccaagataaccaaggcttcatggttagattttttaaaaattaagatgaatggccgggcgcagtggctcacgcctgtaatcccagcactttgggaggccaaggcaggcggatcacctgaggtcaggagtttgagaccagcctgaccaatgtggtgaaaccccgtctctactaaaaatacaaaaaattagccaggcaaggtggcaggcacctgtaatcccagctactcgggaggctgaggcaggagaatctcttgaacccgggaggtggaggttgcagtgagccaagatcacaccattgcrctccagcctgggtgacaagagtgaaactctgtctcaaaaaaagtgtgtgagtgtgtaaaatatccagaaaaatatttgagaaattaacagaggtcatctctagggaggaggctagaggattaaggtctgtatacatctttgcattattagacatttttagccatataccatctgcaattttaaaaaactatactatgagcatgttcccattttattactctttgaaactgtgatttttaatggcctgataatgtcatattatatgaatatatgataatttatttcagcaaaccccctgttactatggatatatttgtataataattctgtcatacatcatcatcacatatgttggtaggcatctctgattattttcctaagatatattcccagacatgaaattgctgagtcaaggggtctgagcaggtttaatgttacggttcctgttggtaaacagccctctgaaaggactgcgcaagtcccacgccccctgggaaccactgaggggtcccacgcaggggcccagctcttcgctggcgcgtctccccgaccatcctcgttttcctggctgtgggtacctcatggtgtctgcacctcacactcctctgcagcccagctcaatgaccatcaccttttcctttctcataggtgggcgtgagacaggagtgtgatgggccttagaggtagctgggggagtttttacttgaggttcctggttctagaaaagcccgttttcaaagagcccgttagggcctgcatttgcctggttggaaccctcggtgctcccagttagggctggagatgacaaagccacggcctgtgctaggagagaggaggcatcaccaccacgtgcccagtatcaaaaggtgctccttctactgggcgtctgtttggacagtctgcttaggagaagaggagacaggccactttgctattttgaacactttcacctccttgctatttttaacactttcatcttcacttggaggagaaaaaaaccacttaggtttgctttttatacatgcagacgcccaggcagccgaatggaaattcaccaccttcaatcctgtgttcaggccctctgtaaatctgtctcccaattccagaataatgacagcctctcccatgctcattttgcagtctacagaggcttttcatagccctcatcttacttggccatcagcacagctctcggaagaaagaactgaagggccatgttcagagatcccacatcttgaactcgggtcttctgactgcgagaccagggatctttccatactaccctgaagctggtacgtctttgcaatggatgacagaaggaaatgcaaaaaaaaaaaaaaaaaaaaaaaaaaaaaaaaaaccrtagccactgattttcctataagctctgctttcttctcactcccaactcaaaaacatgctagtccatagaacagaatgccttagcctggcactcagcagcttttcccacaaccgacagctacctctctcmactccccaggatcccttatccctgtgctcaccaagccaggcttccaggagtcctcagtcatgtgcaccattgcctttccttgtgctgctccatcttcccagaattctctctcccttcctacctactcccaagtccccactcctccaaggcctcttcctggggtttccagccagtggtgctcccagtctgcagtcctcctgcacacctgtgctacatgctcagagaccacggcactggcctgctcctccttagcccaagtcctgtctccccagcttgaaaaataatccaattagatttataaaataaatttgagcacttggtccatggttggtgctttggtcagcaggaggggtacaaagaggagtggcaaagcagyggaggcctcaggggcagaggcatccagggtccacaaatccacgtcacagtcagacctgggtctccaaagcctggtctgagtctggcctggayattgctgcctcgtcagggacccacaatatggccatgtgttcctgtgaaatggaagggctcctccccactgtcaggttacttaccatggaggcaaagatgggcaggaacaaggtggtggtggccacgttgcttgtgcactcagtgaacacggcaacgagcaaggacaagatcaaggtgatggctgccgggggcactgcgtgcaagggctccatctgcttccccatccacacggacagccccgaggcctgggaagcaccaggagggcagtcatctcagygctcccagcttgcagttccttcagggccagrgcaagcttggcccatcctcccctcccgaccctctctctctacacctcataggtgacctcatccattcccaccattttcatccccgtcytcactctgctgtctcctaaatctgtatttccagccagctggcctactatgtggatttacatacccatatgccttctggaaatgtccatccagatgtcccaagagcacaacagactcaacatgctccaccctgcattcatcctccatagcccagaatctgcttctctctctgggcctcccagtttggtgaatggactcaccatccaccagccatccagcccagcaggctgggagtcatgctgccggtctctgttcccctccttccttatacccagtcagtcaccaagtcayccaaatgtctcacatccatctcctcctcttcagtgctccacagttttggaagctcaggagaatgatttcaaccagaaattgaaggtttagatttagggctttgggctgagaagagattgtccagggagagaatgaagtgtaaaaagaggagaggccaagkacagagccygggcagacactcctgtttcagggagaacagagaagtcagcaacgaaggctgagcaggaatagtctgagtccgaagtaaagctggagactgtgctgagctgggggccaaaggaggagagaatgtccacagagtccaaagttctgagcctgagtgagatggaaggctgcagagtctcagctagttctcctccaagccctgcccagcccaggcccccactccagacatcagagtgatttcctcatgtgcagatctgaccaactcaccccctggcctcagtccttcagtggctgtctactgcattcacgatcaagtccacacccctctatcttggggccctcagagaagtggcttctggtagccttaccagcctcatcttctacttctcctcagctaaatacctcacatttttcccttgctcgtgtgctacttcctgaaatgccctttcatatatgtgcccctccctagtctgtgaagtctgccacgaacagggaccgtatctcaatctcctctgtaatctctgtgcctggcmtaacactagggacataataggaatgttggatggatggatggatagatggatggatggatggatggatggatggatggatggatggatagatgggtggatggatggatggatagatagatgggtggatagatagatgggtggatggatggacagatggatggatggatggatggatggatggatggatggatggayggacggatggacggacggatggatggatgaagacatgaatagatgcatggatgatggatggagaggtgactagatggatggatttgttcacctccgcaaaaacttagcacccactaggcaccaggctgtgtcctagatattgaagaaacagcaataactagaccaagtctgtctattacactcctggatacttgggtaggtagatggttggttggaggacagcagcagcaagctagctcatccctccctctggctcatttcttccccaggagggaaagaaggaggtaaagaaagttatatttttgtgtgttttccaacatgttcctcacctcctacrctgctacatacttagctaaagaaaaattttgaagtagctaccatgttaartagccagtagaaggaccaaaagtagtagcaaacaatattgacaaggattggaaagaaagatttccctcagacaaatcaaagcagagattattgtgatcaagccccagagggtaactgacagtgtcctctgcctctcttggctaaccacggtcactcattcactcattcctgcaatcgctcaaaggttactttctgtcttccaggccctgtgtgtggtgtagagttcctagatgacaagacagagtccatgtcctcaaggaatgtgcggttatacgaaggatgcaggcacagaaacacacaagcccagggatggaagggtggagaaacgccaccctcttgacgaagaagagggctctgggcagcctgtggctggagaagttacctcggatcctttagccagagcaaatccgccccctagtagcagcacgatgccccagggcactttctcctgggttaccttccaatccagcaggggagggggataaaatggagttttcctttctgggaagaaaaagaaacacacacacacacacacacacacacacacacacacacacacacacaccagagcagcattagaagacaaaagaaatctaatcaagggggaataaagctaataaggacaatgaggtaccatctcctacttataaattagctaaagtttacaataatatatacattgctggtgaggatatgatcaaactattacacacactgccaatagcatcgtaaattggtatgacctttttgaaaagcaatttggccatacattttaagggccattaagactttgtattctatcaccccagcaatattactcctagaagtttatcctaaagaaaaaataccctcaaaggaaaagctatatgcaagaaaacattaatttatgaaaataaaaaattcaaaacagccaaaatgttctataacaggagaatgattacaacccctcaacgcaatataatgccattattagagaaaatatatttgaagactgtagcaatagtgggaaatgtttatagtgtaatatcaatcaaaagtggtagaagaaacaacaaacaaataggattcaaactgtgtgtgttgattataatgtaatatacaggcatattagcaaagactgggaggaagagagaaaacaaaaaattgtgctgaatggaaatcagtgttatggaaaatttgaaacattttctgttcctgttgtaatataaataaaatttcaaatgttaaattcaaatgttaaaaagcaaaaaagatattttgcactaaataataccaccggtggcttgaaagccactgtttcccaggcttttgtagccaatcctcttggatatgatgggattttctccctctagggcccaaggcatcccatagtgaccctttggttccagggctccagtcctgatgactgggcgatcagaacaggagacttaccttcctcagtctggctgcggaagttaaacttgggcttctgtgaaggcacaatgaatagcagggtrgccacaaagatggccacagtggcatcggagacatacctaggtggggaaaagcacagctcatctgcgacagagacagtcactcaacaaacccatcacaactccggcagttctgtgtccaaatgcttctatgcaaagaaacaggctcacagccttaaaagtcaaggtcaagagtggtggccaggtgcagtggctcacacttgtaatcccagcactttgggaggctgaggcgggcggatcacgaggtcaggagttcaagaccagcctggccaacatagtgaaaccccgtctctactaaaaatacaaaaaattagccagacatgctggcgggcgcctgtaatcccagctactcggcaggctgaggcaggagaattgctgggaggtggaggttgcagtgagttgagatcatgccattgcactccagcctgggtgacagtgtgagactctgtctcaaaaaaataaaaaaataagagtggtatgggagactgaatcctggctagaaatcaagatgcccacactcttgaccaccaactttgggtgatcctaagcagtttacttccccctctcagcgtgcattctccataagtgtatttcaggacctcttcttgaccaggttctctagaattctgtctgggttcaccagggtgaccatgaagactttggtgctgacctaagccgaccttcaaaacgaaatggccatcataccagcatctccctgcccacatcttctgccttttctaggatgtacatgtttctcatcctttcttccattctgacaacgtcttagccaggagagaaactacatgtaccccctttgccaagtctctgtctatgaagctccctagatgtgtgcctttggagggatttgaccagatgtgaagatgagaaagggaagatggcagagcagagatttggaaactagagctctgggaaccctactcctagcccaagaaatctctctcatcacagctctggccaccctgcctggccaaggattttctgctcagcctactcagggaggagaggataccacaggaacacattagggtcttattgtggagcttggtcagaaaacaaaaatgagtcatgaaaccaacagagtgctctctgaaacccagctcccaaaagaggaaaagtcttgaccaagcatgagtgcctggcccacattcctcttgccacctgtagccgagaccagcagcatttaggcactagtgcactaagccagtggtgtctttctttctctttttttgagacggagtctctctctgttgcccaggctggagtgcagtggcacgatctgggctcactgcaacctctgcctcctgggttcaagtgattctcctgcctcagtctcccaagtagctgggactacaggcatgtgccaccatgcctcgctaattttctgtatttttagtagagacagggtttcaccatgttggccaggatggtctcgatctcctgacctcaagtgacccacccacctcagcctcccaaagtgctgggattacatgtgtgagccaacgcgcctggccctaagccagcgatttctattgaatccaagacttactttgtctcaccctccacccaggcaacagtcagccagccgggcatgaagccrgggtctcgggagaaccacaggatgaccagcaggaagaagcagatcagcacgttgatctccgcgaaggacaagggccccagcttccggtactcctcctgcagcaccttgagggcagccttctcgtttttcttgctctctagcccgcagccccaggactttttaaaactggagaatgcaaagatgagagaagggyagggcagactggttggctcaggtgctggtcagatggagcctaaatgttctacagcagaatgtagcaaaaagacacataatgctgtcctcgcctgctatggggcctggagaaaggcccttcctgcctctttccctctcctgttcttccatcccagaatgtactagggaaaagtctctgtagagaggctagagggtctcggcaggtgcccagacacctggagactggctgctccagggtcacctgggggaaggccataaggagcttcggagcctgcgcaaggtgggaacagggctccctcacatgcttcccaagtcttcctccttccacctcagcctggagctgccttcgatggtgttgggatgccaacccccatcaccaaggtggctcagggagatgcagggagtgagtatgaaccctggcagacagggctagtcaggggcagaatgggtccttgtgttccctggagttggaggtgcaggattagggatccaggagaccctggggttagcagcaagcatggctagggcaagaaggaagacagcccaggatggcacccccatcctggatgggcccccttgggaccagtgtccattgtccagggtgtcctgcagggcctcccctaaggtggcgttggcatgaggaggcagggaggagaggaggttcttggaggaggtgtaaaggggagctcagctgtggaggggggataactggggccactgtgcataggactaaggcctcaaggtatgctgaatattccattcacacattccagttccagccactgttggtttgaaggggtgggcaaggccaagagtattgtcctggagagccctccctcgtgagagcccttccgggggccatgagacataatcataggagggaaggggttgatggaataggagctcattcctgaagccagtgctggatgtgaacagccttggagagtgtgagggccaagtgttggtgtgatggtggcttggcctggaacatggggacaccaggacatcaggtcacagctttctggggtgctcaggggtcagaaaaggaggcaacactgatgggacctcaggtctacacggctggctaggatctccctgctgggcaaggccgtgtgtcctgagggtcacccgctagggacactctctagacatccggcacagggatggctctgctggtgtaagacagggcctctctgctgccacacccttggcttagtaaagtttgtgctctaccaagcacctctctgctgccaactgtcrtcctagagaccctggggctcagccaggggcttcaggtttccagcataaggggtgaccttggtattactagtggcccaggagccagagcctgcatttggtgctggcagctcatccccaacaccacagtagctgcagactctggggctgcatggagtatgcagtcttccaatgccagtgccccacagtggtaccgccaagccttcagagtctctcgtgctgagcagctttgctctcatctctgggttaatttcatctggtgatgaccaggctggcatgagatgcaagtaaatggatccagttggcctgtgaggggcctaggtcagggtcaggggtggggaccacagagtcctcctgcagcagaacagccttcaccatgatgcaccatggtgaacttggactgaatatgttgcagagccaacaagaggggagagattcttgagctttgcatgcctctgccctggcaggggtcccaaagaaccctcatggctattacaggaggtaagcctggttgggacagttaggtataaccagtaataatatcccatgtagttcttggtggtcctggggtggggtctggcccctttggctagatatagcctaggaggctgcactaggctcttcagcaagatagttgttctggattaggctagaggccaagaacttaacctcgttctccaggatcgttcagatgaggaactctagtgagagcaacagctgacagtggagctgcctcctgccgctgagacaggtgctccctggcctcaggtggggaggtccatgaggccacaaaggcaggcagggaccaccaggtcttagtttgtggcaggacgtggcctgggccagagcactgttcccaccactcaaaccgaatgtaaaagctgtcctctaccttccagatctggagccaaaacaaagctgccgtgagctaccccggccagccacactgcatgcgtccaaactagagtggcccgtcgggaaggggaaggggtgggactggactgcagccacgcaccccaccacgagcatgctcagaagccccctgctgcagacactctcaggctcccccgccagtcaacaaaagctgatgaaggccgtgccaggctgggtggactcagcttcaggttctggctgtgagtctccaggggcctgacatctgcctctggccagacaagaagctgatggtgcccttgcggcctcggcgccatgctatctccctcctctttctcagtaggccttggggttctagggcagccccggccccaactagtgtttctgacacctggtcatgcttaggtctggaggcaactaaggacagcaaccctcagcctccccaagaggggatgccatgcagtgggagccaaagggcctgggttcaagtctcagtccccctacttccctgttacaaagctctgtgttgaccacatcacctctccatgcctcagttgccttgtctgtaaattgggaataataataatagtgctgacctcgcaggttgttgtgaaaattaattaagtttaagagtgcttgggccaggcgaggtggctcacatctgtaacgccagcactttgggaggccaaggagggcggatcaccggaggttaggagttcaagaccagcctggccaacatggcaaaaccccatctctactaaaaaatacaaaaattagccaggcatggtggtggtgggtgcctgtaattccagctacttgggaggctgaggcagggggaattgcttgaacccaggtggtggaggttgcagcgagccgagatcataccactgcactccagcctgggtgacagagcaagacactgtctcaaaaataaataaataaataaataaataaataaataaataaataaataaaataaaataaaataaaataaagaaaggaaaagagcgctcgaaatcatgtctggcacatgatgagcactcaataaatgttggtcattattattcctgttgccccatgaggagacacagatgctcacctgcagcaggttcaggaccatctcctgagagacctgttcgacggatgtgaacaaatgaacaggactttggccctggtgcagattcaagaggcagggcaaagagagctactgtcaaagccaggctgggtggccaggcagccatgcaaacagtttcccctgccccgtccatgggcaggacagagtggggtttgggcaatgatcattaatattgtcattcttactatcattattatgattgttttgaatatgtatagcaacttttttttttgttttgagacagagtcttgctctgtcgcccaggctggagtgcagtggcatgatcttggcttactgcaacctctacctcccggcttcaagcaattctcctgcctcagcctcccaagtagctggggttacaggcatgtgccaccatgcccagctaacttttgtatttttagtagagatggggtttcaccatgttggccaggctggtctcgagctcctgacctcaggcgatccgccctccttggcctcccaaagtgctgggatttcaggcgtgggctaccacgcccggctaatttttgtatttttagtagagacggggtttcaccatgttggccaggctggttacaaactcctgacctcaggcgatctgcccacctcggcctccaaaaatgttg

SEQ ID NO: 94357 - DNA, 18648 bp, Homo sapiens
  misc_feature (1)...(18648): n = A,T,C or G
tcacagtctgtgcctggggaggggtacaaccgacggcaggtcggcccgggaccctgatgtggttagggagggcaggaatgctgtcctcaggccttcacagcccctccctcaggacctgggcctagggacccccaggaagatggcagaatcctctgcacatacgaccccttgtggggccctgctgtggtccccaggaaaactgaggctccatccctcagccgggtccttctcaccacatccgtacttgcggtccaggacttttggggagggggcgatggaccaccagcccacggcgacatggcggagtcccactccaatcccagcaagctcggcgcccctcctgtctccccgagttggtaagctgggtgggtgggggtgggggtcccaccggctcccacctgcacccccgagcctgacctggaacctgtagggcgtctcgtctggccggagcatgaggctacgggggtcgcgcagcgggtagatgtagccatgctgcaccaggacggcgcccaggtgcagggcctctggggaggggtgggacggtgagcgcggggccgcggaagcgggcgagggcgggacgagccgggcctcctctcccctatgtgctccccacccttgcacagcgcgctcagcagggctctgagaactgccagactccaggaaaacccaggcctaggccaccagcccagtgaccccagggcccagtgggaggcagggcgctcaccctcctccgagacgcagaacttctgggccaaccactgcacgacgtcgctgcctgcacgggagagacagaggtggagggaggccgaggcgcgcacgcacccccgccccggcgcgcctcacctgtcaccgcgtggggaatgacggtgaccagcaggcgctggctccgcatcttcacgccctggtcggggtcctgcatgctcacgaccacccgctccatctgggcggagggagtcgtcagggggtgtctggccgccccgcaaccctgattccctggcaccggccgggatgccccggatccgggagcgcggagattaacgcgcggcggcggcggattccaggccgcagctggcggcggggacgcggggcgggccggggagggccggggagggccggggagaccccggagacccccaagggccccaggcctcgccgcccctcccggcctcgcagacctccgccccaggcccgccccgccccgcgcgcccccgtgtccccatgctctccggcccctcccggcctcgggcgccgggaaatcgggggacggcgggacacccacccgcctcgcaccttcctcagatgcggcatctgcgcccgggggcggccggggggcggcgcggggccggcggccatggctgcggggcgaggccggcggggatgaccgacgtcccgcccggccccgccccgcgccgcgccgcgcccgggttaaccctcgggccgcgaggccagagtcgcccaggccccggttcgggttttaagagacacggccacggcccagaggcaaacgagccggccccccacgagcgacccgagtcacccccccgacccaggtcccgggacgctgaggccctcgtgggtgaaggcgaagtgggacgggggagggtgtgggccgggggccgaggggggatgtgaggggatggagctcagctggagcagggggtggtctctgggagaggcagaggggctcatcagcgagggggggttactatggggagggtctcagggagggcagcggaggggatgggggttcagagagggagaggggttccgtgagtagaggagacccgtagggagagtgaactggggtgggaaacgtggtttagggcccactgtaaccccggtcctatgtgtggggccctgaggacatacagggactagaggcctggctgtggggccggggccagggccagcggtatgactgcccgaggccttgtgtcctgcgatgcttgtggccaagactgcatacattgctgtgacggtggctggttaggggcagggtgcatgagagattgggtcagctttctacatgggccggatgccggctgtcagtggagcacgtggctgctgcagagtgtgacccagctgtccccatctcctgctgtgggtcccttatccggggtccttccgggaaagtggctgatggctcatggctcacttccctcagctccacgcaggcctgggtggcccgctggggaatgagcagaaaccctgcccagggcaccctgacactgttggagaggagctttactgcagggaggmcctcaacasacacccacttagtgtcaccggcggccgccaggcttcaggccccactccactcccagctctctccctcctccaatggctatgcctgtcccccaggtgcaccccgagccaggcccaggatcttcaggccccaccgggcagtctcggctcactgcaacctccgcctcctgaattcaagcaattctcatgcctcagcctcctgagtagctgggattacaggctcccaccaccacgcctggctaatttttatttttgtttttgtttttgagacggagtctcactgtgtcacccaagctggagtgcagtgatgcggtcttggctcactgcagcctccgcctcctgggttccagcgattctcctgtctcagcctcctaggtagctgggattacaggcacgcgccaccacacccagctaatttttgtatttttagtagagatagggattcaccacgttggccaggctggtttcgaactcctgacctcaggtgatgtgcctgccttggcctcccaaagtgctaggcttataggtgtgagccactgtgcctggccgattttggtatgtttagtagagatggggtttcaccatgttggccaggctggtctcaaactcctgacttcaggtgatccacctgccttggcctcccaaagttctgggatgacaggtgtgagccaccacacccggtcggatcattttttaaaaactaagtcgaggtctcactatgttgcccaaggtggtcacaaactcctgggctcagtccatcctcctgcctcagcttcccagcgtgctgggattaaaggcatgcccagccagcatcttttttttttttttttttttgagactgagtcttgctctgtcaggctggagtgcaatggcgcaatctcgtctcactgcaacctcctcctcccagattcaagcaattctcctgcctcagcctcctgagtagctgagattacaggcccccgccaccacgcttggctaatttttgtatttttagtagagacagcatttcaccttgttggccaggctggtcttgaactcctgaccttaggcgatctgcccacctcggcctcccgaagtgctgggattacaggcctgagccaccgagcccagcctcagcaccatttttaaaaggtgcaaatgcatctatttctgcttgctttctttattttttaaattatttatttatttattttgagatggagtttcactcttgttgcctaggctggagtgcaatggtgcaatctcgggtcactgcaacctccgcctcctgggttcaagcgattctcttgcctcagctcccaagtaggtgggatcagaggcatgcgccaccatgcccggctaatttttttttttgtttttttttttgcatttttagtagagatggggtttcaccgtgttggccaggctggtatcaaacttcctgacctcaagtgatccacctgccttggcctcccaaagtgctgggattacaggcatgagccaccgcacctggccactaattttttttttaatttcatttttatttttgtagataaatatacacgtagcccctcgcttatccctgtctgtaagggcctcagtttcttgctgtgttgcctaggctggctgatcttgaactcctggcctcaagtgatcctcctgcctcagcctcccaaatgttgggattacaggcatgagccatggcacctggctatgtatttattttttgagagatggcagtctcattctgtcacccaggctggagtgcagtggtgcaatcataaactcattgcagcctcaaactcctgagctcaagtgattctcccaccccagcgtcctgagtagctgggactacagatgtgtaccaccgcatctggtctatttctgctttcttggaggcagagtacctctccccatccttacccactcagagggtgctaggggctgggcagggtgggcggttggccttgggctgggagcccctaacatagtggtctgagtccatttccattgccggagaggccacgttcagcatgagctggggcagggggcttgtggggtctcttactccagggtaccatctcgcttggatcccagtgagccctcccatgccscacacccaggtggggtgaggtggcccaggtctggctgccctgtctgcaggggtgggcacccatggtagctgtgaggcagaatagggaatgagggtagccaagggttgggcataagaaacggaacagcaggtgcagccagttctaggcaggattgggcagctcacaagccacatcctggctgctgtgataacaagacagaaatttccacttcacctctgattggtctcgggccaatccttcatagggtgtagccaattggaggcctctaaagggcacaagggctgtggtcaggttyctttgcttaataaaaatcctaattacagaggctctggagctacttgctccagcccactcccactctgtgaattgccttccgttaaatctgtgctttccttactccgttcttctgactcagttttgtttccttgtgtttcgttgttcttttgttactttgtgcgttttgttcaattctttgttcaacccaccaagaacctggacaactcacctccaagaccttctatctggtaacagctgcaggagctggagctgtgggcctggggacaagtgtcctaacagcccccgctccctgcagcgaagggtcagcagaggtggcgctctaggggggcctgggcacaagttcataggatcctgccctggaaaggttgtgggcagttggggggcaagggagacagtccccacccaaaccccaatgccccctagcacccaaggtggtcttctctcaattgaggagctctttggcaagggcgggtctaatttctggtgtccctggaaccggccaggggtgtctaagaaagggactcaggctggtgttcggaccccttctcccttatccagacgcaggcctttggtccagctgtcccagccagggcctgctcacccctgtcccctgccgggtcccatcccccccacccacccacaggtctcagtttaggtgtcaatatcagaagccccctctgtgctccggtctctgtactccgcccccttgtcagtgtcctctccctgaggacagggggctcggtaactgggtttccaagagccctgcagggacaccccctcttgggaactcacacagcgcagccaggtcgctaagcctttgaggggcccttgttgcctcctgggtgtgcgtgcgacccgcgcccactgtggtcccgccctactgatgaccgtgaacctgtagggtgttgggccagcccctcaccccaaggctgggcaggcccccggagtccccctcggcccagacagaagctccctcaggagcgggggaggggaagggggcgcgcggtccggccccaggtgtggccgcggataatgagaccctggggatgggggcgcacctgcgccacggcgccccgcagagggtttcccaggagaccccctcgggctcccgccgcgccgtgggggtggggcagccctgctggccagagccgggcacgggccgggcgggcggcggggatcgtgaccgcggctgcgtgcgtccgcgtccgggcgcttctgtgcggggtcctggcacgccggcgggggcgacccgggtgccggcccgtgcgggcgacacgcgcgtctctgcggggctgcgcggggtccggagcggctgggggctctctgccgggcgcggctgggcgcggggggcgctcccggccgggatgagctcaccgcagtcgcgccggggctgagcgccgagcggggcggcggcggggcgggcggcggctcctcggcggctccgcggcgcccgggccgcgcgccgccatgctgggcctggacgcgtgcgagctgggggcgcagctgctggagctgctccggctggcgctgtgcgcccgaggtgagcgggccgggcaggggcggggggctcggctggtctcagccccgggcggggagtagcccctcccccgcggcaactttgggggcgcgcatggggacctcgcggcgccgaccccccggctggggtctggcaggggtgggggacttcatccaggctccagccctgtggggargggaccaggtgcggacgggtcggcttgggaagcggcggcgctgggaccctctccccctggacaccgccgcctggagcccctctgtcttgggtggggctggggctggggctcaggctctgtagggcgtgtggtgatccccgagaagacgggagcgaagtgggcagggactcagaaacccctgcccagggcaccagggagaggggcttcaggaggccaccagcccggggcgccatgggaggcggcgcagagcctgagcccagggatttggagacagccgcccccggcacccgagcaccatggggaggaactcctagactgtgggaaagtgttcagagaccccagtccagagcaggrtggtggagggccctagagggtcagtaggcttggggggccgccgagggccctagagggtcagtaggtttgggggccgccgagggccctagagggtcagtaggtttgggggccgccgagggccgctgctctctagcaggtagcccctgaccctgggctgccctcatctgaagtcttcgctcccccrccctttggtctccgagtcagggagggggcccttgtggacatctgggccagaggagctgcaggcctggcggtctctggaggcccctcctgaaggtctgggtgcggtgcggcacctccccaggccgccctgctctctctgctcgctctctccctgagcccccagaggcttcccttgagtccctttggatagtgggaggtacagctggccagagggggctccagcctggtgctcgaatgccagggtccgctagtggctgctgctcacgcccctccccacccccagtcctcctggctgacaaggagggtgggccgccggcagtggacgaggtgttggatgaggctgtgcccgagtaccgggcgccggggaggaagagcctcttggagatccggcagctggacccggacgacaggagcctggccaagtacaagcgggtgctgctggggcccctgccaccggccgtgggtatggcaggggtctaggcttggagggctgggtctggggggctggtgaggagcctggtgggggtggggggcatcctgcagacttccagtttctcctcagacccaagcctgcccaatgtgcaggtgaccaggctgacactcctgtcggaacaggctccggggcccgtcgtcatggatctcacaggtaactcgcaggatgctgcaccctgaacacaggtagggccctcccaggcacgcttctgcacccctgagttccgagccctgggccatcacagtcgcacacctcatgggtaccacaccctacgtgggggctcctggagcaggtctcagcctgtaggggagttccgaccctagctgaggtttccccaataggggacctggctgttctgaaggaccaggtgtttgtcctgaaggaaggtgttgattacagagtgaagatctccttcaaggtgagagccggggcaatgggcggaggggatgggggtgggggcaacagccagaggcctggcccccagaggaacccctaatgcctctgttcccaggtccacagggagattgtcagcggcctcaagtgtctgcaccacacctaccgccggggcctgcgcggtgagggcagcggtggggggaacggggcgggggggggaagcgggggcagacagaggacagctctgatgccctcgccctccctagtggacaagaccgtctacatggtgggcagctatggcccgagcgcccaggagtatgagtttgtgactccggtggaggaagcgccgaggggtgcgctggtgcggggcccctatctggtggtgtccctcttcaccgacgatgacaggacgcaccacctgtcctgggagtggggtctctgcatctgccaggactggaaggactgaacccccagtccgtgtctcccctacctccctcagttgttgcacagggacccccaagcatccccagcaccccccgtgagtgaccagaccctcccctgctgcccctgctgcccctgctgcccctgctctgtcccgggaccccctgggcctggcgctgtcccctgagctgtcccattaaacayggccctgtctcggtgccctgkgtgtcgtctcttwctgcctcccctcccctgggggccgggggcggccgcatgggccttgtctttgctgggactgggcctgtgtgccacgtggcagctgctgcttggcttctggcccccttatctgccccygccccacgcgccctggcagcaccatgagccgccagcttctgcctgtactgctgctgctgctgctcagggcttcgtgcccatggggtcaggaacagggagcgaggagcccctcggaggagcctccagaggaggaaatccccaaggaggatgggatcttggtgctgagccgccacaccctgggcctggccctgcgggagcaccctgccctgctggtggaattctgtgagtgctggggccagtggggctggggaccggcgggggaccggcagagcccacctgggggccccaccctttgccggcaaatgcagggcatgtgcccaagaggggcctccccgcaggcacttgcccccactgtgcccaggagctctctaggaggggcctgggggtctggttggggcaggcaggagcagtgtggtagtactgggggtacccacaggacttgagaacacctgtgcctccctgctcggccagcggccacggtgccagagtcaccaccttgccggccactcctccagctgccaggggcatcccacagactctgcagaggctcgggcagtatccaggctttgggggcccatggaggtccctgacgtgtgtgccctgtggtcttttcgcaacccttgacacacataggaactgttcttgcctaggaggccttcacaggcagccacatgggcccgggagccccagccatacaaggcacgaaagggaggggtctttttatttttattttttgagatggagttttgcttttgtcgcccaggctggagtgcagtggccctatctcggctcactgcaacctccgcctcccaggttcaagcaattctcctgcctcagcctcccgagtagctgggattataggcatacgcaaccaatcccggctaatattttttgtatttttagtagagatggggtttctccatgttggtcaggctggtctcgaactcccaacctcaggtgatatgcccgcctctgcctcccaaagtgctgggattactggcgtgagccactgagcctggctgtggggggagggggggtggtctttcaagctctcccaagccttactggtccctgtgctgcagcctggggggccacgaagaggcactggtgctcggcttgtccacggccagggctcagggcagaatggagcagcacgcttgttccctgctgggttgtcaggtgtggagagggtgctcctggggttgtggtggcctggggcactcacggccccatcccccagatgccccgtggtgtgggcactgccaggccctggcccccgagtacagcaaggcagctgccgtgctcgcggccgagtcaatggtggtcacgctggccaaggtggatgggcccgcgcagcgcgagctggctgaggagtttggtgtgacggagtaccctacgctcaagttcttccgcaatgggaaccgcacgcacccsgaggagtacacaggtgaggggcaggccggtcattgggggggcggtggccaggccgaggctgagggggactccctgcaggaccacrggacgctgagggcattgccgagtggctgcgacggcgggtggggcccagtgccatgcggctggaggaygaggcggccgcccaggcgctgatcggtggccgggacctagtggtcattggcttcttccaggtgagccactgggcatggggggccgggccatgagggcagtgactgtgggtgggaccgggtggcctcacagggccaggcccctcaggacctgcaggacraggacgtggccaccttcttggccttggcccaggacgccctggacatgacctttggcctcacagaccggccgcggctctttcagcagtttggcctcaccaaggacactgtggttctcttcaagaaggtaggtcaggcccaggtgtgggttggggtccggctgcagcgcccgctaacccacctgctgctgtccagtttgatgaggggcgggcagacttccccgtggacgaggagcttggcctggacctgggggatctgtcgcgcttcctggtcacacacagcatgcgcctggtcacggagttcaacagccaggtgcgtaggctgcagtgcctgggctgggggtgtcccagggtagagtcgtccagggatgggggtgcctaggctgggggtcctgtggagtcatgagcaccctccctactgtagacgtctgccaagatcttcgcggccaggatcctcaaccacctgctgctgtttgtcaaccagaygctggctgcgcaccgggagctcctagcgggctttggggaggcagctccccgcttccgggggcaggtactggggggctgggggaaaggggcagcgggagagtggccggtgccagcatggactccctgccacaggtgctgttcgtggtggtggacgtggcggccgacaatgagcacgtgctgcagtactttggactcaaggctgaggcagcccccactctgcgcttggtcaaccttgaaaccactaagaagtatgcgcctgtggatgggggccctgtcaccgcagcgtccatcactgctttctgccatgcagtcctcaacggccaagtcaaggtccgctgcagactgctcataatggaaggggaaccctgacctcatcccaccagcttggcagggggtgggaacagcagctctcagagccccctgcccctgcaggccccgcagaggcccccctcaacccggcaattctcccaacccggcggttctcccaaccccaacccggcggttctcccaaccccaaacccgcggttctcccaaccccaaccccgcggttctcccaaccccaaccccaaccccaaccccaaccccgcggttctcccaaccccgcggttctcccaaccccgcggttctcccaaccccaaccccgcggttctccaaccccgcggttctcccaaccccaacctcaaccccaaccccacagaggtccctccccccaccaaaccccacagttctccctccccccactaaaccccacagttctcccaaacttgaagaggacctccctgtcaggccctgcagaggatctcccccccacctgcccccrgccccgcacaggacctcccccccaccgccccccccmcacagaacctccccctgccgctgaccccgcacaggacctcccccccaccccccaggccctgcacaggacctcctgaaccctgcagaggacccctggcaaagcgcctgtcctggtttcccccagccctatctcctgagccaggagataccccctgattgggatcagcngccagttaagaccctcgtgggcaagaattttgagcaggtggcttttgacgaaaccaagaatgtgtttgtcaagttctgtgagtgttgagggaggcaggggtggtgtgggctgggcaggggctgcccagatggctgtgctcaacggctcccatcctagatgccccgtggtgcacccactgcaaggagatggcccctgcctgggaggcattggctgagaagtaccaagaccacgaggacatcatcattgctgagctggatgccacrgccaacgagctggatgccttcgctgtgcacggcttccctactctcaagtacttcccagcagggccaggtcggaaggtatggcggacaggtggctggggaggaagccggggtgccatcttgctgggcatggggctgggccccacgtgtcctccagatccccctgcctcttctcaggtgattgaatacaaaagcaccagggacctggagactttctccaagttcctggacaacgggggcgtgctgcccacggaggagyccccggaggagccagcagccccgttcccggtgggtgtccctaagccagggctccaggcctctgcacaaatcctctttacacagggctggcaggggcggggrcaggggtaggctgggagcagagcttcgagctgcacttgtgaccctttctaggagccaccggccaactccactatggggtccaaggaggaactgtagctgcccccgtgtcacccccgccatcactgctggacaggagccacccccttgggtaccagagggagctgtgcattgtgaataaagagtgagcttggttctggactctgtgtgcctggtccctcagcaaggctggcctgatgcagctctgcccagctgggggctccagggcaggaaggtggagcacgttcctgctctagccctgccagcctctgagtcacaggtgatccccatgcctgctggaggccagtgtgccctcctttaccacgggggctgaggctgggagacctaggccaggccccacccgcagcagacacaccacagccagggcaggttcaaaaacagttttatttcattattatccaagtacctttgaaaagataattaattgtacaagtgtcatcgcatgaaaaacagactcgggcagcccctgctggcctagcctgagaaatgtacatatttacacgggccctcagaaaggaggacccaggactgcacagccggcggctggaggcaggtgcagtgctccgtcgccgattcacacagtggcaggcaagagacaagctgkgttgaaggcactyggtggcgcgtacaattgacagaggccctgcaggcctctgcatccgggcctgggccccagccagacctgggtacgtgggcaaatcccagagggaaagtagatcccagcacacgtgcccaagggaggtgccgggggatgggggggggtcacctgaagctggcagcagggacctcggctgcctcacttgggctgggccctccaagtattgctatgaggagtggtccaggctgcctccttgggggcaggacagaagcttgtggaccacttggagggaccccctacctgcctctagacacgggtagaccacagggatgggtggtacacccaacactgttccccatcgggctcctgagtacgaggtcatctgcctggccgtgacacccgtgcccgccaagggcctcgcctggcacagcggccagcccaccagcctatcagtccaccttctccactttgccgatgatcttctcctcaaagacgggcaggacggcctcgtcctctcgaacctcctcaaacaccaccccacagtcaaactcgtcgctcactttcttgaagtagtatctgcaggacggaggtgaggagggcagtgagcaggcagcaccgcagatgggaaggaggcctgtggcaggggacggcgtgtccacaccccatcccgaggagcctcctgtccatgccccacggcccccactgcatgtgcgccccctcccagggcaacagtgaacagtgcaatgaccacatgtgggtgaagtgggcagccatggggggtgagttcactgcctgctgggagcaccccacatccccctgggagtacctgccccagcctctcaggagttgcaggggggaagtggacgggtgtggggtgtctgcttcccaagggctgagccccgtcatggaggtgaccccaactggggccctccctcagcaccacatctgcagtcatggggtgtttgcacagtggcttgtggacggtgggaaccacccgccaggctctgccaggctcttggggtcaggccccctctgctcaccgcccagtgctcactcgggagcctccaaggctggctgcacgcagggccctgcagggctgagtggcccagggcgaatgaaccttggtaggagggggcttggcttttcagtcaggcaaaagcacatgagtccagagcctggagacaaggtcggcctaggggagcctaacacaaggttcagaccatcgtcgtctaggggtctggcctctgttttcccaccccgaagatgagggccctggacgggggtccctttggaccctctcagtcctgtggggccgaaagcctgatgccaccctcagcctagggcttggagaagtggctttagttgcagatgagggacatgagctgaaatggccggaagccctttttcttctttttttttttttgggcgggggtagagacagagtctcgctctgtcacccaggctggagagcagtggcgtgatctcagctcactgcaacctctgcctcccgagttcaagcaattctgcctcagcctcccaagtagcacacctggctaatttctttagtatttttagtagagacggggtttcaccatgttgcccaggctggtctcgaactgctgagctgaggcaatccgcccacctcagcctcccaaagtgccaggattaggacgtgagccactgtgcccggctggaaaccctctttttcataccgttgggcacccacatactcgtgcggggagggggcaccccagccctcacactcacctgtagctgccctttttggtcagcagctccttgaactggcccagggtgacagcgcggcccctcaccagggtgcggtaggggatgggttccccgcagaagtagtacgccacaacgatgctgtcacacggctgggcactcccgccgcccaccttcctctgcgatcttgtcctggggaaagagatgcagcggtggtacctggttttggactgaggtcccacagggtccctcctgccggcctcaggctgccagtgtaaggcggggcaggcctgcaggggtgagcagcaccccattcaaacacctggggcccgcagcccccgcacagcatctcaatctgggatctagtccgctagcagtggagtcggctccgctcactgggagcacgaaggtctccctgctgcctcacagccccaccctcgactggccagggcctggctgccaggtgcactgcagctcccacctctaggatggcagggcaggctgcagggctcctatctcaggaagacctacggcccccaaaccttaaaaacatctgaagggcagggattggacaaacagaactgtgcacgatttctggataagcctgaccccgcagcgaagtttgtcggaggactggggcgggggtggccagcaggcccttcagagggggcagggctggcaccgtctcctgcccaggctgagccgggccctcctctgacaggtgctgtgcttccacagccgtgccgggatgacgggcggggcctggttgctctcgcaccccccactcggctaccccgccgccacctgtccttcaagtgactccagaagctgcccctggcccactggggttcagcccttgggcctcctcctggctgggtgcaccagaggcttccagagccaacaccagggcaggaaggcctcatggccacctgagccatgtgaccatcctctttgcacaccaggcccccagccacgtgcgctcttagacgtcctcccagtgccacatcctcggagcctcctggagccaggcccatcagagaagagccaacacgtgggggctgccccagggacaggtgaaggctgccccaagaccgcctacacgatgagggccacaacaaacctgcatctggggcaagcctggcaaggcctgggggacccttgttctcaaggccccttttggggtgtgccccctcctcctgccaccttgagcacataaaggcgccgtcgacacggcccatgtgggatcacatggtctgagccctttctcacgggttcagagcagtcagcattgtaggtgggagcagagccccgactcactgactgcacgggctggacagacacgcatggctgagacccacactgcaagcagacgcaccccgggcacctcagcacctgcagccccgagcctggtcaagtcaggcctggcagggaccggcccgttccaagccgggtggaggcgcaggcaggtctctgccccacaggaagcctggccgtgacacctgtgtggatgcaggggctggctgtgcccaggcctccagccgggccttttggtcacttgtcatcatgctggacagtcagcgtctcctttgatggagacaggagaaggctctcgggcagcttcgagtctgatgccacgggaccctctcctgccacagctgcttctragcgtggtacccgagctcaagccccgggacggcggctctacgatgggacctggcttgggacgccagggctggggtgggcaggaccgggaggaccctcaggacgcacgtactctgtctcggagagctccatgtccgacacggctggtaccacgtgcagcaccggcgcgcacgctggcctgacgcaggcgcgtccccgccgcataacctcctgcacatacctagggaacaacccgcgtcaaaggtggctgtgccggcggccaccagccctggggagggagcctcgaccaatgctgctgcgcagggacggacggagcgtgaagggcccgaacaacccaccctgcgcaggctccagtttgcagggtagacaagacaccgagtcccctcctaggcctgccttggtggtacccgatactgcagcgcrccccacattcatgatcccggcaccaaccccctgagttccctggaccgcactttggggagcttccgatcaggggtgctgggatcccaccacctcatcccctctggtgggatgacatctcgtcccgagagtctgtccttcagtctcttggcatgaattccccaccratagcgtggacactggctctggggcrtgcgtggcaactcggtctgcacctcagggaggctgagggccccccggcgccacaactgaggccatcctggggcagcacagcagctcctctcacgtggacacctccaccggggtacactgggcgaccttgatggtggtttctactctgacatcctgacagggcccagcacccaacctgcctctgggccttcactccgtctccacagcttctcgcaaaaacccacatcccctggacggacaaacccagcaactctgggtttccccatggggggatgctggagcccagcagccaaacgggcgggagggtcgtgtctcagaacggcgggagtggtcccacggctcagcrggcatcccctgccatcatgtggggccacgggtaccaggggaaagcgcagacgcaacctgagagacccctgctcagcccagcaaggatgggctcaggaagccccggcaggagagcccacacacgcccagggcctcggacctgctgcacacgatgcccaccacggctcatctgccagcccagtcacacgccccggctccgagcaccacactccaggctcctgcatggcagggggctccagctccttgttggccgaacacgatcacagggtcacagatgtttggtcataaagtggtcaccctttgggtttgaggtaactgtgaccctttctggccccagagctgtcattaggctcacagcctggcagaagctcaggaacctttaatgacttgagaccacacaggctttcagctgggaagggtctgaaccctgatgctggttcggcagaataaggcccctagccacagcctccctggagtggcacagccccaaagctggaggcccgggaggcgggcctggaccccaggccccaggtgacccaaggtggacaggaggagctggtgacctctgaaggcaaccatggcctctgtgaccacagccccagggcctgggtgagctataggctcccaggaccctcaaagagacactgatctgtggggaattccaatgacccaggatggccgagaaaactggccttatgagcaagctgaaaatggagaagccaggttctggcctggagcgaaaatgctgcccacacaaaggggagacctccctgcagcccagacagaagcctccctgccctagggagagaacagggtctggctacggagcccagaagaccaaggagggcgcagtgaggagggctgtgggctggacgtcccggatgagagaagggcacagtgaggagggctgtgggctggacatccaggatgacaagaggacacagcgaggagggctgtgggctggacgtccaggacgacacttctacatctgcacggctttcagaaccacgtagctttccgaccgtgcagagccactcagggctcctgggacgcaactgtcaagaggcagccgccatgcctccaggacctctgccctaaagcccaggctgcccagcagcgagcagcctctggctggggaccggcgttccccacacactggggccctgcagcctccc

SEQ ID NO: 94358 - DNA, 15986 bp, Homo sapiens
agagacagggttttgccatgttgcccaaactggtctccaactcctggcctcaagggatccacctgcctcggcctcccaaagtgctgggattacaggcgtgagccaccgcgctcagccagaataaacatttttttcaagcgcacacaatttgttttccaatacagatcacatgctgggccataaaccaagtctcaattaatttaaaatagtttaagtggtagagaatatgtcctctttcattaattaattwatttatttatttattttgagacggagttttgcccttgttgcccaggctggagtgcaatggctcaatcttggcttgctgcaacctccgcctcccgggttcaaatgattctcctgcctctgcctcccgagtagctgggattacaggtgcctgccaccatgcccagctaagttttgtatttttagtagagacggggtttcactggttggccgggctgatctcgaactcctgacctcatgacccgcccaccttggcctcccaaagggaatatgttctctgaccacagtggaattaagttagaaacctgtaacaataagatatcaggctgggcacggtggctcacgcctgtcatcccagcactgtgggaggctgaggcaggcggattacgaggtcaggagattgagaccatcctggctaacacggtgaaaccccgtctctactaaaaatacaaaaaattagccggatgtggtggcgggcgccgatagtccccgctactggggaggctgaggcaggagaatcatttgaacctaggaggcagagctcgcaataagccaagatcatgccattgcactccagcctgggcgacagagcgagactccgtccaaataaataaataaataaataaatatttaaaaaaataaaacaggtgagagacctccatgtagggcaatgccctccctacatgggtgtaacagtcgtagggctgggacagaattcagctgtcctgatccccccgctgtcccaccctgcaggtatctttttgagcaccttctacaaggaccatccagcacatccataggaatgttccagaaatccacggccgtgctcagccctgattcctcactccacctcatcctcagtcaggctctggggccctctgagtggtgccactccaagagtgaaaccagataggcagtccatgctttggatggcagtgagacccagacgcagttccagcgctggcctctgagcggcagtacagccccatggaccaccagagcccctgaagcccagctctggttggaggtgatgccactctgcacctccctggctgctgtttgtattagtcatctatgctgcataacaaataccccacaacttcatgatgtaagcagcacacgttcattatcttccagattctgtggacaggaggctgggtggggcttagcagggagcctctgagtcagaggctctcacaggctgtggtcaaggtgtcagccacgctgaggttaccccaaggcttgactaaggggggatgtacttgtttttttttccagaccgggtctcgccctgttgcccagcctggagtgcagttgaacagtctcagctcactgttccctctgcttcccaagttcaagcgattctagtgcctcagcctcccgagtagctgggactacaggcgtgtcacatcccaccaggctaatttttgtatttttggtagagacggggtttcatcatgttggctgggctggtctcaaactcctgacctcaagtgatctgcccaccttggcctagctaggtgctgggattacaggtgtgagccactgcaccacgcccactttttttttttttttttaagagatgggatctcgctctgttgtccagcctggagtgcagtggcacaatcactgctcactgcagcatcaacctcctgggctccagcaatcctcctgcctcagcctcctgcagattcacttctaagcccacctatgttgcttttggccagaaacatcagttccttgtcatgggggcctccgcacagggctgctcacaacaggggagctgcttctcccaggaggtggcggagcagcagcagctgcagtctttggtgaccagattgtgaaagtgacactccgtctcttttgctgtgtcagaagtcagtcaccaggcatggtccacactcaaggggtaggcattacacaaggaaatgaactgggttttgcttttcttgttgagttacgagagttcttttttgttttgttttgagacagggtctcattctgttgcccaggctgagtgcagtggtgcgatcacagctcaatccagcctggacctcttgggctcaagcaatcttcccacctcagccttcccggtagctggaaatacaggcgcacaccaacacgccccgctaattttttatttttttgtagagacaggtttcactatgtttcccaggctggtctcaaactcctggcctcaagtgatcctccaacctctgcctcccacagtgctaagagtacaggtgtgaaccatcccatcacgcctggccaagagagttatttatttatttatttattgagacagagtcttgctctgtctaccagcctgcagtgccataacacaatctcagctcacagcaacctccgcctcccagggtcaagcaattctcctgcctcagcctcccaagtagctcggattacaggcacctgccaccaggcccggctaattttatatttttagtagagacagggtttctccatgttggtcaggctggtctcaaactcccaacctcaggtgatccacccgcctcagcctcccaaagtgctgcgatgacaggcatgagccacctcgtccggcccagcataattttttttttctttttttaagatggagtcttgttctgtcacccaggctggagtgcaagggcacgatctcagctcactgcaacctctgcctcccgggttcaagggattctcctgcctcagcctcccgagtagctgggattacaggtgcatgccaccacacccagctaattttttgtatttttagtatagacagggtttcgccatgtcggccagtctggtctcgaactcctgacctcaggcgatacacccaccgcagcttcctaaagtgctgggatgacaggcgcgagccactgcgcccagtctcagcatgtttttaatgtgcaaaataaaatacaaggaaataaaaatataaaaaactatactgaaataaattatcaaaatattgtaggccaggccgggcgcagtggctcacacctgtaatcccagcactttaggaagctgcggtgggtgtatcgcctgaggtcaggagttcgagaccagactggccaacatggcgaaaccctgtctatactaagaatacaaaaaattagctgggtgtggtggcgagcacctgtaatcccagctactcgggaggctgaggcaggagaattgcttgaacccaggaggtgggggttgcagtgagctgagatcatgcccttgcactccagcctgggcaacagagtaagacgatgtctcaccaacaaacaaacaaaatattttaggcagcggggcgtggtggctcacacccgtaatcccatcactttgggaggccaaggcgggttgatcacaaggtcaagagatcgagaccatcctggccaacatggtgaaaccccatctctactaaaaaacaaaaattagccgggtgtggtggcgcgtgcctgtaatctcagctactcaggaggctgaggcaggagaatcgcttgaattgggaggcggaggttgcagtgagccaggattacaccactgcactccagcctggcaacagagtgagactccatctcaaaaacaaaaacaaaaacaaaaacaaaatattttaggccaagtgcggtggctcaggcctgttttcctagttactggggaggctgaggcaggaggatcgcttgaggctgggaggtgaaggctgcagttgagctatgactgcaccactgcactccagcccaggtgacagaacgagaccctgttgctaaaaaaacaaaaataaaacattaaaaaatgtacgatatagtggccgggcgcggtggctcatgcctgtaatcccagcactttgggaggctgaggcgggcagatcacaaggtcaggagatcgagaccatcctggctaacatggtgaaaccccgtctctactaaaaatacaaaaaaaaaaaaaaattagccaggcgtggtggcaggcgcctatagtcccagctggaggctgaggcaggaggatggcgtgaacccgggaggcggagcttgcagtgagccgagatcgcgccactacactccaacctgggtgacagagtgagacttcgtctcaaaaaaaaaacagagtacgctatagtaatatctgctttttcctttttgcaatagctttattgggatacaattgacatactatacacttcactcatatattttttgtttatttactattttttttcaagagacagggtcttgctatattgccctggctagtctcaaactcctgggcttatgtgatcctcctgcctcagcttcccaaattgttgggataataggcctgagcaagagtccagcctctaaaaagaaagaaagtcacttctttataccatagtactgcaaattctagtcagagcaactagacaagaaaataaaataaaaggcattcagattggaaagaaagaactgaaaccgtctctattcccatatgacatgatgttttttcttttctttttttttttttttttgagacagagtcttgctctgttgcccaggctggagtgcagtggcatgctctcggctcattgtgagctccacctcctgggttcaagccattctcctgcctcagcctcctgagtagctgggattacaggcatgcaccaccatgtccagctaatttttgtatttttagtagagacggggtttcaccacgttgaccaggctggtcttgaactcctgacctcgtgatccgctcgcctcgggctcccaaagtgctgggattacagacatgagccagtgtgccccgctccatatgacacaatcttatacaaagaaattcccaaggaattaattaaaaactattagaactaataaatgcatttggaaggcttgcaggatacaagatcaatacacaaagctcaattgttggccaggcgtggtggctcacgcctgtaatcccagccctttgggaggccaaggcgggtggatcacctgaggccacgagtttgagaccagcctggccaacatggcgaaaccccgtctctactaaaaataaaaaaaaacaccagccaggtgtggtggcaagctcctgtaattccatctactcgggagcctgaggcaggataactgcttgaacctgggaggcggaggctgcagtgagcagagatatgccattattgcactccagcctgggcaacaagagcgacactctgtctgaaaacaaacaaacctcaattgtctgttatacacttgcaatggacaattcaaataagaaaacaattccattcacaatagcagcaaaaagaacaggytttttcaagactcattaagtaagttctagcagtgggagacctaaccatttcaaatagtagcatgctgtgctatctacccaaatattaccgtacctgtgaattctgttggtgacaaagtcacaggccctgcaactatgaatgtggcttcttccttatatccgcaattgaatgaattagaggaatgcagtcacatcagaggccatttgagaataaaggtcggatttttccccattcaaattcacagaccaggctcacatctgtaatcccagcaccttgggaagccaaggcaggaggatttcttgatcccaggagtttgagaccagcatgggcaacatagggaggccccatctctacaaaaaattaaaatattagctggttgtggtggcgcgggtctgtagtcccgcctactcgtcctggccgcagagtcagcgtctccggagcgcctccttctcccgccctggggctcacgtgggaatttcaccctccattggagggggctcagaccagggcttctagacctccttttggtccgtgaatttatttttgagacagagtcttgctctattgctcaggctggagtgcagcggtgcagtcacagctcactgcagcctcaatctcctgggctcacgcgatcctcctgcctcagcctcccgagtgggccttcctccgtgggaaagcgttaaaacgatagttaacggttgcgtcggtgtaaagacgaatgcaattcgagaaggattcattattattttgttttttcttctgatttttaacagaaattggcgttgaacatttcccccgtgagcgccgggccacgggggtccggggcggcggggggctccggggcggcggggggctcccgggcgggcgggggcgggtctcgggctggcaccgccctccgcgcccgctcctcgcgctcacagcggcccgcgggccgggcgtcatgggcggcctcttctggcgctccgcgctgcgggggctgcgctgcggcccgcgggccccgggcccgagcctgctagtgcgccacggctcgggtgagtggggccgcgcgccccggcggggacgcggaggggaggaaggggcgcgcgccgctcggcctttgtgcgcgcacgtgcgggctggggtccgactcccccagaggcctcggggcgcgggctgcggggtccgtccgagttggggaaggcgccggctcgcacccgcacgcccctccagtgcccgtccggctctgcggctccttctcgcctccccaggccccaggctgcaggcgcccggcgagttggcagcctgggcgggtccggggcgaccgagggcccgggagcgcaaggaaggcagaggccggctgcagcactgggcggggagggggtctcccggccggggtgggggtgggggtgtgggggggtgagggagtcggggggtgggggtgggggtgtgggggggtgagggagtcggggggtgggggtggggggagccgctccgctggggcgttcgctgaaggccaagttaggccagaatctgactgggacgtcaggccccaagtccccggccccgccgctgcccggcccccccagctgccacctcacaggacgatccatgtcccagggctccctccatcggctctgaaaagtgagccgccgcctgcaatgcccgcaccagccgcagcagagccccaggctacacaaggcgccctgcaaactgggttttgggggaacaaaccaaccagggggtcttcctcccgtgggcttcagccgcctgctggggttaacttttcctcctggcctggcggagcccctttggctctgtccagattctgtgggacatacagggtctgggctcctctggaaaccagggacccgatgccggagggtagcttggctctggagcagcctgggactrtaggaaggtgaggacgtcttctgtttccctggcagcgtcccctccagaggaggacggctggggcggagctcagcgctgaccctgggtctggaagcgacaggccttgaaactccacagcagcacaggccccgtctcctggctcggacagaaccctgctaccttccctcttcaatcttcaggcccctttttgtccgtgtttccagggctcacctggtggggaaagtgtgtttctccctggttccctgccactcattcacctcagacacagggtgggctctgggttcttcctcatgtggaaagtcggggyttcagaccatgtctgtcgtcatccagaagggatggagtcaaaagtgaggctggagttttgcaggatctccagacttccctgwggccactgagctgggctgtgcctctgtggacctcagggtggtcgctgagctgggctgtccctccctggaccttgaggtggtccctgagctggctctgcctctatggaccttgcggtggtggtccctgagctgggcagtgcctccctgaacctcggggcgatctcaggcagcctctgcctctgctgggaggagccatggcccctgggagaggctagaagccctggggacacattgccttgggtgtccctgacagggactatcatgggggtgtttgtggctgtgggcaccatccctgtcccttccagagtgccctgcatagaggcagacaccctgaagcctggtgacccctgggctctggctgggaaacccgggtcgtggggacgtgaaagggtgaggtggcagtgcctctgacctcttgccttttgaaggagggccctcctggacccgggagcggaccctggtggcggtgaagcccgatggcgtscaacggcggctcgttggggacgtgatccagcgctttgagaggcggggcttcacgctggtggggatgaagatgctgcaggtagtgggactctgggcttgtgggtgtccctgtggggatggggttgggggatccktctcggcctttcacatcccagccagcgccggggcagggcctggctttggcagttgaaggggcaggagggatctattctgcggtgggggtgctgcccatgctggtgttatctgcaaggtgcctgaggtcagggcatcacagctgctgtgctagtgcccacgtttactstctgcggctcctccttacctcaatgccacccaggcaccagagagcgtccttgccgagcactaccaggacctgcggaggaagcccttctaccctgccctcatccgctacatgagctctgggcctgtggtggccatggtacggcagggcaggggtggtggaagggcctgtgggtaaagggcgtgtgggtgtgtctttccccccagcaaagsgaggggccctggattgagcccaggggcccttggtgttccccacttctccccaaccattatctctcgctgcaggtctgggaagggtacaatgtcgtccgcgcctcragggccatgattggacacaccgactcggctgaggctgccccaggaaccataaggggtgacttcagcgtccacatcagcaggtacgggggtcctgatacaccaggctgctgctgggggcaaggagggccatcacttggggtggtggcagatccacgagacctggctgtcttgctgtgctaggatgaagccaggtcggacatgacagctcacactggtgagagccgtgttctcccagggcacacagggcaatgaggtgttccctttgtgttgtgtgyaccgtgccatcgttgcctgttacctgacaccccaaggggttgscryggggcaacttggggggaaatgaggctcccaaaagctggggcctgggcgggtccacgaggctgtaagaggccgaggccaggctggaacccggtttcccagctccactgttactccttccctgtctgcagtcacaggcttgctcccctagacagagggcaacgggagcagcagatggtccctgggaytcctcagggtgcacatgaagcctgagcctcacattgctcctgtcctggcacaggaatgtcatccacgccagcgactccgtggagggggcccagcgggagatccagctgtggttccagagcagtgagctggtgagctgggcagaygggggccagcacagcagcatccacccagcctgaggctcaagctgcccttaccaccccatcccccacgcaggaccaactacctccgtcagcaagaacccaagcccacatccaaacctgcctgtcccaaaccacttacttccctgttcacctctgccccaccccagccyagaggagtttgagccaccaacttcagtgcctttctgtaccccaagccagcacaagattggaccaatcctttttgcaccaaagtgccggacaacctttgtggtgggggggggtcttcacattatcataacctctcctctaaaggggaggcattaaaattcactgtgcccagcacatgggtggtacactaattatgacttcccccagctctgaggtagaaatgacgcctttatgcaagttgtaaggagttgaacagtaaagaggaagttttgcacacccagttccataacgttgttggatgtatgagccaggcaggggtccagagaccaccagcctgcaatccggagaacccaagctaggcgcgagccggtgctgtgatcccgccaaaggagaagctgccttcccggggaaggggcagagaggggccggcgggctgaggccaaccagcgcagaaagggcctggcagccattactgtagcgctggcggctctgtcacgcccctgaagccgctggcccgcgggtgtgttcagctcaggagcggccctgcgtgtttttcccccgtggccgtcgcggacccccgtcttccaacagtggtgcgggcggggcgccccgtcctgggttcgcggcatagccccgcccgggcccccacgcggaacagaagtaacggacccttttttttttttttttttttttgaaacggagtgtcgctctgtcgcccaggatagagtgcagtggcgcgatctcggctcactgcaacctccgcctcccgggttcaagcgattctcctgcctcagcctcccgagtagatggaactacaggcacccgccacaacgcccggctaatttttgtatttttagtaaagagggggtttcgccatgttgtccaggatggtctcgaactcctgacctcgtgatccgcccgcctcggcctcccaaagtgttgggattacaggcgtgagccaccgcgcccggccccggacccttctttattggcctcaaaacgggtcattttgggaagcggcgcggggctggccgcgcttccctgggccccggccctccccatggtgtttacggggaggcgaacggggagcccagaggctgcgagcctggcctggacccaggagccaggggtatcccacaagtcctggaggctctgaacgcggcgctgacgccgaatacctgtgaaaaagactcggggaggagacccgcagaccgccgagcttctgccgcgggaaccgcgcccccggccccgcaatgcgcctgcgcctcgcgcgccgacttccagtcccagcaggccgcgggcgggggcggggcctccggggagaattcgggggaggggcggggcctccgggaagcaatcagggcaggggcggggcgtccggggagtggggcggggctcccggttccaggcgagttcgcagctgcgcgccgggtcctggaggccgaggccgctcccgcccgttgtccccgcagtccccgacgggagcgccatggcccagccgccgcccgacgtggagggggacgactgtctccccgcgtaccgccacctcttctgcccggacctgctgcggtgagcggggcctgggaagcgagcgcagccttggtgcggggtccggtccgcgggcgccggcgcccccacgtggtccccgagggctcgcgtgttaggaaacctgtcttgcctggctcctttctttcttttttctttctttttttttttttgagacggaatctcgctgtgtcgcccaggctggagtgcagtggcacgatctccgctcactgcaaactctgcctcccgggttcaagcgattctcctgcctcagcccggctaatttttatttttagtagagagggggtgtcaccgtgttggtcaggctcttttcgaactcctgacctcaggtgatccacccgcctcggcttcccaaagtgctgggatttacaggcgtgagccaccgcgcccggcccaacctggcctctttcttaacagaaaattttaggttgaaatcatttttccggaagacccagaaggcccaggaatgccaggttttgcccagcagctcttcattttcctgcaaacgccttggtgttcacaagagaaggcagcccgggcaaaggtcgatcctccccggtcacctgccctcactcggctaatgggcggatccttttttttttttccttttctttttttcaattggcaacattttcaagtttctattaaaattttgatcttttgccaggagcagtggctcacgcctgtaatcccagctctttgggaggccgaagcgggtagatcaccagaggtcaggagttcgagaccagcctggccaacatggtgaaaccccgtctctgctaaaaatacaaaaaattagccgggtgtggtggcgcacacctgtaatcccaactacttgggaggctgaggcaggagaatcacttgaactcgggaggtggaggttgcagtgagccgagatcgcaccattgcactgggcaacaagagtgaaactccatctcaaaaaaagaaaacaagttttaaattatgttctccaaggacaggtattgacaattctctctgagtgttctgcaggaaaaaaaaaaagttttttttcgaaacggagtctcattctgggttgaagcaattctcctgcctcagcctcccaattctcctgcttcagcctcagtgcgcccaagtgggactataggcacacaataccacgctgggctaattgtatttctagtagaggtgagttttcaccatgttggtcaggctggtctggaactcctggcctcagatgatccacctgcctcggcctcccaaagtgctgggatgacaggagtgagacgctgcacctggcccaaaattaatctttaataattaagaataggaaaggcaacttggagatcagcaaaagtttgccatccatctggtacagtttgtgccagtcataccgatcagtacacatttaatgcgtacaagaaaatctctaataaataaaaaagccatattatcccgacgtagcttgctgaatctcaggtatcatatttgatattagtgccatgcagggcttaggagagaggaaattataacctctatcttgtttaagccagggtatttttctctcttgtatctacttctgtccatttctgtcaaaagacacagaaataccctttcccccactgcactttgcaagtttgtgtcagcacaagttcaggaccagcctgagcaacaaaacgatacccctctctagaaaaactagatgaaaaattagctgggcactctggcatgcacctgtagtcccagctactggggaggctgaagcaggaggatccttctagcccaagaggtcaaggcggcagtgagccgtgatggtgccactgcactccaacctggatgacgtagcaagaacctgtctcaaaataaataaataggcccggtgtggtggctcatgcctgtaatcccagcactttgggaggccgaggtgggtggatcacaaggtcaggagatcgagaccatcctggctaacacggtgaaacctcatctctactaaaaatacaaaaaattagctgggcgtggtggcaggtgcctgtagtcccagctactctggaggctgaggcaggagaatggtgtgaacctgggaggaggagtttgcagtgagcctagatcatgccactgcactccagcctgggcgacagagcgagactccatctcaaaaaaaataaaaaataaataaataaattaaataaaatactataattttatgaattttcattttatttatttatttattttttaagaccatgtttcgctcttgttgcccaggctggagtgcaatggcgcaattttggctcaccacaacctccgcctcctgggttcaagtgattctcctgcctcagcctcccaagtagctgggattacaggcatgcaccaccacacccggctaattttttatatttttagtagagacggggtttctccatgttggtcaggctggtctcgaactcccgacctcaggtgatccgcccgccttggcctcctaaagtgctgtgattagaggtgtgagccaaggcacctggccgaattttcattttaaatcattgccgtatagcaatatgggaggtgtattttaacagggctcttttattttttatttatttttattttattttatttatacatattttttgagacggagtcttgctcttttgcccaggctggagtgcagtggtgcgatctcggctcactgcaacatctgcctcccgggttcaagctattctcctgcctcagcctcccaagtagctaggactacaggcacccaccaccacgcccagctgatttttgtatttttagtagagacgaggttttaccatattgtccaagctggtctcgatctcctgaccttgtggcccacccaccttggccttccaaagtgctgggagccaccggcccggcccaatagggctcttttaaaagagcctccttttttattctcagggacaaagtggccttcatcacaggaggcggctctgggattgggttccggattgctgagattttcatgcggtgagactgctctgtgtcccttccctgctcctcgcttctccctgcccgggccctgctggatgcccgacccctggaaagatgttggtgggaggtagatgtcccctgctcacctacccgacaggatccaggtgcctgccagagggactggggagcggtcgaggattgccctggggggagtcaggacttcaaggcccctacaggtcagtggagattgtgtggctctggtctggggcctgctgggacctcgagagtcagggctgtgtcgggccccagtgctggcgccctgcagagcacattttctcctgggacacaattctgtggcttcaggccagggtcagcaacttatcccacctgacagtggctagagttaggctggggtgggggaaagggacccttcctcagttcccctgaggcccctgcttttcagaccaaaaaggtgagtcccacaggaagagatatggcctttccactggtggctttgtgctcagggcatctgaggaccagatgggacattgcagctccagtgggacctgcctagcaggggtagctacctttatggttattgtgggcaagcaacccccgaaccagaagagccgagaaaccaaagaacaaggcagacagatcccgtttgtctgtgtcaggtgattttaccagggaatttgtgggcagaagcgtagtcttgggtggctgtgagacgggcgtctccatgctgttacccccaggcccagggcttctataccacagggaaaggggtcctgcttcagagggagtgtgtaggaatttgtttaggataacatcaaggtggttttgacctaaaggcaggacttctttgtgctctttcgcaagaacagtagataagctggaaatcctagcggcattcctggaaccagggttcatagaggccaacgtggtggattcgcatccacgtggtcaggaaggggagcagggagcaccccgcttcagaacagtcctccacgccagccccacagggagaagggggtggagaatgtgggcccagcaggccccaggcagatgtgtgggctgggcgtctgtggctcacagctgtctctgtacctggtgtttggggcaggacccgcaggcctgtgcggtgggatgtcccatgccagaaaccccggggtgggcaccacctgaggtccctccagagtacctcagtcctgttcacgcccctgtgccctctgccagctgggccttcagccctggactggtacttccgcctgagagactcctgctcaggagctgggcagatgcccccgggagtgcccctcgcccacactgccctcacacctgcttctggttttgcaggcacggctgccatacggtgattgccagtaggagcctgccgcgagtgctgacggtgagagggcctctcccatggtcccctgttcgggtggctgtgggggggctggggctgggcctgggccaggagagtccagaggctatggggatgttggcaccaaaactttttttttctgagacgggagtctcgctctgtcacccaggctgaagtgtggtggtgcgatctcggctcactgcagcctccacctcccaggatcaagcgattctcctgcctcagcctccggagtagctgggactacaggtgcccgccaccacgcctggctaatttttgcatttttttggtagagatgggttttcaccacgttgaccaggctggtctcgaattcctgacctcaggtgatccgcccacct

SEQ ID NO: 94359 - DNA, 40426 bp, Homo sapiens
tctatttcctccttctctgtaattattatgatttggattgcttttgtagtaaaaatcagtaaaagataaaagctaatgtaaatgttaataattatagatgctcttacaatatgttaactgtttaattggcaggcaggtgtaatgcttacctattggtggaaaccctatggggcctgaactgaccttgtagtactttggacctgagatgactctgggaccaaattatatctgttgcttgtcttttaggaaagctatttttgatacaccagatgaggatccaaattacaatccactacctgaggaacggccaggaggcttcgcctggggtgagggccagcggcttggaggttaaagcagcagtgccaataatgagacccagctgggaaggactcggtgatacccactgggatcttttatcctttgttgcaaaagtgtggacacttttgacagcttggcagattttaactycagaagcactttatgaaatggtacactgactaatccagaagacatttccaacagtttgccagtggttcctcactacactggtactgaaagtgtaatttcttagagccaraaaactggagaaacaaatatcctgccacctctaacaagtacatgagtacttgatttttatggtataaggcagagccttttcttcctcttcttgatagatgaggccayggtgtaaatggaagtttcagagaggacaaaataaaacggaattccatttttctctcactgtattaaagcttttgtgtgtgatcttttaaattctgataatgtattgtagccctcctgcgtagatctgagctcagaacagtttacacagctgttcttcctgtgtcttcacaacttttaactggatttcatttcaggattggaaatacgtggctgtcatgctgtggttgtgtacatcttactaactcagaatgcaagattcagcaggaagatgatttatttctgtcatctggataggttgttttgcatctgggttttgccaaactttgtcagacaacatgaaaaaaaaggagggaggatggttcttgtagcagtaggaattcagctataggaaagtcagctgtaagctaatgtggcatcttatttgctttacttacatttctccattaagaagtatccagggaaagattggtaagggccacatttttgtaaaactaggaagattttcattagactttttttttcttttatttttaaaaaagttttaattaaaaatttttttttaaatacagatggggtctcactgtgttgcccaggctggtcttgaactcctggactcaagcaatcctcccacctcagcctcccaaagtgctaggatgacaggcatgagccaccatgcccagccattttttttttttttgccttttttgttttgttttgttttttgtttttttaattaaaaaaaaaaaatagagacagggtctcagattttcattagatttggaaaccaagttagaatgttgactttggagccagacgaacagataccagttagctaggcatatgttcttccagggtctttggctagttaacattagtcatttgcttcgtgaaaattcaagaaccttttcagagccaagtacctggattaccttcccaatcaggtagaaattagacagggtccacagaagtagacacttaatgctgtggttcaataaatacttcccctaaatattaagtcttccctgagtctcagcaggtttgcattcacactgcttaagtaacttccagaacctggaagagtcgaaagagcacccctaggaaagagatgattccaaacagctttcattaacggcatgtaggcacaggtccctttcccaaaagtggattgttagtagtagttcattcaacctttgttaaggggtagctttccagaatgtgacattgtcctcagaaagatagacataggcttaaacataatggacatcctaaataggaattttcagattgtttttgaagtgaaaagtgttttaatgtctttaaatggaattgcataactaatggtatttaagtattttacatgttgctaataactttgaatatgattgttgcaattttatggaacctgggtctatgggactgctttttaagcagtttaaaaaaggttttcaaagtttaaaagccaatcttagcatgtataatccttatgggattcttaagttttatcctatcttgtttttgctcaagaacgctttatcagtgacgtttgttagaattttgttttttgttttttttttttaaattgtttttgggctagaaatgagtttctctagttttatttgttctccctgagttggagttatgcaatgaatggcatttttgtggtaaaatactaatcctaaaatctgttaactcactgttcatttaagtagggaatatctgtatacattaatgactaggtaaaacaggaaatacattttgaatatacagcctaaaggcaggcagttacagggtttttgatttctccgattttatagggtgcaagttcccagtggcaggatgccctgctgtgtgactgactacactgtgtcctgagcagtggtaatttcaatcacctctcatcagtttggccagccctacaaccaccattcctagccctgtgttgcttgacaggatacctgtgcttgaatggacataaggaaaagtccttactttctccccaatttacctctcaatcttagttcttccagaacacacttccctttcacaatgcaaataaactgaaagtgagatttgatacatggaattttgagaccaaccaactaaccttacacataatttgagggattcctggattcttctagtgatactgaaaagcacacttgactaaagcatagtgttttttgtttgttatggaaatacggtatacgttcatttaaaartaaatggacatacaaattgcatctccttaggagatacattttatatacatttcggtgcgtttttttccagtatggatttctatttgtttctctcttcctcttgttttttctgtgtcactcttgtatgtcctcatatctttcatacctcttgtgtagtctctagaagcagaacacctaagtcctgggtctggataatgaaaccctcagtctctggggcctctgaaaataaggaagcattggagctattgccatgttgagtaatgggcttcctagaactattgtcatctatcctgccagtgttttatgttgtagctgtttttctttgacaggtgagttccagctatgttgttagtcatgatcctgccattattttctgtgttctgtaggatgtctccaggctacttaaacatattttatgagtttgcaataaaattgttgaatcttgtatgatcaagtcactcctctgctcagaaatccacagtgacttcttagtaagcccctacattatatgcatacttgtttttttcttaactttactcccacttctacctaacagggacctcaacttaagtctcttcagttcttcaaggcctggccttgttcctgattcctcaaaaaatcttgactctaaggcctattttattgtctgtctctgaatccctataaagcttcaagtctgtatgacattcttaacgccarattatatattgtcttgtactgttcctagctggtacatgtatattagtcttgtctccctcatgagaatgtaagctccttaagggcagggaccatgtcttaatttttgtatccaccacagtgcctagcacagtgcttggcacatgggtgctgaataaatacctttgtttattgatcagcaaagtattatctggtatttttaattatagagggattaaagtgtatgcatgcaagcttgagcctagttgctgaagcttgtggttgtctctgaaagtgggatagagggaaactgaacatgatcaagggcagtaatttggtggtcggaaaagcaaaggtgaccaccagctgttatggtcgtgatcagaccagttaagtccacagaccatcccagacaagttaaaaatgaaatgtgtctgacacttcgtcgtttgaaggaagaaccaggatattctctgaatagttattagcttgtcagtatctacatatgaaagctggtgaaccccaagagacttcttcaggagaaacagcagatttcagtctaccaatgggagaaatgtgagcagcatggcttgatgcatatataggacttaatttttccactctttggtcctcttagctttgaggctatagaatagctggatcattaggccagagattatggatgagttacctacagatttgttacctacctatgtgctttgttttgacagtactttttttttttttaagtttaaacctgtatttaacattgacagataaaaatcttcacttttggcttttcttgagaaaattggaagatctggcaataataggtctacatgacagccattgcctagaaatgattaggggctgcatgtagaggtggaatgtgctccatcaagaaataagtccacccatttacattacctaaattattgtaatcatttggaacatcggactcctaccttaagttactctggaaagcacactgggaaaaaggactgggatgtctttactcaaagtccataatttgagagttaacatttattatcccttgtagttttgggttgcctttctaaatatttcagggtaggaagtgaaaatttgtcagtttattcttaaacacaaatctgctgctggttcaacgtgcacattttcagtaatgcctggtcaccaaactgtcagcaactagaggaaaattatctccgacctggagcaaaggggaggttttttgtttttagactagctctctcacgaatcacgggaagggagatatttaacagggcgagtttcatggaaacgagcttcagaagatacccttcacatgagctgaagcttacggtgtatwctctggaaatcacatttcctgtaagagcaaacagctacttggcattctccgtggtaaattagcaaatcatctaagaacttttaggagggtaaggaagaactagttataatcctacttttttctgctgcagttctgaatcttcactgaagtgtctgtgatggggttgcacagccatgtagagaacttgagagtctggctggaatggttgggggaaaggaaagataaaagacaattttaatttcattgaactccctcctttctctgcttgtattactggaggcgaccacatccgttggaggagtcattttctgagttaaattcatgtatatcagaattggttttcctttctgtaacacaagatgatcacaaaattatgatttggggacatctgaatgactaagatgactcaatttcttaatctgtaaattagagataatctaataaccagtatataccacataacttataagttgtttagaggattagacaatgcacgtttgcgcttctcattgattttacagaattaagtactttccttgaagagtgactgttatttggacagagaaggggaaaacgcgggtttactgaaaagaagtaatgctactagaacaaaacaatgggcggggcgcggtggctcacgcctataatcccagcactttgggaggccgaggcaggcggatcacctgaggtcgggagttcaagaccagcctgaccaacatggagaaaccctgtctctactaaaaatacaaaattagacgggccccggtggcgcacgcctgtaaccccagctacttgggaggctgaggcaggagaatcgcttgaacccaggaggcggaggttgcagtgtgagccgagatcgcgccattgcactccagcctgggcaacaagagcgaaactccatctcaaaaaaaaaaaataaaacaatgagaaaaacctcgttaaccaagactacagtcccacggaaccttacatcctgtgtttcccggttgtagctccgggccttttcctggttgtacctcaggccctgcttttcccacccccaggaagtgaaagccttcccaagcccccaaggcatgctgggagatgcagtccctttttctaaagactggggcggccgtgaggtcatcggtggtcgccgggagccgccagcacgtggcggcgaggaaggggyggtgtgctcctgttgtctgcacctgagagggggcaggagctctcggcgcttgcgcctcccgccgcggtgccctcccgacatgccggaggaggcggscttcccgccggccaagagattccggccaggctctggacctccgagccgcgctgggtccttccctcccgggaggcaagtggtgatgctgctgactgcgggcagcggcggcagaggaggaggaggaggccggaggcagcagccgcccctggcccagccctcggccagtccctaccctgaagctgtggagctgcagcgccggagtctgcccatcttccaagcgcgggggcaactgttggcccagctccgaaacctggacaacgcggtcctcatcggtgagtgsccgcgccggcgggctcttccttgcacttcgtccgtggcttagctagagcagtttttcttacatgcctctcaatccctttcgttcgtggcttcaacaaacctgaataccttttctgggccagacctggagaggggcctcgaagaagagtccggcagccctgccctggaggcgctggacagcccggtgagagtgaccaacgtgtgtaggcaaagactcaccttccgcgtaaaagggtagagaaacgtaccgggggcttgcggatcttagaagagtggatctgacccggtttgtgaggaggcggctggggaggtcgtgtgggagggagggcattctaggcaggggggaaagcccgtttgagagatgggaacctgaacacattccggtcgaaagggaaggtgtagtttctggtgcatgaaaagaggcagagttgtggggcagggactgatttcatggggcttatgatccccaacgtgttagaggagatactgaaggacggaaaggatgagcagccaaagagaggaaggagacccatgagtgctgctagtcaaaggaatagagagtgagcagatgcagcagtcaagtccggttatactggacttggatgtgatgcccactggatttggatgtgagctatttgtaagagttaaagaaaaaggaaagaaacacgaaacgcggctggcagttaaagacagcttttctttagttaaaacctgagaggcgctcctggccgatttcggtcaggagccctttctcttacagactaagagtatatattggtgttagggtgagggggcttatcacaagcttggaatgtttatatgtgtggagaagtttttggcagggttggactctttgggagcaggggatgttatcttggggcagacatttttccggcccgagggggtttatctcccggctggcatattcccggctggcatattcccggccagagtggggttatcccttaacatgtctctggtcggggaggagtttggaatgtttctggctggagatgttatttgtggtttatggtcgtgctgaccttagccattaggctgataccttttggatttaggcggttttttattaaggtgaacttttgaatgaggggcttgtccaagatggtgatgttcctgctttgtcaatccagaccctatagttataaaaaggaggagggacggcatgttctttctggmtacttcctgcaacgaggggatggagagtttcctggtctcgggttgactaggagcaatgccgtctgtagatgtttttgggtagttgtttgtgaaattgccatgatcctgtcagttaaaaatctttgaaaaagattaattaggcagggtaagaacattagttccaggcatattattaggagagggcccaggaatgggatgacccatgctatgattttgttttcaaaccaagagtccatttggtggttttggtactcccttagctttttagccttttctttacgttttttagcagcgctttttactaggcccgattggttgatatagaaagaggcgtgagccaccgcacctggccccctcaaaacaattatttaaccttttaacgtaggtaaaaatgtgcattcttatccctcctgataatctttttaccgaaagtgtactttactttccttacacaccttgcacataaagtgtctcttcaatagttttaaatacatgttacactgttaacttttagcaacctttacctttgttgaaaaccttggtaagttcgggattttaattatgtgctaggtgtacagcctaggacttagacagaagtgcagttaaggtctggcttatttcagcatttagctccatgtgtcctaggttttacctagctgcaaagcaggcaagttctacagctaagagttatggtgacattttataaagcattcaggaggcctaatcacttttaaattgtaaaacatttcttgcatacatttcctctcataaaatttttcatgactttcacagactatctctgacactattgatcgtggatmcatcccatcgagagctatttcaacaaagctgtgtgggtaacagctgatttgtcattgagctgagggctgaaagcagggggaagaggcttctgttttgaggaaaaaggagggaagctgagagaaactttatggatgctgctcgatttaggatggggttatgtgtggatgaatccacccatcctcataagttgaaaatatcctaagttggaaatgcatttaatatgcccagcctactttcagtgtgctcggaacatgtacattagcctatggttgggtgatattatctaacatgaaacctattttataataaagtcttgaatatttcatgcaatttattgaataccatactgaaagtgacagttgtgtgggtactcaaaagtacagtttctactgtacgattttgacttttgctccatcctgaagtcaaacagttctaagacagggaccatctgtattcagaggttgaggggaagaactcagtagggagggaggcagaagatagaatcgagctaacagagcaaagatcaggaggcatgggggaygggggaacttggccacaagggctagatgcagggctggtctggaagaggaggaaggctaagaggctgcagggctagagaacggatgtaaggatggtgcactgcagaagggcttctaggggcagttagggagagaccacattttagaaccccacttctgtgagacaggttcaggagccctgctcagaatgggagtcactgggcttcaagtgggcccttggggaggatggagacgagacaggctgcaaaaacaagaaaaaagatcgatggcagtagtggtgcctaggtgcatttcggctacactataaactcaggtttgcttctgcacagccagattataggtggaacatcccaaatttgaaaatccgaagtcaagaatgggctccaaggagcatttcctttgagtgtcatatcagatgctcaaaaagttttggatttgggagcatttaggacttcagattttcacatttaaaatgctcagccagtaagtataatgcaaatattacaaaacttgaaagaatccaaagttcaaaacacttctggttccaagcattttgtattttactttagcaacgctctgttkccctggtataggagcatgaaagatagagacatggatcaaagtttggggttttgcctagtggattcagcaggaagattgcagaataatcaaatcctttgtctgattcttatctgggtcaggaaggatgagcagtcagagggggctgacagactgacagggaaaaaaacccacaaatcatgggactggaggactttttgaagtcagagaggcctggtggtagctagagggaggggaaggaagcgcaggtttactgagttctttgctctaatcaggcactgttaaaggaattcacacagggtaggaagtaacatttactgcgtgcttattgtatgcaaaatactcaagtacacgagagggacattcagagcactgccctctgggagcttcccttctggtgttggaggaggacggacacatttaaacgcttctgtacaacacaggatggtcagtgctggaagagagatgaacaaggcrctacggagcccagaggagggccactgtgcagccaggggagcgtgtttgaggcctaactcatcttagagtttgcgaggcaggcagtgtgagggcaggtgttctgcccatagtgtgggcagaggcagagggtttgaagggaggcagcaggctggggagtggccaggagttgaaggcagcagtgcatgaatggatgtctcttcatgtcagtcagtatgcagaaatctatgtaacggttgtattttattttatattttaactatgtaaattaccttttgaacatttatattgtttccaatttttttctgtcaggagcaaaattgaataaaatctctttgaagctgtatctttatacacatgtttacttattttgttagaatcaatttctgcaagtagaattgtgggtcaagggatataaacattttaaagatttaaaaaacataatttgaccacctgagaaacaataccaattaaccagctaatttcaccagcagtatacatacctgaatgcccattctcctgaggctttaccaacacagggtattttatcttttacttctgactttgagctgtttgtttggtgaaatttatgtcaatttgctttttgttgttgttgtttttctaagacagggtgtcattccgttgcccatgctggagtgtagtggtgtgatcatggctcactgcagcctcaacctctcaggctcaagcaatatgcccacctcagccttcagagtagctgggaccacaggcgtgcaccaccacgtccaactaatgtttgtattttttgtagagacggcatctccctatgttgcccaggagcaactcctgggctcaagtgatcctcctcccttggcctccccacgtgctaggattacaggcatgagccactgtgcccagccgatttgcatttctttttttatttttattattttttttgagacagtgtctcacactatctcccaggctggcatgcagtggcacaatcatggcttactgtaaccttgaactcctgggcctcatgatccttctgtctcagcctccctagtagctgggactacaggcacatgcaaccacaccaggctaattgttgttgttgttgagacggggtcttgctatgttgcccaggctgattttgaactcctgggctcaagagagcctcctacctcggcctcccaaagtgctgagattataggtgccagccctggtgccgagccccagtttgcatttcagtgagccttttttttttttccccctctctcctaggggaaactggctctgggaagacaactcagatccctcagtacctgtatgaaggagggatcagccgccagggcatcattgctgtgacccagcctcgtcgagtagctgccatctctcttgctactagagtctcagatgagaagagaactgaacttgggaagctggtacctggttccttcttgactattagtacttcttgactcaacagctctctccccatgcccactgccttttatttttctaaacaagactccttttacatagtgagctgctttcttgcctattcttccgagagttctttaccagctcctgagagatcaggggctctattggtcccatgtgctttgctttcaaaatctgtcstcaggttggataaattagttgctttccttgaacatcttaagccttcagtaacctctcttaactctcttatctatatatcattctagaaaaattgtaagcattatgccagtgtatatgtgagtattgagaatgagtctcagaactgtatataagacagatttatttgtgtgtgtgtgtactcatttcacttaaaaataccttagacgtcttttcatatctgtacatagcttcacatgaaacttttttttttttggagatagtctcgctcggtcgcccaggctgaggtgcagtggcgcaatcttggctcactgcaacttccgcctccaaccaagcaattctcctgcctcagcctcccgagtagctgggattacagacacgtgccaccacacccagtggctaatttttgtattttttagtagagacgggatttcagcatgttggtcaggctggtctcaaactcctgacctcgtgatctgcctgccccaacctcccaaagtgctgggattacaggtgtgagccaccacacccggcccacatgaaactattaaatagcttgaggtagaaggttaattttaaatattccttgtaatagttacattaattgcggttaaagtaaacttgaccattgtctctctcagcagctagactgcatgcttcccaagggagtgggaagcgttggtgttggtcttgttcactgtggtagtgcaagtgcccaacttagtgccggacacagtgggcgctcaagaaatgtttggtgactgaataaattgtttccctgcacaggttggctatacagtgcgctttgatgatgtcacctcagaagacaccaggatcaagtttctgacagatggcatgcttctgcgtgaagcaatttcagactctttgcttcggaaatacagctgtgtcattttggatgaagctcacgaacggactatccacacagatgtgctctttggagtggtgaaagctgcacagaagaggagaaaggaactcgggaaacttcctctgaaagtatgagggaaacttcccctgaaagtatgagggaaacttcccctgaaagtatgcgtaacacacagaaggaaacaggcctggctgggcgcggtggctcacgcctgtaatcccagcactttgggaggccaaggccggtggatcacctgaggtcaggagttcgagaccagcctggccaacgtggtgaaaccccgtctctactaaaaatataaaaattagctgggtgtggtggcacacatctgtaatcccagctacttgggtggctgaggcatgagaatcgcctgaacccaggaggcggaggttgcggtgagctgagatcacaccactgcactccagcctgggtgacagagcgagactctgtctcaaaaaaaaaaaaaaaaaaaaagtgaaagttcattaaatagcataactttatagacaacttgtatttcagggagttggcagaaatatgatctgaaagtatccagataattggcccggcacggtggctcacgcctgtaatcccagcactttgggaggccgaggccggtggatcacctgaggtcaggagatcgagaccagcctggccaacgtggtgaaaccccgtctctactaaaaatacaaaaaatgatccaggcatggtggcacatgcctgtcgttccagctactagggaggctgaggcaggagagtcacttgaacaagactgaaattccgtcttgatttttttttttttttgcactctgttacccaggctgcagcgtggtgacgcgatctcagctcactgcaagctccgcctcccaggttcacgccattgcttacctcagcctcccaagtagctgggactacaggcgcccaccaccgcacctggctaattttttgtatttttagtagagacggggtttcaccgtgttagccaggatggcctcgatctcctgacctcgtgatccgcctgcctcggcctcccaaagtgctggggctgggattacagacgtgagccaccgtgcccggtgaaactccatctcaaaaaaaaaaaaagaaggaaaggaaaggaaacagacctgtgtgctctagcagggtgttttcctctgcctgttctgctcagagccttggaagaaagtaaactgtgatgggggtggcacaggcctcaatcatctgcttttggggctcgagagggacacggaaaggccttcccactatttgtttctggtcctcctcttcgttctcttatgcaggtgattgtgatgtcagctacgatggatgtggacctgttctctcagtatttcaatggcgccccsgtcctctacctagagggtcggcagcatccgatccaggtgttttacaccaaacagcctcagaatgattacctgcacgccgcrcttgtctccgtcttccagatccaccaggtatggtgctgggggcaaattcctgaaaagttctcttttatcttgcagttggtagtgagaacattgagccttgaaaagaaaagctactgaataaaacaactttgtgagttgtgtcatcaagatgaataaggaggccaggtgcggtggctcacgcctgtaatccctgcactttgggaggccgaggcaggtgkatcacctgaggtcaggagttcaagaccagcctggccaacatggtgaaaccccatctctactaaaaatacaaaaattagccaggcatgatggcgggtgcctgtaatcccagctactcgggatgctgaggtgggagaatcgcctgaatccgggaggtggaagttgcaatgaggcgagattgcaccactgcactccagcctaggtgacagagggagactccgtctgaaaaaaaaaacaaaaaaaaaacaatgaataaggagttcatttgctgtgtctggatttttatcctttatttatgatatctctaattttcattgaaaagaaaaataattcagttctgaccagcagctttcttacactgagccagaaaattttcatgttaaagcagtagcttaccaactttccttgattataaccrccattaagaagtacttttggctgggcacrgtggctcacgcctgtaatcccagcactttgggaggccgaggcgggtggatcatgaagtcaggagatcgagaccctcctgactaacatggtgaaacctcgtctgtactaaaaatacaaaaaattagccgggtgtggtagcgggcgcctgtagtcccagctactcgggagactgaggcaagagaatggcgcgaacccaggtggcagagcttgcagtgagccgagatcgcgccactgcactccagcctgggtgacagggcgagggtctgtctcaaaaaaaaaaaaaaaaaggtactttttcttttgcaaccccgtacgctatacatataactgaaataggtctatgaaacactgcttctggccaggcatggtggctcacacctgtaatcccaacgctttgggaggctaaggcaggaggatcacttgagtccaggagttcaagaccagtctgacaacatagcaaaaccctgtctctataaaaaaaattataaaaattattttttaaagaagaagtactgtgtcttttactacatgtagggtactctgatattttgtgcctcatttaaagaaaatgttggctgggcacagtagctcacacctgtaatcctagcactttgggaagcagaggtgggtaggattgcttgagctcaggagtttgagaccagcccgggcaacatagcaagacttgtctctactaaaaatcaaacaatcagccaggtgtggtggtgcatgcctatagtcccagctacttgggatgctgaggtaggaggatcacttaagcctggaagattaaggctgcagtgaactatgatcaccgcactccagcccgggaaacagagcaagatcctatctcaaaaaaagaaaaagttgacattagcccaataatgggttgcaacttagagtttctttttttttaaactatattaggagaatatttaaaaatattttctcattttattaaacatttacttcaaaaatttgaatcattaagtcacttttgtttaatttgtataaaatttaatgtttttaccttcctattagctttctgagaaaatccagaggcaaacttttaaaataactttttatttaattaatttacttatttagagacggggtctcattctgtcacccaggctggagtgcagtggcataatcacagctactacagcctcgatctcctgggctcaagccgtcctcctacctttgcctcctgagtagctggaactacaggcacacaccagtacacctggctaatttttttttatgttttgtagagacagggtcttgctacgttgcccggactggtctcaaactcctgacctcaagtgattttcccgactcagcctcccaaagcactgggattgcagatgtgagaaaccgtgcccagtcaatttttattttaaaataagtgatgcatatgggatttaaagttttaaaaagtcaagtagtttatagtaaaaggtttataataaaagaatagcagttgtttttacttcaacatcccagatttctgctgtttagggcacctactttcaatctctacatattgctttcatgtttctaaactaccttgctttgaccactattttttgagttatgggtatcaggcatcatatgctaatttcttaccatggtgacaaaagtttagaatgcccctccccaaccccctttatctccaacctcttgacagttctatcatgtttttgtttaggtttttgtttttgaggcaggatcttgctgtgttgcccaggctggtcgtgaactcccgggctcaatcagtcctcccacctcagcattgggagtagctaggactacatgcttgcacacctgtgtctggcctattatgatgttttctgagtccagtatcaatactaagaatattatgaccacacattgctagtagcacaccatcatccctgtaccttgtttcttgaacaacacagttgtgcaagctttctgggtagctctggctcattttctcccaaatattccaacatctcatatgccagtcgtgtatagttctgtgttcaagcacagtctgtcttttcagagtcctttatgctgctgttccagttggggcaggtggctctcctgggcctttgtgcagctgtcatcttgactcttcactttgtcaccattttcccgtggtgagacccatggcttcccagtctcctggccgtcctgggtaggagagggaactgaaggctttaactactctatactcagactttgaaccaatccctgagttttcactctcccacaacataatttgtagtttcctccctctagccaagtcatccagcccctttcccctctcttccaaaatgagttgagactcctcatctctcattgccttttctttctaagacagtggcctttactgtcgttttcatagtgtttggggaagaagtctgccttgttcagctgcagaaagcaaacgagaatttttcatgaatgatggctgctggtgcattaggttaccactggctttgatgaattctcccactcatgaggttttgactgttttagattttatcctgtctgtgtatmcctctgcacatttgttctgttaatactgggctgaaaaaaaatacatattaaaaaatacgtatttttacatatatacataaatatacatataattattaaaatttttttctatttattttgccattaggcactttttttttttttttttgagatggagtctcactgtgtcgcccaggctggagtgcagtgacacgagctcggctcactgcaacctstacctcccaggtccaagtgattcttgtgcctcagcctcctgagtatctgggatcacacctagctaacttttgtatttttaatagagatgggatttcactgtgttggacaggctggtctcaaactgctgacctcaacccatttgcctgcctcagcctcccaaagtgctggggttacaggcatgagccactgcgcccagtccatcaagcacttcattttatttatttattttttgagatggagtcttgctctgtcgcccaggttggagtgcagtgatgcaatctcggctcactgcaacctccgcctcccatgttcaagtgattctcctgcctcagcctcctgagtagctgggattacaggcgtgcgccaccacgcctggctaattttttgtatttttagtagagacagggtttcaccatgttggtcaagctggtctcgaactcctgacctcaggtgatctggccgcctcggcctcccaaagtgttaagcactttacatcaaacaaattaatgtatctgatcagaaatcaaagaaaaatcagggcattaggtatgtcattcacacttgggtgttgttccatttgaaagtgaggaaccccattaacctcagtatctcaagcagttgtccgagtatagtgtgtgttttggggcgtgtgaaagcgctttcgacggcgtcattcattaaaggctccttctccagcatggctgcgcctgttcatttccatagattaggatttccccaagtttccttctgttttgtcaacttcatttttcaagatgcttataaaagaaaggaagcttcatgcagattttatttgcttgcctgattatgcttttcatggtattgttcttgttagaaaaatcaatctgatgatttcccttcaaaatttcatcacttggcctataaacatagctggctaactcctatatattacagttttgttttttgtgtttttgagtcaggttctcgttctgtcgcccaggctggagtggagtggcaagcagctggaactataggcatgtgtcaccacccctgaccaatttaaaaaaaagtgttttgtagagatgggatcttgctgcgttgcccaggctggtcacaaactcctggctgcaaacgatcctcccgcctcagcctcccaaagtgctgggtttacaggcgtgagccatcacacccagcctgttaccatttacacactgctggtaagggttctctccaagctagacatcaacttttaggctcatttacatttctatagttaagagaaataactctgggaaacatcatcaatcaccattgtctttttctgtgcaagctgcaattctatcaatgcctagtaaacccactctactttttttacaggaagccccttcttcacaggacatcctggtgttcctcactgggcaggaggagatcgaagccatgagcaagacgtgccgagacattgcaaagcacctcccagacggctgccctgcgatgctggtccttcctctgtacgcctccctgccctatgcacagcagctccgagtcttccaaggggccccaaaggtgagtgcaccacctcttctgtccagccctattctgggcacccagacggatccaccagcgaggtctgtacctgttaccaggctccagataaggtgtatgggatgggatacccaggtgccagatcagcgcactgaggaggtgcaggaataaaatgcgcggtgacacacgcagcgctcctgtgacaggagcagggagacagttgttgggatgagggagagtataaaccaaagctgcaaggtaaacgagtgacttctaaggaccagcataaattgcatttgtccatagtgccatttcttgtgtgcctttgccgtgccaggcactgtgctagcatttatatccactgtctgtcatcctcgtgggaaccggcaaggcaggttatgatcccatggggatcctgaggccccaagaagggaagtaacaattgctcaagggggcgcatagtaagtcactggcagggccacgattccaacccacatctacttgcttctgattcctgtgcttgttccactgcatctcattgcctcaaattgacctttaagactgcagcgtccccttcccctgcccggtttaatgaccaaccattaatattaatgactgccattaataatggagtcatcttctgttggtcaagagtgaattgtggaarttaatggtgagaatatgtttgaagacttctgaatcatccgtgtgtcaatgcggctttttggttttcttcctccttttagggctatcgcaaagtgatcatttcaaccaacatcgctgaaacctccataaccattacaggaataaaatatgtagttgacacgggcatggttaaagcaaagaagtataaccctggtgagaatttgtagttcatgaatgtctctcctgtgtctagtgagcagccactgaaactgtagtcccacagttttcccctgagtgtttcatgtttgtaactaacaaattcaggtggcaggcgccatgagtgagatcacctacactccaggtccgcgaaggagtyctgaggcgggtatgtgagacaggaagtagaggcaggaaagaagagcccaggttgagcaaacttgggcacacagggtcagggacctgggcagagggtctggtaccccatcagaagtcggctctaaggccagggacagctgggtgtcaatcaaagggtgtcatcagaaactatatatatatggctggtttgagctcccaggtttctcaggaaggaaccagatctcctggctgaggtgaggcatggaaggagcactggcttctcctaagaaggtgcagtgagaagctaacttaaggtcatcttgactcatgtctgttttatactttgctttattccacagaggatttgagaccactgaaattattgctcccaattattgaactgaaatgctctagtaaacatttgagggtcctggcttccacaggtgtatctttttgtgatgacgtaggtgaaagagcttgggtctccagtgccaggctaatgatacacctttatcaagaaaatgaacctcatttactgctagaaaacagacatcacattatttctgtcttacagcagaactgggagggaggataaagcacacaagtgatttgaggcatttaatttcgtagtcattgattgatagtatgacccccatcctagtttgctgaaactcccagttttagcacccaaaatccgacatcccaggaaaccctctgtcccaagcaaactggaggggttggccatcctaccatctaaggcaagacctcggaaactactcttctcgccccttgctgcatgcgtgaggtttttctgatgtttttgtaacagatttcacagtgggcttatggcaaagccttgtttcactagggccaaaccgctgcggagcagtctggttttgtgctgtccattgtgctagccttgaggctttctggacccccgtgttgctgaaagaaccactggtgtgcttctttttatcgacactgtagaaagagtttgttcatgtgatgaagcactaatggggctcactctccatccagacagtggtcttgaggtgttagcagtgcagcgggtatcgaagacgcaggcttggcagcgcacagggagggctggcagagaggacagtggcatctgctaccggctctacacggaggacgagtttgagaagtttgataagatgaccgtgccagagatccagaggtaggcaccagttgctcctgcactgctgctgtttgtcaccatgtctctcctgcttgcccagagctgcagtttttactcacactccaccatgaggggttctgactcaatggcagagggatcaggtcatgaccctggtctcatgctcttcacaggtgtaacctggccagtgtgatgcttcagcttctagcaatgaaagtcccaaatgtgctcacctttgacttcatgtcraagccatctccaggtaagtgaaatccacagttttgcagaaggtgggtgaggagacaaacaacaacaaatggacrcttccaaaaaaataaagtatattggtcatctccttttgtttatttaattttgtggatgacaacattagttattagagaagcatctgaaaatcatgaaatgatagatagatacattgattgacttttaaagagacagggtctcactgtgtggcccaggtggaggtgcagtgactattcacaggctccatcacagcctccaactcctgggctccagcgatccccccrcctcagcctcccaagtagctgggaccacaggcatgcrccagtgttcctagctatgaaacgatagattctgtactatcagcaccatcaataaagttccttgacctctggaaccagtgaaggtcatcatgcgagtccttgggatactacagaaatgtaatgaaattgtacttttatcagcacagggactgcaaagatcacatttctttgcctttaactggaatttgatccatctctcctgttcattagtaatttctctacagaagaagaaaataattggaaatatttatgatattggctttggcacctggcctctcatcaacgcaccattttccttttctttttattgcccccccttttcttaagaaatgcaattggtttaaaaaagaaggaaagaaaacacaaagtcaccagttgatgggtatacaagggtcctgccctgatcctcaggttcacagtttccttcccctagaacaaccactggaaccattttctagtagacttctagagcaaatgtatgcatatatgagtatatgtagtgtgtttgattttatttatgtatttatttatttatttttgagacagggtctcactctggttgtccaggctggagtgcagtggcacattctcagcacactgcagcctcaacctcccgggctcaggtgattctcccacatcagcttcccaagtagctgggactacaggtgtgagccaccaagcccctgctgtagtatgtttttgtttttgtttttgttttgagacagggtctcactctgttgcccaggctggagtgcagtggtgcgatcccagctcactgcaacctccacctgccgggttcaggtgattctcctgcctcagcctcccgagtagctaggactacaggtgtgcaccaccatgcccggctaatttttgtattttttagtatagatggagtttcactatgttgaccaggctggtcttgaactcctgacctaggtggtccgcccacctcggtctcccaaagtgctgggattacaggcgtgagccaccacgcccagcctgtagtatgttttaaaacacaaatagcaacacacattgagtattgttctgtgcttgattttttttctttcattgctaaattcttacatacaaatgaagaagatacataaggtgtaaggaatggttaaaatctaacacctgtgtacccaattgaagcccccaggagtcccccccacccacttgccctcgcctccttccactcttttggggtacccactcttccatattttgtttgtaattgccttgcttttcttcactgttttactatatgcgtatgtatccctaaaccacctgttgtttgtaagtttatgttagttattcttgagtaagcggttttcattcagcttgttccrtatagtatatttgtgytgatgctttttcacactaagtgctattccattctgtgaataaaccaaaatgcatttatccatccttcagttgataaatattgctttaaaaaagcaatgagaaacacactgctttttttcatttaatacattttacagatcactccttattgggatgtatatatttactacatccttagaaatgcttttttattctttaataggtactatatttacatggttcaaagtttaaaatatataaaatagtaaatagtaataatgtccttctcatccccttgtctcccagcctccccagctggcccctgagacaactgctatttccactgttatgtgtttggttctggcgatatggtctctgtgcgatgtgtatctgcaggtgaaattcgtaagtgtaacattgctgggtcagatgttacacttttaatgtgtatattcaaaatctacatacatattgccaaattacaggtcatttaaaaagaaaattgaggctgggcatggtggctcacacctgtaatcctagcactttgggaggtcaaggtgggcagatcacctgaggtcaagagtttgagaccagcctggctaacatggtgaaaccccgtctcactaaaaatacaaaaattagctgggcgcggtggtgggcgcctgtggtcccagctataggggaggctgaggcaggagaatcgctggaacccaggaggcagaggctgcaatgagccgagatcacgccattgcacttcagtgtgggcaacagagcaagactctgtctcaaaaaagaaaagggaattgaactaaagacagtgatgtcgttctttgacaagtgtgtcaagggggcagtggcggttatgatttttgctgttgtttgatgtagaattatcagaagctcccagaaatactgaactagctgcaacttcatttttttggacttttggctcctttttatgtctctgtttctttagatcacattcaggcggccattgcccaactggacctgttaggtgctcttgaasataaggatgaccagcttaccctgactccaatgggaagaaagatggcagcatttcctttagaacccaaatttgccaaagtaaatgataccctctcctcagtcytctttctgtacaytacagttaaccrtcccaaagtagtaccatctacccagtgcttctagattaatctcactttttctcttacataattaccaacccctagtttgcaaatagccctgattcatgttcagtgtgggattcaaagagatgaagttaagagcccctacccacaagaaatttggaactctgtagggaaggcagtcacctgttttattgaatattaaagagtgaaataacactaatgtacatcgccatggttttagaaatacctgccctttaactccttagaagggaaactgcaaaagcaatgtacagaaatagtgcattctaaagctaggagaaagctgggtttacacaattttaaattttgctttgcagaccatcctcatgtcccccaaattccactgtacagaggagatcctgaccattgtctccctgctgtctgtggacagcgtcctccacaaccctccttcccggcgagaggaagtgcaaggggtccgcaagaagttcatatccagcgagggggatcacatgaccctgctcaatatctatcggaccttcaaaaacctaggcggaaataaggtgagccttgtcttgcacctgttctccagcgatagctgcttgtctctgctatgtgcttccctttttctactgaagccgtgcaaaaagtacgctttccctttttggctaaattatctaaagaatcacaaaaagaaagccagacagcatttcagaaatgcttcagtaccgaagcagtgtcattctggtctctgttccgaatgtgtttaagtcaacaagacttaagtgactcccaacccatcaaaacttaattggaacttgattaagtaatatgtctaataatgatagtgcgtaccaatgaatgagtacttactctgtgccaagccccatgctaagcacttcttaatgtaagatctcatttattcagtaaagtaatcctaagaaatgagcactataattattattttttatattcatgaaacatgtagtcatggaaacgaagcttcgtgcagttgaaaaacttgcccagggccaggcacagtgtctcaagcttgtaatcccagcactttgggaagccagggcaggtggatcacttgagcccaggacttccagaccagcctggccaacatggcaaaaccccgtctctactaaaaatacaagaattagccgggcgtggttgtgcatacctgtaatcccagctactcgggaggctgaggcatgagaatcatttgaacctgggaggcagaggttgcagtgagccgagatcgtgccactgcactccagcctaggtgacagagcgagactctatctatctccaaaaaaagaaaaaagaaagaagtcttacataaattgactgggcatttctgttttgttttctgtgtctgttcatatcctttgtccatttttctactgggtcgttggtctttttcttaatgacttgtagaacttttaaaatcaattctagagattctaatcatttattgggtatgatgagacaaatatcccaatctgggaaacttcaagtttttctttagtttaaattattaacacttttcttatagttcatrttttttgatataaagatattttcctacgtttctttttggcacctgaagttttttctctgaattcaactgtgttctaaaaatgttgttatattttctctatagagatgagaggattgttagctgggcatggtggcatgtgcagatagttcaagctatctgggaggctgaggtgggaggattggtttgcagtgagctatgattgtatcactgcactccagcctagggaacagagcaagaccccgtctctgtgaacatataaatggtgaatgagtggattgtgatatcactctttctcctattcaggattggtgcaaagagaattttgtcaacagcaagaatatgacgctggtagcagaagtcagagcacagctgagggacatctgcttaaaggtatcgtctggtcctagtgttctgtgggtgacaaagctgtcacttkgttcaaggtagaaattttgaagttgcttattgctagtgattataaaaggatttctcattgtagcaaatttcacaaataagaaaaaaggaagttacccacaattccacaattcagtagtttagcctatttcctaatagcctagtttttattgtrtttttttacatagtaaattatatgtataatttatatttggttttataatctttataagcattttccagtgttagaattcttcataagattttttttaagtatgaatatctgcattatttccttttagattaccaaagtygtgtatagtatttgacacaatgcagaaaatagtgatttataatgtagaaagtttaaaagtctcccataatcctgcccctccagagataactactgttaacagtttggggtagctccttctagaatttgtttctgtgtatgtatgtttttgtgcatgtctctgtgcctgtgtgtgagcacacacataacggatacgtgcatatgaggtacatgttccacaacttcctttcttccacatggcatatttctttctttctttctttcttgtttattatttgagacagagtcttgctctgtcacccaggctggagtgcagtggtaccatcttggctcaccacagcctccgctcactgcaacctctgcctcccgagttcaggtgattctcctgcctcagcctcccgagtagctgggattacaggcgtgcgtcaccacgcctggctaatttttgtatttttagtagagacggggtttcaccacgttggccagactggtctcgaactcctgacctcaggtgatttgcccgcctcggcctcccgaagtgctgggattccaggtgtgagccactgtgcctggcctcacatgcgtatttctcaaatccttcctgtggctgggctttcagtgctgcatgtgtctagctcattcattttagtgatttcatagcatttcattgtattcagtgcagtttatttaagcctctaataatggtcatttagattctgttgtagtgaccatcctccgtatgtgctgtggtgcacacagaatgaatttctagatgggggaatttggattttgttagatattgccaaagtgtccaccgcaaagtgttttttttcctttctttttttttgagacggagttttgctcttgttgcccaggctggagtgcagtggcgcgatcttggctcaccacaacctctgcctcccgtgttcaagcaattctcctgcctcagcctcccgagtagctgggactacaggcatgacccaccacacccggctaatattttgtatttttagtagagacgaggtttcaccatgttagccaggatggttttggcctcccaaagtgctgggattacaggcgtgagccaccacgcccggcctaattttttgtatttttagtagagacggggtttcactatgttggccaggctggtctcgaactcctgacctcaggcgatccactggccttggcctcccaaagtgctggggttccaggtgtgagccactgtgcccggcccacaaagttttatattagctttttattccctcttagagtacatggtgttttaaagagctgtcatggtatatttaatgctcgcatgacactccacattttatgtcagagatagagggtagcggaagtgttcttttgctgttgatcactgagacagtgtccgtgtgtttgctgctgtcctgagtactctgtggtgaatgtcttgtgccccctcagtgcggacgctgctgggagacagtcacagcctgtacccaggcctgtgtctgatgccaacggcctacggttggcactagagctgtttcttctcatagtagcctattgtattctgtctttcacacatttttttaaactgcttttgtatttgaacagtttcctgccagtctgtctcttggcttcataagttttctcaatttatcattgacagtagaaacggtgcttctctattagttgtgaatttaggaccctgtagtggccagggatacctctcattatatgtcaggcactggtaaggtcctgagactttacagacatgcctactcagtaactaagtaataatctagatggtgacctgacgtacatacactcatgccaggaggccatcaaattaaaataatcactatcattcatgaagtgtttgttcagcactgttctgagtactttttatgtggctgccttatttaaactcctcatttctttttttttctttttcaactcagaccttaacccaaaggataaaatcctcatttcaacctataagattgattcttttgttattcccattttacaaatgatgaaactaagcctaatcaggttaaataatttgccccaaatcactcagccagtgagtggtaaagctgatagtctggaaggagagaccaccagttagcctctggggcttcttggaggtggtgacaactgagctagatcttgacagataaggagataaaagagtatcttccaggccaggtgtggtggctggcttatgcctctagtcccagcactttgggaggcccaagcaggtggattgcttgaggccaagagttcgaaatcagcctgaccaacatggtgaaaccccatctctgctaaaaatacaaaactaagctgagcgtggtggtgcatgcctataaccccagctactcaggaggctgagrcacaaaaatcgcttgaacccaggaggcagaggttgccagcgagctgggattgtgccactgcactccagcctgggcaacagagtgagaccctgtctcttaaaaaaaagtatcttcttcaggcatagatcagctgattgtcaacaacagaaaccctagagccatcataaaggacaaaataaagattcttccaaggatggaaaggtatctctgagaaccgataggcaggaaatagagtcacaggaaccagaaaaagcctgcaggagccaggcccgccactttctctggacctgctgcttctcttgctttgagtgccctctgcgtgcctccttcccttttctcacctttacctccgcatggaagtgatttctctgcatggcccctccactcaagagcccagcagagattgacaagttttccagtttcaaacctaaaagatgcctggaagagaaaagctggccagcttaggtccagcgtgtgtgtaccactggtttgttcatctgtgcccaggggcgtaggttacatgccccactcatcaagagcagtagaacaaggacattgactggtgactgacatttcctctgatgagacaggcagcatttctactaagagtagcaaatgtgaaggcacagataggaatcatgaaacggggcgaggaaagagaaggcagccagctatgggggaccatggagtgtctaaagaagagtggtgaggccgggcgcggtggctcacgcctgtaatcccagcactttgggaggccaaggcgggcagatcacttgaggtcaggagttcaagaccagcctgaccaaaatggtgaaaccccgtttctactaaaaatacaaaaattagccaggcgtggtggcaggcgcctgtaatcccagctacttgggaggctagggcaggagaatagcttgaacctgggaggtggaggttgcaatgagctgagattgcgccattgcactccagcctgggtgacagagggagactcagcctcaaaaaaaaaaaaagaaagaaagaaaaagagcggtgagaggaaagacaggcgagcagctcagggtggctccttcgtggcttcaccacgggaagtttgcattgttttgcaaggagcagtagagacattgttgaaggtatttgagtggatgaagagtgattcgagttgtgctttaggtagattagcttggcagcagcaggtgggtgaatcggagtgaggagatggtgagatggtcaaagcgagagggaagggcctttcctttccgggccgtcctgatggaatttaggtgaggggtgggtcacccaacctgcctgtggtctggtggctaatgtgagcacctccctcccagccctaccttcacaggcggtagtttccctgtttctggtccgtgctcctccagctgggccttcttcccctgaccttgctgatccttggtgaccacctccgaatgtcagaatccacawcgttaggctcacaatgtgggctgcttttgccccagtgggtccagttgccccaacacgctgtgtagtgctgaccagtgtttacgtgtggggtcggctccattcctcgctttctcccgaaacagatgtcaatgccaatcgcatcatcccgaggagacgtggagagtgtccgccgctgcctggctcacagcctcttcatgagcaccgccgagcttcagccagatggcacctatgccaccacggacacccaccagccagtggccatccacccgtcgtctgtcctcttccactgcaagccggcctgcgtcgtgtacactgagctgctctacaccaacaagtgctacatgcgggacctctgcgtcatagatgcacagtggctgtaygaggctgcccctgagtactttaggaggaagctgagaaccgccagaaactgagccrccccaggatgccgccagaatcactggtccctgggagcttggactacagttgtccttacagcaggcttccaggttggcgcttagagaagccttggaatcagctgaaggtgcctgacttccaggagcgtgaaagcatctttgctcaactcctgggactgaaccatatagacatggacatatcatttgtacctggaaacctcaaaattatgcttttggttcttactgggtgactttgacttaatttaacacctgagcctcagttttctcatctgccaaatgggagtaataataataatccttataaaattgggttcataaagtttagagaaaaggaatggaaagtacccagaactatgcctggagcacgcacgacacacgtacagtgagttgggagccgttaggctgaatgttactgcttgccatatgatgtgaagtacrgcaatatcccaagttcttgtgactgagggagattttctggaagggccacaggaggttgcggagcttggatgttgcccttagttcttgtttaatgtctctctgaatgcagttttaaaatagaaaacaaaactgacttctgtagaagtttccagagggaggtgctgttatctcgtacctcctgggatggcgatccctactgaacgcttgtgtctcagggtggaccactctgtgtctgtctccaagcagagaccagtaaaggagcctcctggtcctcagtgcgtgaccctgtcagtgctttcaggagacatgtaagcttcctgggtgaaggttgatttgtaccttctgaatcctgtcacgtgtagacatgggaaactgacctatcagtgttttgtgtgtgtaggtgactcccacatacacagttgccatttttctctctaactgggcaccagtgaacatgcgggcatgaggagtgactgtgtaccatttcagctgtttcttttcgggcagtcccctggtcagagggggtgggggtgggggaggggagaggggtacctagaacccagagaacattggcttatgccagataccacaccacatctgggcttacattcttgtatcttttttggtgtgtgggcggggggggtggggggcagttcagtgaagtctagaagacctgctggacaaattctaaaagagctagagctgtaacacttattcttgcatcttattaattttctatgatattttttccttcttcgtagggacttgggacaatctggctttgctgctttctaactgctaggcacctctctctaaccctcattgtcagagggaattggaggatatccacagtctgttcctgttctgatattctgagcagagaaaaggcactaacggttcctcttagctatttaattatcagaagcaagtaatctttccccagataatattttgccctagaagaagccgtgatttagctcttttattgtgcttacttggtccaaatacatctgtggggtgttttgtcatttcttaatgaatgaatcatagttataaccaggggccaagctgcccaagaggctcttcagagatcatggatgctctctttctggaagctgtggcctgatggagcagccccattccagggtcccatctgtccggagttgtgtatgtcaagtccggctcagtctttatttccaacactagccgtggtcctgtgcagtcaagctctcagctagtgtttagggctgtctgtcagaaatggttatacgtgggcaaaagaagatctgacagctcctatataccttatcttactgaattcttaaactttgaaccagttcttccacttactgacttgttaccactgctgactttctgaaaagttttccagtttttkttttttgttttttgttttccagtaggggattagaatgtttagtcctacttagtaagaaaaatattgtatttttaatcattcatagtgctggtaaaaaaaaaaaaaaaaaaaaaaaaattggggggtggccgggcgcagtggctcacacctgtaatcccagcactttgggaggccaaggcgggcggatcacctcatgcctgtaatcccagcattgggatgggaggctgaggtgggtggattgcttgagaagttcaagaccagcctggccaacatggcaaaaccccgtctctactaaaaatagaaaacttagctgggcatggtggcacacgcctgtaatcccagctaccggggaggctgaggcacaagaattgcttgaacttgggaggcagagtttgtagtgagccaagatcacgccactgcattccagcctggccgacagtgtgagacggtctcagaaaaaaaaagaaagaaagaaagaaaaagaaaaaacttggggtaatttatgtccagcttaagtacctgaacagtttccggaaatgtatattttttttctgagaggcaaaggatgtaaacagcttctaagtagctttaatgtttctgtacagaaataagtttatccctgtaacattgtggtagagttttaatacagtatttagttttttattgggctttttwaaaaagttaacttttaacatagctgctcagggattaaatcagattggaaaacccattctgactccacatactgctacaaagaaatacatcgttgtttatattgagctgcaggagatagtayactttaaacttaagaaagttaaatgtttcacaataacattgcaatataatcttcagctaytctctttccattggtaaaatctctgatggtgtgataactctttgccaacctacgaaacccatatctggaagaatcaccagctcccgtgagcagcttcatgtaaatagatgcactccaagcagattgcatgcctcaggtgtttgtcttctagtaatcatggagtgtgcaacacccagagtaacactacaaggggcaggactgcaaacagcaggtcctggctaaaaacccttaatgctgcattgctgccagttgtaaagagatgcctgaatggaggcaagttctgccctgtgggtgaaactgatgatgtactgtactgtcatatataaatccactaaatccagctaccaggaactgcctggaactgtggccatgcatttttttttttctttaaagaccagtgtgatagtaggccatgcatctgagatacgatattccttggtaactagagggagaaaaaaaaatcaagtaggttcaggcttatgttgtattttgagagtctggttttatttgaacagaaataactctacagaaagctcttgtaaataatgctcaaatttgcacccgacgatcaaatccattaaaaatgaatcttgtatatgatgtgtgtggcttgtttcttgcatctcttttccattattcatagaaaattatttagaaaatattaagtgttagtcttaccatgagttagtaagacataccttcttagtagcttatatgtcctgtatatcctgggaaggtaggattgttgatttttaataaatctgaaccctgtctttgggttatattaatttactggagaaactcacagaactcagggaaacacatttaccggtttcatacaaaagatatgaccaaggatacagataaggagatgagcagggtggggaatggggaagaagctcccagcctccatgccgtccctggaccaccaccctccaggaacctccatgtatttagctatcagaggctctccaaaccctgtcctcgggtttttatggaagcctctggacttatctaaatgatataagctggcttcttgtccccagaaaaatgatgttccattagaacttggatgcaaggttggaggtgcagagagggaaggtcacaaaaattaatcatggatcctgcccttgaggatgtcacagtctggttgggtttaacctggttaaagcagcaacgctaggaggttcctgttgaaaagagaatgaagcatatgggctgggtgcgcacaagcatgagttccgagccggtggaaaaaaaggttctagaaggcctctttcaggaaaaccctcagactttcctttgctctcacaacacaacaatcaacacagaagacttatgtggccaaaggtttgggtttttcccctccacactaagcagcagacaccagctgggtgtcctccaattcaatcccaacagtatctacctggagatagtgtcagatcccataggttgagggctcagtccccaagaccgcccccaccttcagacagcaatggcaagtctgggcctctgaaacttccgaccaacccgcttcaagttggggttcccacgacccccctctttggattatgttaactcactggagcagttcacagaactcagggaaacacattcaccggtttcatataaaggatatgaccaaggatacagatgagatgagcagggtggggaatggggaagaagctccgaggttccttgcctaccctgggccaccaccctccaggaacctctacgtattcagctgtcagaggctctgcaaaccctctcctcttgggtttttatggaagcttctggacatcagcatcccttcccccagggtatatggtgggaccttctctgggaagggacttaagacccataatcagaaatgtggaaggagattagagtcctgctttggggcaggtaaaaggagggcaggagaaggggagagtctgtttcctgaggcctaacacacccaacattatcacagaacattgtaacaagggctataggagttacgacccaggaactgtggatgaaaaccaatacatatatatatcataacaccacagcctcctagaggaaagtgaccgtggaagggtctggtgagagctggcgggagacaagagtgcattccacgcagcccaaaagccttgcgtgctttgagaacagcaggtggaaagtgggtaagcggccactagagggaattaaacagcttcggacagcggactcggcagcgcagcaagaaagctccggaatccggattcraggcttcccgggctgcaccggaggtctccagcagagggcgcgattccgcccgctggccttaggtcgtcagagcgccggcgcgggaagcgcttccgggcaggggcggggcttccggcggcgcctcaggtcgcggggcgcctaggcctgggttgtcctttgcatctgcacgtgttcgcagtcgtttccgcgatgctgcctctgctgcgctgcgtgccccgtgtgctgggctcctccgtcgccggcctccgcgctgccgcgcccgcctcgcctttccggcagctcctgcagccggcaccccggctgtgcacccggcccttcgggctgctcagcgtgcgcgcaggttccgagcggcggccgggcctcctgcggcctcgcggaccctgcgcctgtggctgtggctgcggctcgctgcacaccgacggtgaggtttagcgggccgggggtgtggtttgcgttcaacagagggaaaacgtagaccaggaatagggcctgcaaccgacctctgaggtctgggacatttttccattgattggcaaccagcgggctaaacccacgtatgatcatatttcccccacctcccctatccagcagtttcgttttcttttggtagggggtgaataaaattaaatactagggtacctttttccttagtcttattctatcgaaagtggacctttgggaaggcccatggtcgtggttgaaaatagcatagttatatcgtttggcaagtggaagaggattggaaattctcctggtttatagcggaaagtggtaatgcgttcattgttggaaatcacttttccagaatcaggctcagcttcctactactattatggtatttttaccgataaggaaacaggcttctagagtaaccgtaatagcagagagattagaaacagtccaggtttctggctgcaataacctgggtaatagttttatgttttagactaactggctttcctttttatgtatctggatttcttttctaggagacaaagcttttgttgatttcctgagtgatgaaattaaggaggaaagaaaaattcagaagcataaaaccctccctaagatgtctggaggttgggagctggaactgaatgggacagaagcgaaattagtgcggaaagttgccggggaaaagtaagtactggtctggggatcccagggcagcaactcccttaaccttgcaggacccatcctgggtcatccccagaagagccttgagttcaggtgtggatactttgataaatgggtttcaagagagtgaaggattcatttggacaacttcgtaagccccaggcagtccattcaccgaacacaaatttgctgtgggctggttactaaggagacaaaaatgtagtgcaaaaaagtactggcagaatcagtttgatctctgatttacagccctgataaaataggacactgctctctaatgtttagtatgggtgaaaatgaaaaatatgtaacttctatgtaacaggatggggttacactgtagtaagggctgccatcagaggtggggagtttgtgacctaagtcagctcccccatcatctcctaaactgttaaagtgtttacacttttctgcattatagtcatccataatctcattacacagataaacatttggcatcttccaggtttttaaattgagcctgggcgcggtggctcacacccataatcccagcactttgggacgggcagatcatgaggtcaggagaaaatcctggctaacactaaaaccctggctctagtaaaaattaaccgggtrtggtggcacgtgcctgtagtcccagctactcgggaggctgaggcaggggaatcgcttgaacctgggaggtggaggttgcagtgagtcgagatcgcgccaccgcgctccagcctgggcaacagagcaagacgccatctcaataataaataaataaattgaatttccttcataattgaccttatgatgtgtatgtaatttttttaaatcacagcttttatgagatttaattgagatggcatacgatttacccatttattgaagtttattaaattaagtggttcttagtcctcgcagaattatgcatcagttatcactacctaattctagaacactgttgtcatccccaaacaatacctattagcagtcactcattattcctccctgtagccaccccaggtaatcactaagctactttctctatgggattgcctcttttggacatttcatataaatggagtcatacaatttgtagcttccccccccaaccccacggagtcttgctctgtcacccaggatggagtgcagtggtgcgatcttggctcactgcaacctctgcctcccaggttctgacaattctcctgcctcagcctccttagctgggattacaggcgtgcgtccggttaatttttgtatttttagtagagacagggtttcaccgtgttggccaggctggtctcaaagtcctgacctcgtgatccgcccgccttggcctcccaaagtgctgggatttcaggtgtgagccaccctgcccaccctatttacctttttaattgttgggttgtaaaagttaagtttttctgggtacaactatcttatcaaattaatgatttgtaagtactgtttcccatcttgtgggtttccttttcactttcttggtaatgtcctctgacacaaaagtttttaattttgaggaagttcagtttacctatttttttggtcgcttgtgcttttttatttattttttactttgcttctaattcaccaagtgcaacttgtgcttttttagtgtcacgtctaagaaaccactgcctaacccaaggttgtgaagatgtatgccttaattttttcaaagttttctagttttagctcttagtttaggtctgtgattcattttgaatatggtgtgaagtagggtcctgattctcttgcctgttgcatagtgtgtttttgccctacacaggtcaattgtgtcttctgtaatctcacctaaacaccatttgcgcaaggttttcatagctatttgggggccattaaaaataatgctctgatgaacgtcattcaatttctgtgcccaggagctcagcttagtcagcacagttggaattagacagattttgtcaacctcagactgcctctgttgccatggaaaggtggcttcctggcagagcagctagttagcacaagtggagggcggcacttcatgtactcttttttttttttttttttttctgacagagtcttgctgtgtctccaggctggagagcagtggcgtgatctcggctcactgcaacctccacctcccaggttcaagcaattctcctgcctcagcctcctgagtagctgggattacaggcgcgtaccaccacgcccagctaattttttttttttttttttttttgtattttttagtagagatggagtttcatcgtgttggccaggatggtctcgatctcttgacctcgtgatctgcccacctcggcctcccaaagtgctgggattacaggcgtgagccactgcgcccagccttcatgtactcttgtgtggaatggtgcctgccagagttgcatagcccagcagttttggttctaaaccttatgtcccaagaattttgactcaaactttggaacatgatttgtcaggtgtggattcttgcaccttaaaattgtcactagttggtgtgtctggcctgctttgtgattatgaaacttcccacaagtactctaagggatgagtctctactacagcccttgttctttgtgaggcattcccttccccgttccagggctgctctcggtgtttagcagaggcaccctccatcgcttcttcctttccttgcagggcaaattttctgacggggaaagtctcttaaaggggcttctgttccatctcaccagcctctcaggtccttactttgaccaagggttccctggaaagaccagggtgggcagtgtcagctggctgtggccatgagatgcccagtcagcacatggcagtgagccctggggtactggccctgttgggagtaacccatgcatgacttgtttggctgagataaactgaggccagctttggcttccagcagctggtacatggtaggcacacttcagacctgctgagtcactcaggattggatgtaggcacccagcctagtttgaagttctgcatataattcagccagctaggacagagacattgtttcaatacgcctttttaactgtagcagatttccatgtttatgtgttaacctgctcggttaaaaccatgccttgtctgttttgccttgtctgttttcccttgccgttttagaatcacggtcactttcaacattaacaacagcatcccaccaacatttgatggtgaggaggaaccctcgcaagggcagaaggttgaagaacaggaggtaagctaatactataatcagcttttacctcagttctgacaggctgtgcctggggcttagaggaggagcgtttttctttggtctttcaaaaaaaaaaaattcctctaagtccagtcgcatggctcacgcctataatcccagcactttgggaggccgagacgggcagatcacgaggtcaagagatcgagaccatcctggccaacatggtgaaaccccgtctctactaaaaatacaaaaattagctgggcatggtggcaggtccc

SEQ ID NO: 94360 - DNA, 47985 bp, Homo sapiens
ccataattgaagaaagggtcaaggctaataacaagtttggatgggtacacgtggacatgaaggcaacaacagacactgggaaccacgggagggagggaggcaagggttgaaaacctacctactgggtactgtgcccactacctgggtgacaggtccagtcacaccccagacctcagcatcactcaatataccaatgtaacaaacctgtgcatgtacccctgaatctaaaataaaagtggaaattactttttaaaaaaaacttctaacatttttgattaaaaaaaaaaaaaacaaacgaacaggccaggcgtggttgctcacggagactgagacggcctcaaacaaacaaaaaaaaagtaattggatgagaaagcaacagcgtccacctgcttcacagcctagagcaggcagaggcatgaagaagagggaaaggcctgcagtgctccaacctccctgcagagtcggagctcctcccaggcgctctgctcctagcctggccgggcctccctgcagctcctgcctgccctcacctgcttgacctcctgctcctggctgcagctctcccagtaattggtcacgatgaaggtggcgtaagccccattcagggccagctccatgatgacctggtcatcttggtctccctgcactacttctgcaccttgcagcctcagctcctttgctgccttcttcctagggtttcgggtcaccactcgaaccttgaatgtcccatcttccaggagtgtgcgggccacggagccaccctgggcacctacaaagaatcaaaaagacctctcaggtcagacctacctgaaagtcccactgaagggcgaaaccccgaagggagtgctccaccacagcaaggagcatccaggaaaccttctcaacgacgattctcattcaggtatttttattttctttattttatttttttgagatggagtctcactctatcacccaggctgaagtgcagtggcacgatcttggcttggtgaaaccccgcctctatcaaaaaatacaaaaattagctgggtgtgaaggcacatgcctgtactcccagctactcaggaggctgaggcacgagaattgctggaacccaggaggcggaggttgcagtgagctgagattgcgccactgcaccacagcctgggtgacacagcgagaatctgtattaaaaaaaaaaaaaaaaggccaggcatggtggctcacgcctgtaatcacagcactttgggaggccaggccgagtggatcaccaggtaaggagaccgagaccatcctggctaacacagtgaaaccctgtctctgctaaaaatacaaacttagccgggcgtggtggcacccgcctgtagtcacagctactcaggaggctaaggcaggagaatcgcttgaacacaggaggcggaggttgcagtgagcccagatcacgccactgcactccagcctgggtgacaaagtgagattccctctcaaaaaaaaaaaaaaaaaaaaaaaaagggcctggtgcagtggctcacacctgtaatcctagcactttgagaggccgaggggggtagatcacctgaagttgggagtttgagaacagcccgaccaacatggagaaaccactgtctctactaaaaatacaaaattagctaggcgtggtggcacatgcctgtaatcccagctactcgagaggctgaggcaggagaatcgcttgaacccaggaggcagaggttgcggtgagccgagatcgcgccattgcactccagcctgggcaacaagagcgaaacttggtctcaaaaaaataaaggtaaaaatatttgtgatgtaataaagtaaaaaaagtagaatacaaaaccatattcaggctgggtgcagtggctgtaatcctagcactttgggaggctgagacaggtggatcacgaggtcaggagctcaagaccagcctagccaagatggtgaaaccccgtctctactaaaaataaaaaaatgaggccgggtgcagtagctcacaactgtaatcccagcactttgggaggccgaggcgggcggatcatgaggtcaggagatcgagaccatcctggctaacacggtgaaaccctgtctctactaaaaatacaaaaacttagccgggcgtggtggcgggcgcctgtagtcccagctactcgggagactgaggcaggagaatggcatgaacccaggaggtggagcttgcagtgagccgagatcgcgccactgcactccagcctggacgacagagcaagactccgtctcaaaaaaaaaaaaaaattagctgggcatggtggagcctgtaatcccagctacttgggaggctgaggcaggagaatcgcttgaaccagggtggcagaggttgcagtgagccgagattgggccactgcactccagcctgggtgacacagtgagactctgtctcaaaacaaaagaaaaaaccatattcagatcttgatgggatttgaattcttcctgaagtagaatataaagccatattcagatacacaaccatattcagatctgctcaaaaacgagacaaagaaaaatagttaacagaaaggaatacaaaaacttattcagatctcgatggagcttgagtcacacaggcatgcgcatcggtcagatgtacccttaagattttgcgcgttgcagctgggcccaggggctcatgcctgtaatccagacactttgggaggctgaggcacgcagatctcttgagctcaggagtttgagaccagcctgggcaacatggtgaaaccatatctctacaaaaaaaaaccaaaaattagctgggcgtggtggcatgtgcctgtagtcccagctaccagggaggctgaggctggaggaaagcctgaacccaggaggttgaggctgcagtgagccgtgatcacaccactgcacgccagcctgggtaacagagtaaggccctgtctccaaaaaaaaaaaaaaaaaaaaattctttattatatgtatattttacctcataattaaaaataatctataaacaaatactgaattctagctaatgttatgcatgctttagtatggaagggcggtgtacacatatctgcaatttacacagaaatgcatcaaaaataaggactgaggccgggcacagtagctcatagctgtaatctaagcactttgggagggtaagggggatgggttttgcttgaggccaggagtttgagaccagcctaggcagcagggtgagacccagtctctacaaaaaattaaaaaatcagctgggcctgttagcgctcatctgaagtcccagctactcaggcgaatgagtcaggaggattgcttgaggcttggaagtcaaagctgtagtgagtgatgattgagccactgcactccagcctgggcaacagagcaagaccctgactcagaaaaaagtgtacaccaatgttccatggcagcattattcataatagccaaaaagtggaaataaatcaagtatccatccactgacgaatggacaaacagaatatagtctatccatacggtggaatattactcagccataaaaataagtaaagctgtcaggagttcgagaccagcctgaccaacatggtgaaaccccgtctctactaaaaaatacaaaattagctgggtgtggtggtgcacacctgtaatcccagctacttgggaggctgaggcaggagaattgcttgaacccgggaggcagaggttgcagcgagcagagatcacaccattgcactccagcctgggcaacaagagagaaactctgtcttaaaaataaaaaagtaaagttggccgggcgcggtggctcaagcctctaatcccagcactttaggaagctgaagtgggcagatcacctgaggtcaggagtttgagaccagcctggccacatggcaaaaccccatctctattaaaaatacaaaaattagccaggcatggtggctcacgcctgtagtccctgctactcaggagggtgagacaggagaatcgcttgaacccgagtggcagaagttgcagtgagcagagatcacgccactgcactgctgcctgggcaacagagcgggactctgtctcaaaaaaaaaaaaaaaaagagtaaagcccggacacacactacaacatgaacaaaccttgaaaacatgctaactgaagaagccagagagaaaaggctacatattatgattttattcatatgaaatgtcccgaatagacaaatccatagaaaccaaaagtagattggagctttctaggggttggctgggaggagtaagaatggggagtaactgttcacgggttcatggagttcttttttttttttttttttttgagatcaggtctcactctgttgcccaggctggagtgcagtggcacaatcaggtcactgcagccttgacctgctggactcaggtgatcctcccacctcaacctcctaggtagctataggtgcatgacaccacgccccactaatttttgtatttttttgtagagacgagattttgccctgttgttcaggctggtctcaaacacctcagctcaagcgatctgcccatttggtccaactaaagtgctgggattacagggttgagccactgcacctgggccagagtttctttttggagtgatggaaattttctaaaattgattgtggtgatggttgtacaattctatgaatacactagaaaccagtgagttgcacactttaaacaggtagattgtatagtacgtgaattatatctcaataaagctgttagagatattaaatatgtataaataagaaaaaataggaatgaaataatatgctatcatttgaaaaaatgataacatgttatctactctggcaggatattcaagaaacttggtaacagcaatagatgaggtggaagaggaggctaggaagaagatttaattttggtatcatgttcaagtactcctattcaaataagttaagtaactcatttttttttaatttggaaagcaggtctggcgtggtggttcatgcctgtaatacctgcactttgggaggccgaggcgggtcatcacctgaggtcaggagtttgagaccagcctgaccaatatgatgaaaccccgtctctactaaaaatacaaaaattagccgggcgtggtggcatgcccttgtaatcccagctactcgggaggctgagacaggagaatcgcttcaacccgggaggcaaaggttgcaatgagccgagatcgtgccatcgcactgcagcctgggtgacagagcaaaactccgtccaaaaaaaaaaaaattggaaagcaatttgggcctcgttcctgcgaccacagccccaacctgggtcgggggtcccagtgaccttacccctccctgcagaccccaggacgggcggtcttcagggctaggcgccctggctctgcaagggccccagtctggggtttggctcacctgtgcctccgaaaaccaccaccagtttcttgtccaccatgaggacgagaatgggacgaatccggtccagagatctgggggtaatgggaggcgtggagttgggggtggggccggggttcccgccaggagcgacaaaggacacccccattgtctatgcatcgagtatgtgtcgaagggggcggctgggcccggagcggcaagacgcctgtcccgagatatcggggtcccgcgacccacctcgtgtcccttgggcccgatcccctcctccttcccgcctcccccggttccagtcacccgccccccggcccgggtcccaccggctggagtgacctcctcgccgcggcctgggcgggacaagttccaggagcccgggaccccgattctgcggccgagtccactgcagaggcggggatggagctgcgcgctaggcgccaactccctccccgcagctccggccccacctggcagagcgccgctcacggaagcccagcgtcggaggacccctggctgcagccgccaatcccgacgtgtcggccgaaacccctcctccggcgcagttggctcctcctggatcccgcgggactcggcgtcgtttccgggtttgcccgccccaggcacgtgcacagtgagtttgtgtaaatccagttagaccaaaatgagcgaggtggagagcctcttaaccggatgctacgggtgatgactgggaggaggagaaaaattacctctttatcttgcatgaacatcttaattttcaggtattgggcgtcaggcaaagataattaaagctatgtccatgagtcttatcccttgaggccttgtccgcttgatattttctttgcctaactcacttttaaaattttattatttttatttttttgagacagtgtcttggtccgtcgcccaggctggtgtgcagtggcgcgatctcggcttactgcaacctccgccccccgggttcaagagattctcctgcctcagcctcccgagtagctgggattacaagcatgtgccaccaagcccggctaatttttgtattttttagtagagacggggtttcaccaggttgaccaggcaggtctcgaactcctgacttaaagtgatccacccacctcagcctcccaaagtgctgggagtacaggtgggagccaccgtgcccagccctaactcacttctgaagttgctgctacttgcactgatttcagtttttttttgtttttgttttttgttttcaaggtggagtcttgctctgtggcccaggctggagtgcagtggtggtgcgatcttggctcactgcaacttccgcctcttgggttcaagtgattctcctgcctcagtttcctgagtagctgggattacaggcaggagccaccatgcccggctaaaatttttttgtatttttggtagagacggggtttcaacatgctggccaggctggtctcgaactgctgacctcaagtgatcttcccgcctcaggctcccaaagtgctgggattacagacatgagccaccacacccggcccacgatttcagtaatttctttgtgttcagtaaaactaaaaaatgactctgggctgggtgcggtggcctgtaattgcagtgatttgggaggccgaggcgggtggatcacctgagctcaggagttcgagaccagcctggccaacatggtgaaacccccgtctctactaaaaatacaaaaattagccgggcgtggtggcaggcgcttgtaatcccagctattcgggaggttaaggcaggagaatcgcttgaacccgggagaagggggttgcagtgagccgagatcacgtcattgcactccagcctgggcgacgagcaaaactcggtctcaaaaaaagaaaaatcattctgtcattctggccgctgtttgaagaatgcgaataatgcaacagggagatcagatacaagactggtaaccgaggtgtcagagttgagactcagtttcgcagattgcattggcaagtgaccaagtgggtggtgccacggttgacaaccctatttcttacatcactgagtggatgtacaaggattaaaccacactggggaagaaaagtgctcaaccctgaggcaccctcacacacctcggctcttgtgaacactagtgttcctgccgaagcacgcctacttaccccgctgagcagagcctgagcctgcaacctccagagacstggggaaagccacatrctccgcttcccgcccccsgcaagggcgtgtcagctacaaggggcgtgtcatctctaggccccgccccgcgctgcgtgcccacgttgcgccggcctcgcgccagtccgctgggctgcagggactgcggcgcctgagggagtcgctgacgggcacgctgactggaggctggcggacaggcgacagcgacctgcggcaggtgagctgtccgcgccctcccggggccttccttccgcccggcttctcggaccgcgctgcgtccttcgcgggccctgcctcggtccaggccttcggacctgggcttggccgggccacagccctttgggtcccctgcgccggtctgaggggagacccggccgggggcggccggaagctgggtgaggccgggcagaaggacgaagaagggcgtggaggggctgtcaggggagggcgaaaccgcggacgccgctctccagaagtcrtctccccrggggcgcggggaggcctgaatggctctctttggcgtccccgttgggcccaccctctcccagcgtcacggctatgctgggcgaggtgacccccggggtcgtagctgggggcgtcggcggtgcagacaggggatgccggcagagattggagcccggcttggctgtttcccgggctgttggcattgaccggggctctgcccttcctctaatgcccttatctctataggaagtgccccttgagtgggtgtcgtgacttcacgagtgaaccctggtacgccctggagcagagtcggactgggagggatcaagtgtgggggcagccggttagtccggacgcgggtttacctattacyttctgagcgcagtgctctgggtggattaattgccctgcaaaagctgccgggacctccttgcagtctttgcacgaggcctgcctgtgtcatgccatttaaatcgcgtctgggccgggtcggtggctcacgcctgtaattccagcactttgggaggccagggcgggcggattgcttgaggtcaggagtccgagaccagcctggccaacatagtgaaaccccgtctctactaaaaatacaaaaatcagccgggcatggtaacgtgagcctgtagctccagctacttaggaggctgaggcaggagaatcgcttgaacccgggaggcagaggttgcagtgagccgagatcacgccattgcactccagcctgggcgacagagcaagactccatctaaaaaaaaaaaaaaaaaaaaaaaaaatcgcttctgatgagccggttgtcgtggcctgtggctgtccatccttacgtactgtgttttgttgatggcgctacaaaccagacaaggtggagtgtgattgaagaaagaaacgctggccggtgcagtggctcactcctgtaatcccagcactttgggaggccgaggcaggcggatcacctgaggtcaggagttcgagatcagcctggccaacatggtgaaaccccgtctctactaaaaatacaaaaaagttaaacgggcggggtggcgcgtgtctgtaatcccagctactggggagtttgaggttggaggatcacttgagcccacgaagtggagattgcagtgagctgagatcgcatcactgcactccagcctgggtgacagagtgagaccctgtctcagaaaaaaataaattatcacaagacaaaatttgtrcttatcaggagttcacagttaagacatatataagcttacttggtgaaattagaaaaagttatcagataaaacattcaggtttaaacactggtgagggtgtgggaatttgtggagccttggaaacacactcattgaatgacctcatctacctggggatgtgaagagggaaatcctgtgattcctccattgtctgacttgatttccttttttccttggctgtggcaacatgttgaagtgctgtgagtcaccaaaagggggaacgtgagcaactctagaaatgccagtgccagtgagttacagacaataaagcattgaccgcctttagctcacccctcatcaagtctgttgaaaacttgtaaaattggacagctagagctaccttgattttttggtttccttttaacagctgactctcttcacaggacagttgggctctacatcaggattgcacccaaaactggaatatcactcctccaggaggaagatatatttgaaaattagaattgtgggcccggtgcagtggctcatgcttgtgatcccagcactttgggaggccgagatgggcggatcacctgaggtcgggagatagagaccagcctgaccaacatggaaaaaccccatctctactaagaaaaaaataataataatacaaaaattagctgggcatggtggygygtgcctgtaatccgagctacttgggaggccgaggcaggagaatcacttgaacctgggaggcagaggttgcgatgagccaagattgtgccactgcattccagcctgggcaacaggagcaaaactgcatctcaaaaaaaaaaaaaagaaagaaagaaaattagaattgtgtatttcactgtaaaatttgaaattcagctttaactccttggaaaggaaagagatgaaaaacttgacctagactgggtgcggtggctcacgcctgtaatcccagcactttgggagaccaaggcgggtggatcacctgaggtcaggagttcgagaccagcctggctaacattgtgaaaccccgtctctactaaaaatamaaaaattagccttgcaaaaagtagcctgtaatcccagctactcgggaggctgagcaaggagaattgcttgaacctgggaggcagaggtttcagtgagccaagatcatgccattgcactccagcctgggcgacaagagcaaaacttcatctcaaagaaaaaaaaattctatcagagtgaacaataagtaggatgctagcacatacctgtaatctcagctacttgggaggctgaggcaggaagttaatacttgatgagcctaagtttttggtgtctttggatgctgcttgtcgatctaaggggtttccaaacgcttcttttttggtaaaattgggattatgactaggaatctgttttttggagtttcccaggtgatccttgtttggggtccttgtctaaggcacaggctggaaagaggagggagtggactggcagggaagatagagcagtaagcgaatagaatacctggggaaagggacgccagaagagtgattgttgtctggtgaactgtgctgtcagtgtgtatgtcagaagccaacaaagtggatattctcttcactcagcttagggaaaaaattaatttttgtttcacagatagattcgtttccttcccaggagtattataggcctaattactgtcatagttctcagtaactttaaaaaggctgtggggaagaatggcataacagactagtatcttgtacccagcctgcctttttcttattctatttttttttttttttttttttttttttttgagacagtcttgctctgtcacccaggctggagtgtggtggcacaatctcagctcactgcaamctccgcctcctgggttcaagcgattctccagcctcagtctcctgagtagctgggattacaggcgtatgccaccatgcctggctaatttttgtatttttagtagagatgaggtttcactatgttggccgggctggtctcctactcctgacctcaggtgatccgtccaccttggcctcccaaagtgctggggttataggcatgagtcgctgcgccyggcttttttattttttattttttatttttttgaaacagagtctggctctttcacccaggctggagtacagtgatctgatctgagctcactgcaatctctgcctctggggttcaagcagttctcctgcctcagccttccaagtaactgggactacaggcatgcaccaccatgcctggctaatttttgtayttttggtagagatggggtttcgccatgttggccacgctggtctccagctcctgacctcaagcgaaccaccctccttggcctcccaaagtgctagtattacaggcgtgagccacagcacccggccttttttttttttttttccttagagtcttgctctgtcaccagggctggagtgcagtggcgccgtctcggctcactgcaacctctgcctcctgggttcaagtgattctccttcctcagcctccctagtagctgggattacaggtgtgtgccaccacacccagttaatttttgtatttttagtagagacggggtttcaccatgctggccaggctggtctcaaactcctgacctcaagtggtccacccacttyggcctcccaattagaattagaggtggagcgaccgtgcccggctaagggcctactattttttttttttttttttgagacagagtttcactcttgtcacccaggctggagtgcagtggtgtgaccttggttcactgcaacttccacctcccaggtttaagcgattctcctgcctcagcctctggagaagctgggattataggcgtytgccaccacgcctggctaattttttgtatttttagtagagacggggtttcaccatgttagtcaggctggtctcaaacttctgatgtcaggtgatccacctacctcggcctcccaaagcattgggattacaggcgtgagccaccgcgcccggccaggcctcgtatttttgcttttgctcatgttttcatgtctgagatagagggcctactattaaagcactgtgctgaggctgcaagaaggtactagtgtgattaaaacaatctggtccgggcgcggtggctcgcacctgtaatcccagcactttgggaggcggaggcgggcggatcacgaggtcaggagatcgagaccatgctggctaacacggtgaaaccccgtctctactaaaaaatacaaaaaaaattagccgggcatggtggcgggcgcctgtagtcccggctactcgggaggctgaggcaggagaatggcgggaacccgggaggcggagcttgcagtaagcagagatcgcgccactgcgctccagcctgggagacagagcgagactccgtctcaaaaaaaaaaaaaaaaagaaaaaaataaaacaatctggcattataatgccatcctgattttagttaatctagttgactggctggcctcataagtagctgtgatgatcataatttttatgcgaaacacctgtcattgagcatacaggtgtactgaaagaattgggtggaacagggtatttgaaatcagaattgttctggaaagtcgggtacataaagctctatctttagcacagttgtctgtattgcacaattaatatttatagaatggtacaccttatgttatctttttatttttccacctaactctctctctagattgaaaggtacttgacgtgcagagcaagatcttatctttctttgtagtcacagtactcaagagggtgataaatgtttgttgatgataatgtaatgtcacctgtccaagtgtagccatcatcttcagtagttacttgatctgctgttgtgtctggcaagactgctatgtgctgctgcagaggagccattgtcaccttgaactatctctgtggcagtctggaggagggcaggagggagaagggaaggaataaatgagcaaagctgagtgtggatagtagtgtttgacggcagatgaaaaagcaaacttggtgaagtgtggcctgggtggtcatctaacttctacctagaagacattaaacctttactctcttctttttatgtaggaaggcagagggaaagtcaggccttcggttggcttggtaatagcaggtatcccagtaattagaaaataacttaaaaaactccattcctctaccatatacttgagaatttgtcaatctcagcaaaattttcaaatgtctgtgttcagtgtcatatttgtcctgctctgtaagactttttgtgtttataaaaaggcaagtggacccagaaggggaaaaatatgctgttctgagaaactagctgctgtaggttatgcttttctgtctttgcttgtggctcttctggttatttgagaaaggcaaaaaaacccaaagtcttttttctactctgttcccacagtcactcaacacaacacttctgataccagatatatgggagttgtttccccatacaccaagcaattctctagtagacacaccggtgcggtgtcctctaagtcagttaaattctgatactctatctggagatagcgtcagatcccaccaattgagggctcagtcccacaaaactgtcccaacttgaggcactagtcacaagtagtaaattgtcacctatacttctgacctactagctataaatcgaaagttctgacaatccctcctcgagtttgattaatctgctagagtgggtcacagaactcaggaaaacactttacttacatttaccaatttactctaaaggatattaagaaggatacagatggctgggcgtgctggttcatgcctgtaatcccagcactttgggaggccaaggagggcagatcacctgaggtcaggagtttgagaccagcctgaccaatgtggtgaaaccccatttctagtaaaaatacaaaaaaattagccgggtgtggtcgtgcatgcctgtagtcccagccactagggaggctgaggcaggaaaatcgcttggaccctgggggcagatgttgcagtgaaatgagatcacgccaccgcactccatccagcctgggcgacagactggaagaaaaaaaaaggatacagatgaatagccagatggaagagatgtatagggtgaggcatgtaggaagaggcatgaagcttctacgccctctctggaactttcgtgtattcagctatcctgaagctaatgcaaaccctggtgtgtgtgtgtgtgtgtgtgtgtgtgtgtgtgtgtgtgtgtgtgtgtgtgtgtgtgtgtttatggaggcttcattacaaaggcataattgaatacgttattggccactggtgatcaactcaacctttagaccttctcccgtcccctgaggttaagggggtagggctgaaagttcccaccctctaatcacatggttggttccccaggcaatcagcccccatctaggagcccaccaagagttacttacttacaacaaaagatgctcctattacccaggaaattccaagggatttaggaaattacaaaagttttaggagctctgtgtcaggaactgaggttaaagaccaatatcagaatgaaggattctcctagtgcccccatctacaaaggttttaggagctctgtgccaggaacctagggtgcagatcaaatatatctataaatctttttgtttgtttgtgttttgagacagagtcttgctgcgacacccaggctggagtgcaatggcgctatctcggctcactgcaacctccgcttcccggattcaagcgattctcctgcctcagcctcccgagtaggtgggactacaggtgtgcgccactatacctggttaatttttgtatttttagtagagacggggtttcaccatattaaccaggctggtcttgaactcctgacctcaagtgatctgcccacctcagcctcctgaagtgctgggattacaggcatgagccgctgcatccagcctcaaatttatctctgtatcttcttctaaattacagtatcacacccgtgcatatgcccaaaaatttttttttttttttttttgagacggagtcttgctctgtcgcccaggctggagtgcagtggtgcgatctcggctcactgcaggctccgcctcccaggttcacgccattctcctgcctcagcctcccgagtagctgggactacaggctcccgccaccatgcccggctaattttttgtatttttagtagagacggggtttcaccgtgttagccaagatggtctcaatctcctgacctcatgatccacccaccttggcctcccaaagtgctgggattacaggcgtgagccactgcacccggcctcatatgcccaaattttaaaggaggcaccacattcaagtccaaatgcctaaaggtagaaggatcaagaaacagtagtatgaggccatttgasaagtatatatagttatccctcagtatctgtggagattagttccaggacccctcaagggtaccaagatccaggatgctcaagtttcttttcttttcttttttttttttttttttgarwcggagtcttgcactgtcacccaggctggagtgcagtggtacgatttcggctcactgcaatctccacctcccgggttcaaatgattctcctgcctcagcctcccgagtagctgggattacaggtgtgcaccaccacgcctggctgatttttgtatttttagtagaggtgaggtttcaccatattggccaggctggtctcgaactcctgacttcaggtgagccgcctgccgcgggctcccaaagtgctggtattacaggcatgagccactgtgcccagcttaagtttcttatataaaatggtgtatagaatttgcatataacctatgcatatcttctgtattctttaaatcatctgtatttataatacccaatacagtgctatgtaaatagttgttatactgtatcgtttaggtaatcatgacaagaaaaaaaatctgtacatgtgtagtacatatgtagccatctgttgttttttttttccctgaagattgattggttgattgagacggcatctcactctgtcaccgaggctggagtgcagtggcgcagtcttggctcactgcaacctccacctcctgggttcaagcgattctcttgccttagcctcccgagtagctgggattacaggtgcctgccacaacccccggctaatttttatatttttagcagattccgggtttcaccatgttggccaggctgatctcgaactcctgaccttaagtgattcacccacctccacgtcccaaagtgctatgattacaggggtgagccaccatgtcaggcctttttctgaatatttttaatctgaggttggttgaatccacwgatgcagagcccatggatatggagggctgactgtactgtattgagcttctaaggtatgcagagtattggcactgaggggatgtgcaaatacaacaacaaaccaagcatagtctttgtttactaggagctggtagtaactgtgggaagacacaaaacagtaaaatcactttgtaaggtttatgagagttttgagaggccagggaagttaaagagtggagaaatggagaaaatgggagaacttgtactgaayccattaggacagaggaggaagggaagagaaggaaggaggccaaagaaagaagaaacccttcttagagcactcagggtcttactgaaaactttacccataaaaagagaatgtcactgatagactccttttagaacagggattgatttttttgtttttgtttttgtttttatttttgtttttgtttttgagagaagtctcgctcttgtcccccaggcttgagtgcaatggcttgatctcggctcactgcaacctctgcctcccgggttcaaacaattctcctacctctgcctcccaggtagctgggattaaggcacctgccaccacgcccggctaatttttgcatttttagtagagacaaggtttcaccatgttggccaggctggtctcgaactcctgacctcaggtgatccacccacctcagcctcccaaagtgctgggattacaggcttgagccaccatgcctggccacaggcaacatttttaaaccatacgattgtcctggagagagaatctgaagccttgctctgattctgaaagggatttgcaaccaaaaaaggataaggattgttctgacaagtaccctttcttcccatcttcaaaagtacacmtctcttaatttgtgtcttcaaacacaaattgtgttcaaaaaaggaagtatttgagtagattaaagacagaaaccctaggacattcctttgtaaacaaacagccttttaccaaacaccaactgtcaagggacttgcctgagtacttgtccaaaggacagcgtgtccccatgtgtaggcagtggtctaatytggttcctaggagaggactgctgaggccacagcaacttaactggctagtgtgggtgaggcagaagtgtttgaagctcaaggtctgtcaaggacagctgattagagtatgtctgtccctaatacagggttagagctcagtaccaatgctggggatgaggtgagttgaagacacagaaactacatggttttttggaaggtcacgaacttttcaaggaactagtgggcaactggaaatgatatgtgaaagagtagagggagctctggccyagctgccagaaaactctgggcaggtcaggtctgggaacagtggctaatccaggcccagcttcccactgttgatttggacatacaggcctaagataagagaccgtgcccagagccactggtcacttagcacaggtagtgggaaatggtagccagcaaatgtttaattgaatatcttatgtctcctagaccacagctgagcaaactaggccaagctcaaggtcctgaggggaatgaggagctgagctcagtcccttttggccccctttctctttccctcctcattttaagtatggaagctcacttatttcctttwtgtattggccatttgtgtagggttttgtttgaaaaagggcttgaggctgggcgtggtggcccacgcctgtaatcccagtactttgggaggccaaagaaagattgcttgagcccaggagttcgagaccaacctgggcaacatagtgagaccctgtctctacaaaaaaattyttaaaattagctagacatggtagtgaatgcctgtagtctcagctgctcgagaggctaagttggaagtatcacctgagcccaggagttgaggctgcagtgagctctgattgacccagtgcacttcagcttgagcaacacagcaagaccctgtctcaaaaaaaaaaaagaagttgggcacagtggctcaggcctgtaatcccagcactttgggaagcctaggtgggcggatcacctgagatcaggagtttgagaccagcctgacctctaaaactacaaaattagccaggcgtagcccagcggctcatacctgtaatcccggcactttgggaggccgaggcgggcggatcacctgaggttgggagtttgagaccagcctgaccaacatggagaaaccccatgtctactaaaaatataaaattgctgggcgcagtggctcacacctgtaatcccagcacgttgggaggccgaggcgggtggatcacaaggtcaggagatcgagaccatcctgtgaatggcgaaaccccgtctccactaaaaatacaaaaaattagctgggcgtggtggcyggcgcctgtagtcccagctccttgggaggctgaggtgggagaatggcgtgaacccgggaggcggaggttgcagtgagctgagaacaccagcctgggagacagagcgagactccgtctcaaaaaaaaaaaaaattagccgggcgcggtggcatatgcctgtaatcccagctactcgggaggcagaggcaggagaactgcttgaacccgggaggcggaggttgcggcgaggggagatcacgccattgcatgccagccttggcaacaagagcgaaactctgtctcaaaaaaaaaaaaaaaaaaaaatgtagccgggtgtggttttgcatgcctgtaatcctagctactcaggaggctgaggcaggagaatcacttgaacccgggaggcagaggttgcagtgagctcagaccgtgccattgcactccattgtttcgctgcaacgagarggaaactccatctcaaaaaaaaaaaaaaaaaaaacaggcttgagtatacctctcacagccctggagaatgcctgagctgttggacagttgccttttccattatgtctgcttttttctaaagctattcattcattgttgcctaatcatgtcctcagtcagtagttgatgttctgggctatttgaatttcctctgaataatgattaatggagataatgatgtttgaccagttctgggaactcttgggaattaaaggaattaaactcttggacattaaacttcactttaatgtgtatagttgtgggtgctgccccattggagaagattgtgacaggaagttacacagttttacagcaaactgctgggattttttatttttttttcagtaaattatgataactgtagcattttcctttgcaataatgataacctaaggccttggtgtttcctctaaaatgtacatagatacaggatgtgggtttgttacaaagttgtataactattgcctttttgtggctgaccccttccctagagaacaacatgaagagaccttgctgctgctatgaaacccagactctaaggacaacttgggggacattggatattttttcacagatgtagacatcaaggagtcagtggtttgtgtatgcgttgagtggagaaggctggcaagcatttgctaccatgactgttaaaaatgtgcctgtacatttctttttttttttttttttgagacaggatctcactctgtcacccaggctggagtgcagtggtgtgtttttggctcagtacaacctccaccattgtgggctcaagcaatcctcctgcctaggactcctgagtagctgggatgacaggcatgtgccaccacgcccarctaatttttgtagtttttttgtagagacagggtttttgccwtgttgcccaggctggtatacatttctttatataaggagggggcaagtaacacagtgttatgctaccaatcaggctttcagagaccataaaacaaaatctaaaaggtacgctcttagtagtcatatctgtggaatgtaaggaagccagtttaagaccaatgtaatgcagcattttcccttcacacatgaaacagtgagttactcgagcacaaagcatcaaatgcttattccccccacaaggccattcttatctttcaccaagtgtttagtcactaggcagccatcatcctccctccctctctcccttcctcccttactttcttcctttcttccttttgcagtggcacagtcatgggctcaagtgatccgcctcagcctcgcgagtagctgggaccacaagcactcaccaccacatccagctagttttattttatttttaaaaattttttgaaacagagtcctgctgtgtcacataggctggagtgcagtggcacggtcttggctcactgcagccgccacccccagggtcaagtgatactcctacctcagcctcccaggtagctgggactacaggcatgtgccaccatgcttggctaagttttgtattttttgtagagatggggtttcaccatgttgcccaggctggtctggaactcctgtactcaagctatccacctgccttggcctcccaaggcgctgggattacaggtgtgagccattgcgccgagcctcatccagctaattttataatttttggggggaggtagcaacagagatctccatatgttacccaggctggtctsaaactcctggcctcagtgatcctcctgcytcagcctcccaaagtgttgggattacaggcgtgagccaccgcgcccagcccattattcttatatctgagattcacctttaattgccctctgtcatcagcactttgagaatgcctcaattttgagaataccttgtattctggaaatcattcattcagtcaacaaaccctgactggtgtgtaattgggcagtaggaggccaagataaatgacctgtaatctggaaaacaaacatataaacatacacataccataacgagatatgagtgctaggatggatcacaaaaggcttacttaggtagctctgaatataatatcaggcctacaatattatcacttatgttgttttttggatcttatttttagaarcagcacaagctttttcttggaggaaatatagcaaggaagaggggagctgttctgactgaagcagggtatgggaggcccacagcctttcctgctttgcctcctgttcaaagccatcctccctgcagttcactgagaaatgactccttggagctccaaggaagtcctacagctagctagtagcagacctggtagtagaagttagttcttctgattcttagctttcttagcagtcaggtaccagactgataaacgaaaatcaaatttctcccagttatatgttccatcccacaaagaagtaataaacacatttctgtcaggggcttcagcctgcctggatttgttactgggtttgttttaaatgtttagcttccaggcatccaaatacatacaaaaaaggtctattcccaggaacatactgtaacccttttcattgtcatttgtgggcagtgccaagctgcctctaatagcttcttctgtttttttggtggaaattcagtttcctcagaaatctatataagggatatttgataaaggtgactaacaatctcgtctctgtaaattgatgaagggatgagaggggtattagactcatgtcctcttttgaatgcacactgcttttgtggtccggcagggtttctcagcgttagtgctgttgacrttttgggctagattgtttgtggtggtggggtatgtgtgtgtgtgtgtgcgtgcgtgcaagcacatttgtgcgctataggacattgagtagtatccctgacctctacccactattgtcagtagcacactcccgtctttcagttgtgacaactaaatatgtctgcaaacatttccacgtctccaaacatgttccttgggggacaagttggcccccagtggagaaacactggattggagattggttgtcatgtgataaaaatgcaaatcagatttgtcacaggacaaagtaaattttcagttacctaattaaacctttactttttataagtcgctctaaagaaacaaaagtgtgtcctgtcttccatcctgattctcggttactggagggcccttcacctaagtcatgttcaggatctccttgaaggagttaaactaaaacaatacaatatcttcccttaggtcttttgcagaatttattttgctaggccgggcactatggcccactcctgtaatcctggcactttgggaggccaaggcggctggatcacttgagttcaggagttcaacactcgcctgggcaacatggtgaaaccccatctctacaaaaaataccaaaaaattagctgggcatggtgttgcatgcctgtagtcccaggtacttggggggctgaggtgggaggatcacttgagctcaggaggtcaaggctgcagtgggccgagattatgccactgcgctccagcctgggtgacaaagtgagactctgtctcaaaaaatatatatattttgctagaaatcccaagatttttctctcttttctttttgtttattttctttctttttttgagatggaatctcactctgtcactcaggctggagtgctgtggcatgatctcggctcactgcaacctccacctcccaggttctgagaagctaggactataggcgtatgccatcacatctggctagtttttgtatttttagtagacgcagggttttaccatatttgccaggctggtctcgagctcctgaccttgtgatycacctgccttggcctcccaaagtactgagattacaggtgtgagccactgtgcctaacccccatatactttcaaacaaaaaatggaaatatcactgtctccatgaaaagccatacaggcagcatcaaaactacactaggggccaggtgtggtgcctcctgactgtaatcccaacaatgggagggtgataggattccttgaggctaggagttcgagaccagcctgggcaatatagtgagaccctatgtctacaaaatactttttaaaattagcatagtggtgcgcacatgtagtcctagctacttggaaggatgaattgggaggatcgcctgatcccaggaggtagagactgcagtgagctaatatctcaccactgcactccagacacagtaaaaccctgtctctaaaaaaaaaaaattaaataaataaataaatggtttacactgagggtcacagactttgagttgaggttcgtcatgaagaatctccattttcattctaatagcactagatacaggctgggtgtggtggctcacagctataatcccagcactttgggaggccgaggtgggcagatcacgaggtcaagagatcgagaccatcctggcgaacatgctgaaaccccatctctactaaaaatacaaaaaattagctggatgtggtggcacgtgcctgtaatccctactactcgggagtctgaggcaggaaaatcccttgaacccaggaggcagagattgcggtgatccaagatcacgccactgcactccagcctggcgacagagtgagactctgtctcaaaaacaaaacaacaacaacaacaaaaaacacaaaaaaggctgggcacagtggctcaccttgtaattccaacactttgggaggccgaggcgggcggatcacttgaggtcagcagtttgagaccagcctgggcaacatgggaataccctggctctactaaaaatacaaaaattaattgggtgtgttggcacatgcctgtagccccagctactcagaaggctgaggcacaggaattgcttgaacccaggagtggggagaaaaaggaaatattaggggacatttgttaagtttatatttttttcttttctcttctttttcctctttttttgagacagagtctcgctctgtggcccaggctggaagctggaattcagtagttcagtcatagctcactgccgcctttacctcctaggctcaagtgatcttcccacctaagcctcctaagtggatgtgaccacaactgcatgccactccctccacccccgtctgcctaccagctaattcaaaaaaatttttttttgtagagatggggtctccctgtgttgcccaggtcagtctcaaactcctaggctcaagcaatcctcctgccttggcttctcaaagtgctgggattacagacatgagccactgggctcagccattaattttaaattgcaagtgacatattctttagtttattaatcagcaccatatgatgtcacagttttataactcatttatctcatttaattctcatacccaccttgtggaattgttatcactgtcctttacagatgaagaaagaaactccaagaaattaagtagctggcccaagtccacccaactgggatgggcagaaccagggtttgctcttggttgtgcctttctacagcctgtgccttaaccacatctatgtgctgcctcttggcctctgtgtggccagtagattctctcatggctaggctcatcttaattaacatttgttgggtgcctactatggctcaggctctagagatcattgtaaaatccagtccactgccccagctcctcgtgtgtcttttgaacacattagtattgtgctgtgcagaaaggacttctgtgcatatgcctgctattacacttgttgaacccaatttctacaaactttcattcagatggagggattcagtcttcttatcatataatacatacagaaatacaaatatttaaatatttatctaaattaatagtcacatatgccatttatacagttagtgagttacagccaagtgacagttgtgatgggaggctgtgtctggggagttacatactggtgaggaaactagaaaacatggctgtcgggccggcactgtggctcacgcctgtaatcccagcactttgggaggccgaggcgggtggatcacgaggtcaggagatcgagaccatcctggctaacacggtgaaaccccgtatctactaaaaatacaaaaaattagcggggcgtggtggtgggcgcctgtagtctcagctactcaggaggctgaggcaggagaatggcatgaacccgggaggtggagcttgcagtgagccgagatagcaccactgcactccagtctgggcgacagagtgagactctgccacaaaaaaaaaaaaaaagaaaacaaggctatgaaaatttaacacattgactgggcagggtaatgcatggtgatctgttttctcttcgctccaatcctgaaaggtttctttgaagagctggagtgtctagaaagctttcctagaaagctagtgtacattttgctaagtaatcactgtgtcacttagattttytgctctttaagtgtggttatgagatgtgttccaaacaatttgttactaaccatgaagttgatgaatgctttgcctttaaaaaaataagtttgggtggggtgcagtggctcatgcttgtattcccagcattttgggaggctgaggcaggcagatcgcttgagtccaggagtttgagaccagcctggacaacatggtgaaaccctgtctttactaaaaatacaaaaattagccaggtgtggtggcgtgtgcctgtagtcccagctgctttgggggctgaagcaggaggatcacttgagcctgggaaatccaggctgcagtgagctatgatcacaccactgcactccagcctgcgtgaaaaagtgagactgtctaaaaaaaaaaagtttggccaggcatggtggttcatacctgtaatcacagcactttgggaggccaaagtgggaggattgttgaggctaggaggtcaagaccagtctcggtttgattgggttaaacattatccctgtaagttggctctcattctgagaagttgtttagagtagaagagagggctgcatttacagctaattgctagtaatttcacatcatctgcaatatattttctggacactctgcccgactagtcctatgggacgttgtcattcatgtgcaaatcaggccctatatactaagggaggaaaacagttgaggacctcctttttttaggcactcttggtgccttgtgcattaagatagtgagtcagaggataagaaggaagcagattccattccccttaccactctttgggtgtaggcagggcctgctggtagtgctgggaaagccgaccatccttctttgagcaagtccaatagctgctgctgctagttctgtcccaccataggcacagtctatgtaggatgagccaaccatatgtggagttactggttcttggtctgggcttgttcctttccccaatttcagtccccaccagaatctgggcagtcattgtgaagaagcctaggaataataccttactctataggcctgtggaaacgtgtaaagataccttgcaggcccagagtgagaaattggagccaccttgttcgattgaccaaaggcttgtcctatggagttactaattttacaggaagtttatgttaacatactttctatccattgcactaccatttctgaggcacaatatatttcagtaggcagaaagatagaactgcttagattttaaatactcaatacatgcttgacacagtttagtctatttctcttcagttactatggcagtgggtgctatagagatgtgcagaccctattgtgacctccctttggtatagggatgctctggagcccctggcttcattgtccactaaggtctggcaggtctgattgcctcttttcaggcactgagtggtggggtatgccatcctcccctgctggaaccagccttggcctgccctgttagtcatcaaaaatagatctcaccagggaacaatcttctcaggttgttgtgtaatttgagtgagccaaggtgagtgttttagggacaagcagcatcaacttcggaatcttcaactgggcctgagcacttatttctcagaaataatagaatcttgctcacttttctttcttttttttttttttttagatggagtctcgctctgttgcccaggctggagtgcagtggatcagtctagctcattgcagcctccacctcctgggttcaagagattctcctgcctcagcctcctgtgtagctgggattacaggtgtgcgccaccacgcctggctaataattctatttttagtagagttggggtctcaccatgttggccaggctgctctcgaactcctgacctcaagtgatctgcccgcctcggcctcccaaagagctgggattataggtgtgagtcaccatgcctggcctcttgctcacttttcatactaaaacaacaaattacaggctgtagtttaacctctctactgcatgcataaatgcagtgtggtacgagtgcctctgtagcccataacttcagtttccttgttgctagcagtctgtggtgacactatactaatctcacatgcagsaaccaatgaggattagccagggacacaggaggagtcaccttgcattcagaatgactcaagtttagtctcaacttgaccattagctctctgagtgatcttgcccatgttaattctcttgatcttagtttcttcagagccagtgagacattgcttgaaagtgacttagcctggtatacccaggtctgtcagacttatagtctggtgctctcttgggtgaacttgagggccttctgccaaggcaggaatggcttcttttaaaaaaaaattattttattattatttttttttttgtagagacggggggtctcactatgtttcctaggctggtctcaaactcctggactcaagtgatccttcagcctcggcctcccaaagtacagagattataggtgtgagctaccagtaccagcctccaggaatggcttctaaggcttcaggctgtttatagagaggaaagcacctgggagctgatggcactctcaggtttcccaaaatgacagttctgcatatgcatcttaatcacctactttttttccctccacccccaaatgctattcacagtccttgtttatgatagaagctgaagcttacaggtgacaatttttgtgcctgtatgaaaggaaacatgactgactccacttatccacacgacacctgctttcaaggttgttcagtgttggaataatttttgcttgatggtaacctagggatgacccaaggtttcattagttaaagccagccctgtgggatgcatgaagtctagcctctgtccctgtaaaaatcccaccagaaccattttagaattcactcaggacttcacccctcccgctcctggtgctgcttatggaactaaagaatcctcatcttctcagccctgggacacattgtcctcatataaagcgaggtggcaatcagggaacaggggcgagtcttgtgcttatttcagttataataggaaggctctaccaggactcatcattgtcccaacaatagtcgattccaggccccttctttgaactcatttcagtgtctcaggttctgtccttggtgtctgtcttcactgcttgctcagttgtatttgaacatggctagagatgagcacacttctcttctccagtaaaaaagcctgcaagaaaagtcttggacttcttgaactgctattcagttgtcttttttattcaatgtattttttgagatggagggggtctcactttgttgcccaggatggtgttgaactcctggccacaagtgatccttctgcctcagagttccaaagtgcagagattacaggcttgagctaccacaaccggtctcttgtcagtttttgaggttacttaagaggttaatgcctttaaattagtttgcagttgttttgcttttgcctgccttcttgcccaaatgcgcaagtgcttatttagtaatctgactcaagtgctttgtgtccccagagtccccacttttccaggattcattgtcttttttttttttttttttttttttgagacacagtcttgctctgttgtgcaggctggagcgcagtggcactgtcggctcactgcaacctccacctcctaggttccagaaattctcgtgcctcagcctcccaagtatttgggattagagtcacacaccaccacacctggctaatttttttatatttttagtagagatggggttttgccatgttggccaggctggtcttgaatgcctgacctcaggtgatctacccgctcggcctcccaaagtgctgggattacagacatgagccaccacacccggctggattcagtcttaacttgctctttttttttttttgcatctcactcccttgccaggctggagtgcaacggtgtgatcatagttcactgcatccttgaactcctggggtcaaaagatcctcttgccccagtttcccgagtggttgggactacaggtgtgtgtcaccacgcctggctaattattttatttttcgtagagacaaggtctgactgtgttgcccaggctagtcttgagctcctaggcttaggtgatcctcccaccttggcctcccaaagtgtcaggattataggtgtgagccactgcacccagcctggatttgctcttttatcaagaggttaatatttattcttccgttcagtgaaccgtgggattgaattcccccagcgattgaaatgaaagggcttatgtataacatttcctgaggaatggtagtaccagagttcagaggagacctcaggccatttattctataaactcagaagctgtagttctagatgatgtggcttcttcagggtgttgagaagtctctgttatctcgtgccttgttggattagaactgattgagctctgtctgctgccccaaacatgtggctcagccaatctccagtggcatctgcaatgtgggtattctagcctccagtgctcacgtggctcaccttagaaagggcagatattcctatttcctgacgctgctggagaatgaggtctgagtcagaagtcctcaggtgtgacctgcccagaactatctgaaattgctggatttcttgttcttcctcagtgtttaacaatcacccaattgctcattctcaccagcgacttcctcagtaagagctcaatatttgaggtggtgctgcattttgtsaaacattcatgcgtgttagcccacttagtcttcgcagcacacagtggattaatggatttttaaaagctggtatttatgcacgatggaatactactcaaccataaacaagaaggaaattctgtcatttgtgactacatggatgcatctagaggacattatgctaagtgaagtaagccaaagaaagaaagacaaatggtgcatgatatcacttatatgtgaaatctgaaaaagtcagttatagaaggagagtgtaacatgttggttaccagcggctgggggaagggaagggtgggtgtggaaaggggagatgttgatcaaagggtacaaaatttcagttaggagaaataaggtctgatsatctgccttacagcatggtgactatagttaatatrgttaatattataatagtattgtatacttcaaaattggtaaaagagtggattttaaaagttgtcaccacaaagaaatgataagcatgtgagctgatggatatgttaataaccctgatttaattattccccaatgtatacatgtgtccaaacatcacactgtaccccataaatataattgtcagttaaaaacttaggagtcaagtcagatctgaagagaagtcaaaacagatttcatacagttaatttagagacatgggacccaattaaaaatttgtattactttacttggtattttagaatttagctgttattttcttgttacacacacaggcacaggcacacaaatcctctatttaactggctttctcagtaggaactccatctgtgtatttgcaacagctgtaactcaggttggatgctccccagggtgctggcctataagtcatattggaccctgatctgaatctgagggaatctggatctctcttgtaggaagcttttggtttaactgggaagacaggatgacagtcagttgtggaagctgaagcgtaatcacctcatattaatatggtggcaattttatatcggagtgagctctgagctgcaaacagccttctaggaagcaggcaggggacccccatccagggtgatggtaagaatcctgatgcccaactgcaaggtgttcagcagggagggagcactcgtggagtcccagtgcagaagtctctgagcagccacttagcctccctgtgtttgtggggtaacaacccgagttcatgttgtgggcatctcatgcagtgtagtagctggtcactgtcaagtgtcactatttcaytgagtcagaagcctgcagaattgttctcattccagggagtgagtcagtctgctgttgcttactctcggtgctggctgagctcagcaacctgctctcttccttcagttcaggtttctccagggcaaagaagtctttattgttcctttctgtatgaccagatgggaamtgaattataatatagtccttagattatattcccacctggtagcaatgcactgagttacctgacctgaaatttgttggacttagtctccatggaggaggatttaccatcttcgttgtctcagaagtcctggtagtgcctcatgccagcaatttagcaggagcaaaagctttgagacagtgttctggatctgctgagctggtctaaaggaacctcttttgcttgaagtaactgtgataggaactttgttactgcttctgttagctcaggtgttggaatgagaatcagcagctgatgaggtgaacagctaggagtactggaattatggagtagtggaggtagattttataaacagagggtcccagttttttggaaatgggaaagagagagggtagactggcctttctagaatttgtaacagaaaagaggacccaggagcttccattgactagttagttaatgcagtgcgggatcttagctggtttgcttggtccaattcctgtctctcggtttcttttttcccttcccttcgctgccttcccctccctcttccctttttctttccaagagaattgagtcactccatataaaagaagcagccagttggctaaaaagtccaacaaaaaacaagtatttatagctctccaaatttcccacttgtcattatcagtatacttttgcacacagttatagtcggtgtttgggatcctttttaaaaaaataaaaagtttctgtaggcttttccatgcatgaacacagcttatcaacttgccccggctgtgccaggattccattgttgactgttgtttgagcagtcatgccctttgttcttaggctgtgtgttgtttttttcctaacatcatagtatggctgggtattattttgatasagattacaattactattactatttcttgaagtgtatttcccagagtggaatattttaggatctttttttctcttttgtgggggtggggaacatgtagcttcttgtggatattagacattgaagtctaaaaaggttctatatttatgatttggccctcaattttctagagattccaatggttcctgcaaagaaaagagcattcaagtatagaaaccagccagactaagtctggacatgtagcttttcagaaagtgaaaaaaaattatgtttctgcagttgcaaggtggcctctgaatgccacactgtgtggccactcccttggacagtggctaggccacagggtcgcctcccctggccccagtctgtgggttgaatatgctaaccgagccttcccaggagcctcctctgcccccagcccccaggtctgtacagatggtagttggtactttcagcccgccttgagaactcagtattcttcctgttagctttccttcaaagtaaaatcggtagaacctattttgagtgtagaaaatttgaagtcgtggacagcagattacaaaaaattgcccaccaccatgcctggctcatttttgtatttctagtagagatgggctttcaccatgttggccaggctggtctcgaactgctgacctcaggtgatctgcccacctcggcctccctaaatgctgggattataggtgcgaaccactgtgcctggctcctttttgtatttttcggagaagcacaaggacttgttgtttaattaagcaagactatactctcccagagcatgcagttattattgagtaaaacacagttaatgagatttaatcacgttccctatcactgttgtgcagcatgataagtaggtgcaaatggcaagaagcacgctgaagttactgcagttggtaacctgggccatggatggcacttgtctttgcctcattttgcctgtaagaagcatggggcctgtggtcctggggtacctggaccctcagcctggtgtgtgtgtgccctcagcctggtcctttacttccatcacccatctagaggctccaggaccctttactgcacccctccctcctctagatagctcagtgttttcatcccagcacctttttctctgctgcctgagaactgagcagccagagacaaattttggctctcagggtcctcaagggtgtacagcaaagctgttcttattatttaaagtattttatttatttatttttgagacagagtcttactttgtcggccaggctggagtgcagtggcatgatctcgactcactgcaacctctgtctcccaggctcaagaaatcctcctacatcagcctcccaagtagctgggattacaggctggagtgcagtggctccatctcggctcactgcaacctccgcctcccaggttcaagcgattctcctgcctcagcctcctgagtagctgggattacaggtgtgtgccaccatgcctggctaatttttgtatttttagtagagacagggttttaccatgttggccaggccggtctcggactcctgacctcctgatctgcccacctcggcctcccaaagtgttgggattacaggcgtgagccaccgcgcccggctagcaaagctgtacttttaccaaaaaaaaaaaagaaaacatttataaatcaaggtctgaaggcccatgtgaggcttattctacagcttgcaatgcctgtttttgccccttggtaagtggacgcacagctgggcagccttatgctatctctgtgaactacccatttctggctttgttcataatattcccttgatctggaggccctcccccagccctgccccaaatcctgtctgtgttgagggtcctgccccaggaagccctctgcatactcttccctgcatgtaatacctgcctgctttcacattcttctagactgtgctgtgcatcgtacagttcatcagcattattgcagagtagagtgtctctgatttggagtcaagagaaggttccatttttctgtacatcccgatgtttattttctgagtgttctcagacatcactaagcctcagtcaaaataaagtatgatcatgatgtaacattcattgagtgcttatcacatggtaggcattgtgctatatgagttattgcttgacttcctaaaataatcccagtagagatgctaaatctaaaggtgagagagatggttcaaaaagacctcagtgagcaaaccatgtactataatatcctaaaagataacaaaaatgtaactaggtatctagagaaaactcaggaaggatatgtgccttgggccttttaaggaccatttcttaacacttctgtgttcttcttgacacctgtttctgggtagagcacatagaaaatgctcagtaaataagttctttttccttggcccagtttggcctgatttggccccagttctgtctttgtgagttactttattagttgtcggtgctactgtgctgctattcatgtggaagattccccaaatgggctgcgccttacattgcctgagcagaagccccgagggatggaggatgagcttgccttgttatgggactgtgtttccctggctgacaaaggctcagcatttgcagcaggcaatgggaattgattggccaacttaatatttccttcagcctagcaaagtcctgagtaggctagggacagtctgcttttttggtaactcctgtaggctgccttctgcacaaggcacccagcctctcacaggtaggatgaactggcctcagcacgcttgcagaggggtggaactgtgcgttgcttgccaagctttttgtttccctaaggtttttgaggttttctttgtttttggtaactttcaatttttttttttttttttttttttggacagagtttcactcttattgcccaggctggagtgcagtggcgcgatcttggctcactgcaacttctgcttcgtaggttcaagtgattctcctgcctcagcctcctgagtagctgggattacaggcacgcgccaccacatccggctaattttgcatttttagtagaaacagggtttctccatgttggtcaggctggtcttaaactcctaacctcaggtgatccacccaccttggcctcccaaagtggtgggattacaggcatgagccaccgtgtctggcctaacttttaattttgatacggtcttttttttttttttttttttttttttaagacagtttcgctcttgttgcccaggctggagtgcaacggcgtgatctyggctcactgcaacctctgcctcctgggctcaagagattctcctgcctgagcctcccgagtagctgggattacaagtgtgcaccaccatgcccggctattttttgtatttttagtagagacagggtttcaccatgttaaccaggctagtctcaaactccagtctgcctcggcctcccaaagtgctgggattacaggcatgagccactgtgccctgccttgatacagttttaagcatacagaaaaatggtaagaatagtacaaagaactctcatacctcttccccagattcactgctaggattttgccttgtttgcttttctgacttgccagtgtcccccaccctgcagcatatgcacatgcacacacactgtcttctgaaccatctgacagggagttgcaggcagtgtacctttacttctgaataccccagtgtgtatttcttaggaacaaagacattctcttatataatcgcagtacaattatttttaaaaaccagcaagcttaatgtcaatacaatgctattacctaatacattgttcatattcagattttttccatattccactatggtcccagtaatggcagagctttattttaaagaaaacaatcctggggtgtgtgggtgtcaccttggttacattcgctctgaggaaagcagaaccgacaggtatttggggaagtgactgccgtgggtgccacatcaccagctccttgtgtctctgcaggaccagaggagcgagagcagcaagaaccacacccagcagcaatgtcagcggaagtggaaacctcagagggggtagacgagtcagaaaaaaagaactctggggccctagaaaaggagaaccaaatgaggtgagcgatgggggctggctgcactgaatcaggtgggcccagcacctgtcgtgctcagcacacctggttttgtctgttggcagcactggggagtggccatgggccatgagctctggacccctgggtgcctgcttggccctgcagggaccgcatacagcttcggctgcttagaactctccccactggtccattgtctcatccaaggaggcagggcaggtgctcctgggagtgctgataggatttgatggtagttatccttttttctttttaaaaacttgtgcgtttcctcatctgggctgagaaagggtaaacgcaggcaaagctggctctgttcagtcttttaccacataaaasactgcagggcagcctttccttactctgtatagggacagctcatgctaaacctgagcttccaggccctgttctgcatcattagcctctcatagccctgtcattggccaagttttttttttatcccttgaaataattgctaataataaattgattctcagcacatggatgataacgagctaatctcctaaagaagacagcagaagccagaccatgataaggccaaatttttctcactcttgtagatggattgtgtggacacatgtaagcccctgcccaagtaccaccatctttaggatcacatgttttctaccttgtccatccatccacacacctttacaactgtgtaatttcgttaagcagcacaaacccagcgtcctggccctagcctctcggttgtctcctttgcatccttccgtgcttggtcctagtcacatatagtctcaaagaagctgtgggtccaaggtgggaggaaggcagtagggccatctgaggagacccatggtcacagccttactgaggtgtgtgaattccagaagacacgttccaaggcaggctgttcttagagaagccagcaaatactgaagggaatacagatgtgtgtctcttcgaccactaggtggccacagaagcaaagcattgctcatttgggtggttcccaacacagacacatggacgtgggtactactctcaaggagcaggccacagttatcccttgtgtmctgagtccttggagcagaatgtcatgtctgcttgtcctgtgttccctgacaagttgctgctatttgtgttggagtgaagtgtctgagaagccccagcctccagtacaacaggtggtcaccttggggtgtggactcaatcttctctctrtggtcctttctggaaagctgggaagggctaattgacacacaaacacctcccatctctccacagaatggctgacctctcrgagctcctgaaggaagggaccaaggaagcacacgaccgggcagaaaacacccagtttgtcaaggacttcttgaaaggcaacattaagaaggagctgtttaaggtttgtgccccgcattgggttccagactgtcatatggggttggggtgggggccttggtcccatgagaaaagtgcccctggagccactctgagggaaaagctgggcttttctccacactccattccttcttgacgttaagctctggctctcggctgggtacagtggctcatgtctgtaatcccagcactttgggaggccgaggcaggtggatcacttgaggccaggagtttgagaccagcctggccaacatggtgaaaccctgtctctactaagaatacaaaaattagccgggtgtggtggcgcgtgcctgtactcccagctacttgggaggctgaggtgggagagtcacttgaacctgggaggcggaggttacagtgagccgagatcgtcccactgtactccagcctgggtgacagagcgagactctttaccccgccaaaaaaaaaaaaaattggttctcatggcttagatagaataacatagtggtgtgaaggaagcaaaagtatgcgtgttccaaagacttcaccatgccattcctttaagaaacaaaagcttccttgtgtgttaaataattcactacataaaaatggaccataggattgggtctttggggttgggggttgtcacttgagcctctgcatccagctgctcggatgtggtgtgctcaggcatagctggcctcctcctgtcacctccacagctggccaccacggcactttacttcacatactcagccctcgaggaggaaatggagcgcaacaaggaccatccagcctttgcccctttgtacttccccatggagctrcaccggaaggaggcgctgaccaaggacatggagtatttctttggtgaaaactgggaggagcaggtgcagtgccccaaggctgcccagaagtacgtggagcggatccactacatagggcagaacgagccggagctactggtggcccatgcatacacccgctacatgggggatctctcggggggccaggtgctgaagaaggtggcccagcgagcactgaaactccccagcacaggggaagggacccarttctacctgtttgagaatgtggacaatgcccagcagttcaagcagctctaccgggccaggatgaacgccctggacctgaacatgaagaccaaagagaggatcgtggaggaggccaacaaggcttttgagtataacatgcaggtactattgggggctgccagctgctagggctgaagagggaaactttgacagtggtagcagatccatagtggcccatgaaggcacacatggcattaggacagatgagctgcagggtgccgagaggaaggtggccaccagattggccaccagagcttgtgggcccagtgggtggttcccagcatggaggcctggtgtgatagatgccagtgggtagtgttttgggaagggtgagtcctctcgcacatagaggggtctggaagaatggagctggcttcctccctcattgcaggatgctggtcttgaagaatggttaattttcttttcaagttttgctctgagaagccctgctttataagttaatagagagccagtgccaccaaggagagtaaataagctctgtttacaagtarcctttagatgaggctgaacctggggaagcttactctgtccccaggtcctgtcagcttccactgaggcctcccagggcactcaggatgagtatgccctgccacagtctcattctcccatgttccaggttttctgttgcttcttgataaaaaaataaccagcacctagaaatggggatgtactcatgccctcctgtctgtgctgtggtagtttcagtggcttgagccacctcagagaaggctacatctctggtcagttcccaggggagacccagcatttggcagccttcttggggtaccaatatccacacctccccagagctcttgctagggagggaagaccatcaggcagtgcagctgccgcccaccagtgctgcttgctgtgtagttggcacacctgagcaagctcacctgctccagctcactctctctggagggcgtcctctaaaaggagagtgtagccaggcgcagtagctcatgcctgtaatcccagcactttgggaggctgaggcaggggcattacttgaccccaggagttgaagaccagcctgggcaaccaaggtgagacaccatctccccacaaaatttaaaaattagccaggtatggtggtacacacacgtaggaggataaggtgggaggaccacttgagcctaggagtttgaggctgcagtgagttagccatgttcataacactgcactctagcctgggcaacagagacctcatctcaaaagacatttaaaaaaaaaaaaaaagtatgggcagcccaaagatggctcagtcgatcctctgctcctgcagatattcaatgaactggaccaggccggctccacactggccagagagaccttggaggatgggttccctgtacacgatgggaaaggagayatgcgtaaatgccctttctacgctgctgaacaagacaaaggtaggtctgtgtgtcctgagctcccctcctggggcaggtgtagcaggagactccactgatgccatgtctcctattggtgctgccacacaggtgccctggagggcagcagctgtcccttccgaacagctatggctgtgctgaggaagcccagcctccagttcatcctggccgctggtgtggccctagctgctggactcttggcctggtactacatgtgaagcacccatcatgccacaccggtaccctcctcccgactgaccactggcctacccctttctccagccctgactaaactaccacctcaggtgactttttaaaaaatgctgggtttaagaaaggcaaccaataaaagccagatgctagagcctctgcctgacagcatcctctctatgggccatattccgcactgggcacaggccgtcaccctgggagcagtcggcacagtgcagcaagcctggcccccgacccagctctactccaggcttccacacttctgggccctaggctgcttccggtagtccctgtttttgcagtacatgggtgactatctcccctgttggaggtgagtggcctgtaagtccaagctgtgcgagggggccttgctggatgctgctgtacaacttctgggcctctcttggaccctgggagtgagggtgggtgtgggtggaagcctcagaggccttgggagctcatccctctcacccagaatccctctaaccccttgggtgcggtttgctcagccccagcttatctcctcctccrcgctgtgtaaatgctccagcactcaataaagtgggctttgcaagctacctccttccctgcctcctggcaccgggtgggtcaagccacctccccataggagagtccctcagaagcaagggcatgttatgtctgtgtggggagtggacatcgtccatcatggctcccagcagccacctcctgctctgggtctactctccagcacctctagtctccaaagcaaagtcactctaaccgtcttgcaaagatctttaaagtgtatccagcactgctattttttagctcagaaataccttagaggtttcctacttaaaaggtttttttaaaawatatatatatatttaaaaataagggttttaaaaaagcacatatttgtatttaaacaattcattctctaaaagagaaacatgaacttaaataattttattaataggaatctactacctgtaaaagttttatttcaaaaagggttaaaaagtagggaaactctttaaactactgaccaagactgccaccttcataattcagatgagttagtgcagagatggccagggccagaggtcgcccagaacctgcgtgtgcagactgcgctctgttagtcttctgcctgtcagcctcagcccagtctgtgttgcttaagggtgcgcctccccagggctggatgatgctgtgctcaagcctgcgggtaggagggctccagcttgcagatcccatgcgtggatgccatatatagatggttgaaaccagcatcagaggaaggaaggtgaccttacagccactgccgagaccaacgtgtgccctggcccagtcacagctggaaatcccagggctggtctacacccgactctggtttggtttaattaggtccttacgtgttggtgttgtcccaggcagttggcatggcatcagcactgagggtgtgagaccctgaggactcagcctcccgtcctgccagtagactgcctgcagccccaccctctttccctcaaaaaagaaggaagccaggcaagagagcagaggcccagggcgggggagtgaaagggccaatttaatgagaaactacaaactgagactgggccacgattcacagtgacaggaggccatgcagtggcagtgcgagaccaggaaggacagtggcaggatacagtggtccaggtgagcaagttcacaaaccattcaggaaataaagacagggcgaggctggtgtccaccaaggcagttctaccacttgtggctgctccttcctcgtccctagcccagtgtgcctgcaggagcaggtgtgagcaggcacagcaacagcctgtcagctggggtgaggggcccggcacttacagggaagaaaatccatggagaaggctctgcacatccaagcgcacccacaagggggaccctctgccatctcttgcccagttgggatacaccagccaccaggcagaggtcatacccacacgcagtgaggacacagggcagacgggaaggggctaggctcaggggctccttccggccccagcaatacagggttcacagaggcatggcctgaaagggggtctgcacactgactcaaagggacaagttccttcttagctaccagggtctgatcattcacccaggtacagtgtcctctctacctgacaccaggcagctctcgggcactgggacagggtattagacatcctgggcttctatacctgagagttctgagggccagagttggcagttttacttccagccaccatgccccacctctagcaccccagaggcgcaaagtacccagaaacaaacccaggctttgtgaccctgtcctacgtgggcccacctgactccagacaacttacccattctcggcccagcaggtcagaaacgcctgtggccacaggcctggggactaactggctaactgctctggctgctgttggtcccagggggaaagagtctggactgaacctgtaccttgtttggaaacagaggcatcaggaccccagcaggagacccctcccagcttatcttcccgatcacacacaccaagcagaccaacaacacacaagctcattgtcagccccctgccacccactgacccttggccttaaatcccaacagaatttttgccagaagagtcagcggctcaggtagggcagggtgaagaggacaggacttctaggggatggtggcacggctcccagccccaagtgggagcgggaaagtgaccactgagcacagggagcaaagcacagggggccagactgacaggcgggggagtcccgagtcccagctccgttagcacaggcgcttgtacgtgtagatgtaggctttgcagctggggcatgtgtgcgtcacatccttgaagtcattgatgaggcaggggatcaggcagcagcccagatcacatctgaatcagagacagggaagaacaggctgaggcctgctgcggaggaggcagaggcagccagttgaccctggtgcagcccccaccctaccagtgcccacaccacctaccccatgaagcaacagaagaaacccagcacgaaattcatcaagccaatctcgtaggagatcttggtggtgatggcctgctggcagtggggacacaccgtctgcacaggcgctccctcaaagatctctccctgcagcactgtcaccgtggtggcagctcctgaagggaccaggactgtggctgtgtggcccccagggccagggtagggccctggcgtgtagggccctggggggtagtagcccatgggtgggtgggggcctggaggagggtagaaacctggaatggcacagaagatggaggcgagaggtcactggcctgccacctgcaccagacaaagagattggcgcaaagccccacggtccacagcgcccagcgtgcaaggctacgcctcagacctcctaccgccctcctaacgggccagtgggaggccttacagctggggccctaagtcaagtggggccacattctcccagcccttcctggtccccaccccttggggcccatgacagatgtggcagagagccaggcacatggcccggtccctctgctcctctgtctgtctccagcatgcaaggacagggcactcagcctcaagcccatgaccaagagagggaaagccttgcgggtcacccacccctctcctgcacacaaggcgcccctccccacccatgtcaggtcctggtgtgccaaggaccagcccttcctgaccagcctgaataagagcagtcccaccttcccacgtccacagtccctgtccacacacagcctgagccctaggcaagggctggttgggcgtgttggagtccctgccctacagcagatgcccacctgtactgaggacagccagcgcaggccagacagcagccaggagttccccatgctcccctcagatcccttccccactcacccggaggcatgtaggtgccatctgcactcatgtgtggtgggatgaagccaggctggggcattgggtgacccggcggctcatagggtggggggccaatgtccgcagggggcagtggcatgcctggagggggctgcatcacagctggggaggaacggcctggacagagagaggcagaaagaggagactgagctggagcctctgcacgatgagctcgaccagaggccactgttttgggacacagatggggcccaggggtaaccctggagtgggcatcaccacttagagagtcccaaccatgccatggcggcagggggctgcaatatggagcctcaggaacagtgaccccctacctggggtgggcggggctccacttttctcttccagaagtggggctgtggggcccccaggataaggagggggaggctcgctggacatcttcgctgcttctcctggacatggagggaaaacccagacatgaactaagctcccagccaggttccttctccttcagccctgtggggtggccaagatgctgcacaaggcgtgtgaccatcctcagaagggtctgcctccaggcactggggatcccccacctttcccagggccacctagcccagagccaccatcctcacctctcagtagtcacctgctcttccctgtttggaagctgaagggcaaggacagaacccaggaagcagggcccagtgaggtaaagtcccccaaggagcctaactcagcacttgccccacacgagagcagtttggcaccgagctctcccctccccaaacgtttagcgggcactaaggcagtcggaggagacactggaccgatctctgccacaggctgcactgggaatgggggttctgggggatttcttacctcaaatccgtgctactcagagaagggaggcaggtgaggctccttcagctgctggcctggatggacagggaacaggcagggctccgggagctgtttcaggggaaggaaaggcagggccctcagcagggagcaagggctgccaagccagggctgggcccaggggcctgggcataccacacagttcctccccttccacatccggcttctccctagctgtcactctgccatccacacacccgaccacccctccattcctcggtcccgtcgcaggtctgcttcctccctcccccaggactgctggcacccaagggccacggctgggccctctgcctcccctcccaccaggcctgagctcccatgcatgaggactggactgccaggcaagctgtgctctggcctgtgcccttctggtttgtttgttgaggtgggggtcagggggaagaagagtcaagtgaaatcttttccctcatttctgtcaccaaactctctgagcacagctcagaaaggtgggaagcttttgctcttacttagcatcataaaggacttgggaagtggggttcagttaccttagctaaaagtaataaaatgagacaaaaatcagtttcagtggaacaaaaaatacagggaaaggagtgtttcccagacagcccagcacctgcaggggatggagggcacataagtttgaatataaagtttaacaaatcaggggcagggccagaggaaccaagtccaagctcttgggttcaactataaagtaccatggaagtttgaaaactgaaagagatcaaaaagctgttagaagaaaatgcaggcatcaatctttatgaccttcgattaggcagtggtttcttagatatgacaccaaaagcaaagcaacaaaagaaagaaaacttaaagtggatgtcatcagaatgaaaaactcttgtgcttcaaaggataccatcacattttataattcatagatctgataaaggacttgtattaagaaatacaaagaactcaactcaataacagaaagacaacccaatttttaaaaggatttgaacaaagacttctcaaaagacaaatggccaaaagcacatgaaaaactactgagcgtcttttcataagggaaatgaaaaccaaaaccacaaggagaccatttcctatctactaggatggctaaaatttaaaaagacagtaataggcattatgtagaaaaactggaaccctcatacactgctggtaggggacagcccctgcaaaccttttgaagaactgccagcccctgttccccttttgaggaacagtctggcagttcctcaaaaggttaaacctagagttaccagatgacccagcaattccacccctagttatctgcccaaaagaaatgaaaacctgtctacacagaaatttgtacacaaatgttcacagcagcatgaatcataatagccaaaaagtggaaacaacccaaatgtccatcaacaaagtggataaacaaaaccgtaggctgcccagacaatggaagacgattcggctataaaaaggaaggaagcactgacaccctacagcatgaactctgaaaacatgcttggtgagagaagccagacacaaaaggccacatactgtatgatttcacttatatgaaatgtccccaataggcaaacccatagaaacggaaagtacattagtagctgtttaggtctgggggagaggggaaatggggaacatggaatctccttctggggtaacgaagatgctctgaaaccgattgtagcaacagttgaacgattctgtgaataactaaaaaccactgaattgtacactttaaatgggtgaattgaatggtacgtaaattatgtcaataaaacttatttttaaaaaaaatgagggaaaagaaaattagtcctactgcagcccatctccacatgtccctgctggtctgtatgcacaggcacctgtaccttttggttttgttttgtagagacgggggtctcactatgttgcccaggctggtctcgaactcctggcctcaaacaatcctcctgcctcggcctcctaaagtgttgggattacaggcaggagcaactgcgcccagcccataccatataaaaatatagttgctgtcctgacagttttaa
